United States Patent Application Publication US 2015/0315605 A1 - sequence listing, part 11

SEQ ID NO: 17038 - DNA, 617 bp, Zea Mays
gtttgtacttctaccaaagaaacaaaggtctgcaacaaaagtgacatttccacttgtctggacaaacacctgctgtagccatcctctctaccgcgagtcagagttgattgaggaaaattgtgcagtggattacctcctgttcatggttcgtgacgtgaagctcaacccgaatcctgaagaggtggccgacgtcaagtacgtgaaccgcgatcagctgaaggagctgctcaggaaagctgatgctggggaagatggcgttaagatgtccccttggttcaggctggtggtggacaacttcctcatgggctggtgggatcatgtcgagcaagggactctgcagggggcagcggacatgaaaaccatccataagttgtaagcctgtagtcttgtagatccgcgaagcacgtgctgtgctccgttgagaaataagcgtttctgcaggtgtttgcgctgcctttgttttagccatcattctgatggaaatagtcgataaagtcataatagagtgttcttaaatagggaacagaactatttatattgaaacccgtctatgatgtgtaaatttctaccgaatgaatggaattatggaaatcatagtaattggcgagcaaaagaaa

SEQ ID NO: 17039 - DNA, 122 bp, Zea Mays
tttttcttgaaggcccgccaatagttttttcaaatctgaattttgttgagcttcggcttcaagtttcgcattaagttcttgcttttcttgttcaaactgctcagattggcagagaagcttcg

SEQ ID NO: 17040 - DNA, 1441 bp, Zea Mays
tttccatcgacgacatcatcgactacaaagcatgcaatgtaacaatgccatttaccatatggcaagcagtgagcacctgaagggtgtgaaggatttcctgtggaagcacgggggacggatggatcaggtggtctcgcttaggatttcagaggatgtgcttgccaagtgggagaaaggccctgaatgcttgagcacaggaacgaagaaggggactgaagagctgattggaccatctctgaagcagataaaagcaatggggcatatggctctattagtacagcgtgtcatggagcttccagttctggaagtgcttcacattctgctccatatggaactgtcggcctgcccatcacaccttggggatcggccgaaacacataagctgcagggtgcactgtctacaaactggtttcacagcagtggtactgaaacaaaaggccatcagtctactgtctttgtgaatggcgcaagccaatcactttcttgttctgatcatatgttacctttgcgggttcaacaaagtcacactggaggaaatttgagcaatggctcaaaagcaaatgtgcatacgggtgctcctcctccctggttaaaagctaacgaacacgatccaaagaatttgtcactcaaaagctgtggtctttcttcccggaaagggaaattgaggaaactcaatccaaacagggttggtgctgcatgggcagaaagaagaagagctgagatggaaatggagaagcaaggtgaaattgttccagcaacatctgattctagttggctgcctaattttggtagtgtctggcaatctggcacaaggaaggaatcaaggaaagaatttgagaaaagccacaagattcatgacacgaagagcgaccatgacttatccttggagataaaaccatatatcagcaaacggatgcgtgtaggtgctgagaaagcttctgacaaagctgaagagcttggcagccacctaccgcagtaaacagatgtacaacccggtggatgtcgtcgcgtgggcgtctctgcggaaaaagccgccagggcgcgcggcttgattagcgattggtttggtttccatgtcaggtcgcgcctgggaagcccgccgcgagtacggaatgccaagccagtagtagtttttgttctcggcacgaagccatttgatgttcgttttgtgcgacggtttgcggcttgatcgcgattggcctcgtagcctttttgaccgaacgagagaagcagcagctctgcaaagctacctccaggttcattcgagacggtaggctgggagggatagcgtcattgcggccaatggttttcggttcttttccacttgtgcacgacgtcataaacccgagaaaatgtttacagcctcacagggcacctctcagagaaccagagactccggttccttgggggtaaaaccgtaaaatggccgccgcttgtcttgt

SEQ ID NO: 17041 - DNA, 1746 bp, Zea Mays
tcatcgcctgcattcctggtacggttgttgtgttactcatgtatgtatgtgtcgttcaattcatcaatcaccacagcgcccagcgcgaagctgttgcccgcaagcaacgtcatcctcgtccgtccgtcgtccttgcgttgttgctgcttccatgcagcaacgcgtctccatctcgcgctactatataaggacctccccggtcgtccccatggctacaacacctcatcatcacaaacacagccagccagccatcactgatcatagcatcagcagcttagtataccgtaccgctccacatccccgagctagaagaagaagcccggccagtacctacatctgcctagcggcgcgagcgaagctagcagagatggcgagagcgctgccgctggtgctcgcggcgtccgtcctgctggcggccgccgcgctgctgctggccgcggcgccggcgccggcggccgcggtcgacttcggcgcggaggacctggcgtcggaggaggcgctgtgggcgctgtacgagcgctggcgcggccgccacgcgctggcgcgggacctgggcgacaaggcgcgccgcttcaacgtcttcaaggccaacgtgcgcctcatccacgagttcaaccgccgggacgagccctacaagctccgcctcaaccgcttcggcgacatgaccgccgacgagttccgacgccactacgcgggctccagggtcgcgcaccaccgcatgttccgcggcgacaggcagggctcctcggcgtcggcgtcgtcgttcatgtacgccgacgcgcgcgacgtcccggcctccgtcgactggaggcagaagggcgctgtcaccgacgtcaaggaccagggccaatgcgctgctgggcgttctcgacgatcgccgccgtggagggcatcaacgcgatcaagaccaagaacctgacgtcgctgtcggagcagcagctggtggactgcgacaccaaggccaacgccggctgcaacgggggcctcatggactacgcgttccagtacatcgccaagcacggcggggtggcggcggaggacgcgtacccgtacagagcgcgccaggcgtcctgcaagaagtcgccggccccggtcgtcaccatcgacggctacgaggacgtgccggccaacgacgagtcggcgctcaagaaggcggtggcgcaccagcccgtgtccgtcgccatcgaggccagcggctcgcacttccagttctactccgagggggtcttctccggcaggtgcgggacggagctggaccacggcgtcgcggcggtcggctacggggtcaccgcggacggcaccaagtactggctggtcaagaactcgtggggccccgagtggggcgagaaggggtacatccgcatggcgcgcgacgtggccgccaaggagggacactgcggcatcgccatggaggcatcctaccccgtcaagacctcgcccaaccccaaggtccacgccgtcgtcgacgaggacggctccagccacgacgagctctgaattgcgcactacactactacgtactagctatagcctatatagctatactatgattgatccatgtatgctcggacaggaacatcgccgactgtgaatgtctgaatggcatacgcacatcgtacacctgcattcatgtaataccagtcgagagttgatctaccagcaactttcatttcattcggttattattatattatttaactactgcttcctccgtccatatcagtttgtctttttgattttgtccta

SEQ ID NO: 17042 - DNA, 2989 bp, Zea Mays
tttcgtccacctgcaactctcctgtcctgcaagagagttggcatatgaacagttcgtgttttgtgatatatttcaccaaaaggaatcaggatggagagactgctcattttgtggcaagcgcctccattgtggatgtgttgcttcaaagaactcttatgatctacttgacagtggaggaattcaatgtgtcacttgcatgaaaaattcagcagctcagtctgcttctggacaagtggttccaaagctctttccatgtccaaacaatctgctgttttttggtaaaagcgacgagttattgtcaagcagaaaatttgaacaaccaccctctcttatgttggattccagaaatgatgatattgctattgtaaataagagtagtcacctgttcatggtaagcggcatagaggctggacagagcagtaacatcttgagacaaaaagagatagagaatggtccaaggcagattaaatgggaacaaccaacccttaatattggggacatgggaagacctttactaactaggtctcaaagtgcattagagtcacctcagtgtactcgaagagatgacaataaggatccaactacagatagcacaacaagtgaatcgtttccagaggcatgtctgagcatgaacctaggtattgcaaacaatggaaacaggatggaggctacttcaacagcggaaagacctatgctatcgccaacgacagccattgctgaaggaagagaacttaccactgcactgtccccctttcagcacgcacaaagggctcggcatttcctgaccagaccaccaagggttggtgagggtgcagcttttgatccaactagagacatgtttccgcatcttcgtgttgctaggccacctgctgaaggaaggggccgcaatcaattacttcctcggtattggccaagaataacagaccaagagctgcaacaaatatctggagattcaaattccacaatcgttccattgttcgagaaggtcctgagtgcgagtgatgcaggccgcatagggcgccttgttcttccaaaagcttgtgccgaggcatattttcccccaatttctcaaccagaaggacgccccttgacaattcaagatgcaagaggaaaagaatggcattttcagtttaggttttggccaaataataacagcagaatgtatgtcttggagggtgttacaccatgcatacaatcattgcaattacaagctggcgatacagtgacctttagtcgtatagatcctggagggaaacttgttatgggctttcggaaggccacaaatactgtcagtctgccagactcacagatttcagctattgcgaatggttcccttctcagtgagacactcttttctactgcaaatgaaagcataggagtattggaataaggcagataaatttggcagcaggccagatgaggggtctttgcaatttctacaaaaacgaagtcgcaatattggttccaaaagcaggaggttcttaatcgacgctgaagatgccatggaactaaagcttacctgggaagaagctcaagagttgttgcgccctgctcccactgcaaaaccaactgttgtgatgattgaggactatgaatttgaagaatatgatgaaccccctgtctttgcaaagagatcaatttttaccatccgtgcaacaggggaacaagaccagtggattcaatgtgacgagtgctcaaaatggcgccggttgcctcttaatgttattgttgcatccaaatggacatgcaccgacaactcatgggacccaaaatgctgctcctgctctgcgcctgaagagttgaccccaaaagagttgcaaagtgttatgcagcagtatgaagaaatgaggaggcgaaagggcagctatggtctgaagctgaatgtcgctgaaatggatgcatccagctttgacgccttggccacgggtgcagtattcggtgaagtcgggaaccaaggtacggcttcagtcgcgacgaccacaaggcaccccaggcatcgccccggctgcacatgcatcgtgtgcatccagccacccagtggcaagggcccgaagcacaaccctgcgtgcacctgcaacgtgtgcatgacggtgaggcgccggttcaagacactgatgatgaggaagaagcagcggcagtcggagcgagaggaggcggaggcaagcaagaagatcgcgtgggtgaacagagacgagcccgaggggagcagcctgtcgagatccccgcagacgctggacacgacccgagacagcagcgatgtcaccatgttcgacaaggtggccgccgacgtgaacaaggggcacatcgacctcaacttccaccctgcagcccctgccgtccgtggcgctggcgaccagggacagaatggcgcgcagcagccccgggcggtgagcatgatgggcctcctggaagtggcgagccggccccttgataactacatgaagcagaacggcctgacgagcctggcgggggagcaaggaggtggcagctccagcacggccacggtcccgccggctccagtggagagtgaggaccggacgtccgatgagggccgtgtcgcgtcagcagagcgggaagcagacgccatggccatcgacgaggccggcgagaaccagcaggacaagcctgccgactctgccgctgccgctgctacttgacggcgtgcgtctgttgtgaaagtgactgatgggtgttgtcagcgtgctttgatggtttcaaggtgttgctcctggaggctggagttacttacgtgtacgtatgaggctgtgcaaccaacccccaggttgtatgttgtagaagttctgtaaaccacgatgctcttgtgttggttgctgctgtaatctaaaaacgcttagacctttggattcaataactcaccacatacttgatctgtactgtacatctcatctaagacatcttttggaaaacaggaatttcacaggagtcacggacggactcagtgcttaagtttaaatatacatgcctttta

SEQ ID NO: 17043 - DNA, 1075 bp, Zea Mays
  misc_feature (1074)..(1075): n is a, c, g, or t
aaggccggattggtccagggccgtcgacgcttcacggtcgggtgggtttcggggccacctcagccgccagcagctagacggccctatcctcgctcccgcggccgccgtctccctatcctgccgcggcggcgagcacgtgcggagctgcgggcgccaccagacaaacccgctcattcgttcagcccccctgcccggagcaatggaggcgctgcgggcgtggagggcctcctccaatctcatcggcttcgcggcctcccgcgccgccgcctccgcttcaaggccccttggcctccgtatccgctgctgctccgcggccgccgccaccacgaacccgccggcgcagcctcaggaccgccgacgccgtagtgcctcctcatccgcctccacctccgaccgcgactccatccgcgccatccgcctcaaaaaagttgatgagctcagagggaagggttatgagccgtacgcgtacaggtgggacaggactcacacgaccaaggcgcttcaggaacagtacactcatcttatgaacggtgaagtctgcgaggacgtgtcggtgtccgttgctggccggattgttgcccgaagagcatttggaaagcttgtttttatgactgtaagagatgatgcggggactgtgcagctttattgtgagaaagacagccttacggaggaccaatttgagcaactaaaggcgtttattgatattggtgatatattaggtgcaagtggatccattaaaaagacagagaaaggggagctatctgtttatgtgaaaaatttcgaaattctcacaaaatcattactcccactaccagataagtatcatggattaactgatgtggacaaacgttatcgtcaaaggtatgttgacatgattgcaaaccctaaggtcgctgatgtattccgaactagggcaaaggtattgactacatgtgatgctaaatctgtattttgaaactgttgggcaattaactacacctattactaatttactattatagtttagtttggaaactcttatatcattttaagggcccgtttggcaaagctccagctcctgcttctttagctctnn

SEQ ID NO: 17044 - DNA, 1532 bp, Zea Mays
ttgttactctttaaaggaagctattctttttagaccatttagaagggctactcaagagccggagctagtttggagccctctcaaacaggcccgtccgaatccaaaccaagtttttagtgcagctcggcgcggaggacgtggcgctgatcgagtacgcgaagctgacggggcgtcccttccgggtgttcagcctggacacggggcggctcaacccggagacgtaccagctcttcgacagggtggagaagcactacggcatccgcatcgagtacatgttcccggacgccagcgaggtgcaggagctggtgcggaccaagggcctcttctccttctacgaggacggccaccaggagtgctgccgcgtgcgcaaggtgcggcccctgcgcagggcgctcagggggctcagggcgtggatcaccggccagaggaaggaccagtcccccggcaccagggccagcatccctctggtccaggttgacccttccttcgaaggcctggacggcggggctggtagcttggtcaagtggaaccccgtggccaacgtcgacggcaaggacatctggactttcctgcggaccatggacgtccctgtcaacgccctgcatgctcagggctacgtgtccatcgggtgcgagccgtgcaccaggcctgtcctgccggggcagcacgagcgggaaggccggtggtggtgggaggacgccaaggccaaggagtgcggcctccacaagggcaacatcgacaaggacggccaggcggcggcggcggcggcggcccccaggactgccaacggcaacggctcggcgggcgccccggacatcttcgagagccccgccgtcgtgtccctcacccgcgccggggtcgagaacctgctgcgcctggagagccgcgccgagccgtggctcgtggtgctgtacgcgccctggtgcccgttctgccaggccatggaggcctcctacgtggagctggccgagaggctggcggggtccggcggcgtgaaggtggcccggttccgcgccgacggcgagcagaagccgttcgcgcaggccgagctgcagctgcagagcttccccaccgtgctcctgttccccagccgcaccgcccggcccatcaagtacccgtcggagaagagggacgtcgactcgctcctcgccttcgtcaacagcctccggtgaggcccgccagtgagcgagaaccatcgttctctgtcagtatgtactgtattacatgttggtatccatctaggtgcgctgtacgtagagagggaggcggagggaactgggatgctagaaaaaacagatgcaggtgttgcttgtaactgcagaatgatggtaggtatgcatgaagtctgaggtcctgtgttatttggcagctgagggagagatttgtgcgtgcttgtagttgtagctagtggcgatggagtattctaaggaaaatcaaataagaatcgaagttttgagagttcttgtttgttcatgttggctgtcgactatatagacagtagaaagcgaagatttttatttataccttgtgcg

SEQ ID NO: 17045 - DNA, 1025 bp, Zea Mays
cgcaaacggggcccggcatccgttccatccccaacgcccccatcttatcatcttcccccggggaacgtgtggcgcccgtgccccacttcatccgcgcgcgcgtcagagactcagagcccaagcatagacgtgcgccttcagcagcgcgcagcgacgtcacctgagcgcgcgacacgccccagcgtccacagttcactgcgcgcgcgtcgtgcaggacaccacaccatggcacctgccgcccctgctgccacgggcgcggcgagccccgccgtcaccaagggcggcggcaaggttgcagcacgctccgtcaggctggggctgcccgcgctgccgccgctgcccggcctcagcctcgccgcgcagggccagacccgggccgcgtcgtccttgtacaagcggctggcgagggacgtggtggccatggccgcgggggagccggcggcgcctcaggctgccaacgaggagctgaccgagttcgtcgacgcgttgaaaaaggagtgggacaggatcgaggacaagtacgcggtgaccacgctcgccgtcgccgccacgcttggcatgtggagcgccggtggagtagtgtcggtatactgaacgtcctttgcccatttcgacggatggcactggatcctgtctgcgtgtgtagatagagtaactaacgagtgtttatgtttggtgccactacctcgcaggcaatcgataggctccccgtggttcctggtctgatgcaggccgttggaattggatacagcgggtggttcgcgtaccgaaacctgctattcaagcctgacagggatgctttctttgcgaaggtcagggagatctacgaggatattatcagcgcttaacagatgggagcaccaatgcaaagctcatccaaattaatgaagttcactttaagacatccttctagtttgctgctgttcagttgtttttgctgtgatgtatttcagtgtagcttctaatttggtccttactcagtgcacgtatggataagtaatttggacgttaaatttaaaaaaaag

SEQ ID NO: 17046 - DNA, 1509 bp, Zea Mays
acaccaccattcacttgctctcttcccttccaaagaaaggctcttatcttatcaatggctggcatctggcaaaaaacatttgggcacattaatcgctatcaagacatgaataggaatagctgataggacaaatctgacccagggtactgcagatgctgtaaggcagtacttgtggttgtttgaggagcataatgtgatggaatttctaattcttgctggcgatcacctgtaccggatggactatgaaaagttcattcaggcacacagagaaacaaatgctgatattaccgttgctgccctaccgatggatgagaaacgtgcaactgcatttggcctcatgaaaattgatgaagaagggaggatcattgagtttgctgagaaaccgaaaggagagcagttgaaagcaatgatggttgacaccaccatacttggccttgatgacgtgagggcaaaggaaatgccttatattgctagcatgggtatctatgttttcagcaaagatgtaatgcttcagctcctccgtgaacaatttcctgaagccaatgactttggaagtgaggttattccaggtgcaaccagcattggaaagagggttcaggcttatctgtatgatggttactgggaagatatcggtaccattgcggcattttataatgcaaacttgggaataaccaagaagccaataccagatttcagcttctatgaccgttttgctccaatttatacacaacctcgacacctgccaccttcaaaggttcttgatgctgatgtgacagacagtgttattggtgaaggatgtgttattaaaaactgcaagataaaccattctgtagttggactccgatcttgcatatctgaaggtgctatcatagaggacagtttactaatgggtgcggactactatgagacagaagctgataaaaaactccttgccgaaaaaggtggcattcctattggtattgggaaaaattcatgcatcaggagagcaatcattgacaagaatgctcgaattggagacaatgttaagatactcaatgctgacaatgttcaagaagctgcaatggagacagacgggtacttcatcaaaggtggaattgtcacagtgatcaaggatgctttactccctagtggaacagttatatgaagtgaacgtgcgacatgcagctgtgtgtctcgacattcgacaatgatcagcacctggttacatgcgtgatctgcagatcagtctgttggagatcatcggagcaataaaagtgtcatccaaggcattttttctttctttttgctcttttgtgtccttcaatgttgtagggtagaatgttgtagcagcaaatgttagttacatgttgaatcgacattgggggcctggatttggggatacatcatgctgtaaattgatcagtttaattaccatactgtgctgctttgagcgaagccatggagaccatgctccacttttgtgcctgacgaatataagcgttgctggtttggagtgcggattttaaagat

SEQ ID NO: 17047 - DNA, 2419 bp, Zea Mays
gttcaattagttttcactagctatggcacatgctgcatcagctattctgaacttcagtgaaaactgcagacctgatattttgacaccatacttggatgtaatagttgggaaacttctattgttactccagactgggaaccaaatggtgcaagaagctgctttaactgctttagcatcagcagcagattcttctcaggaacacttccaaaaatattatgatgcagtaatgccatacctcaaggctattctcatgaatgcaactgataaatccaacagaatgttgcgtgccaaatccatggaatgcatcagtttagttggtatggcagttgggaaacaaaagtttaaggatgatgctaagcaggtgatggaggtccttatgacactgcaaggatctcagatggaggctgatgaccctataacaagctacatgctgcaagcatgggcaagactgtgtaaatgccttggtcaggatttcttaccatacatgagtgttgttatgccccctctgctccagtctgctcagctcaaaccagatgtgagtgtcacttctgctggaccagaagatgaaaatggtgaatctgatgacgagggtgtcgagactattacactaggtgataagaggatcggcatccgaactagtctactagaggagaaagctacagcatgtaacatgctgtgttgctacgctgatgagctcaaggaaggatttttcccatggattgatcaggtcacgactacgcttgtacctctcattaagttctattttcatgaggaagttaggaaggcagctatttcagcaatgcctgagcttctacgttcagcaaaattggctatagaaaagggccaagctcaaggtcgtgataaatcctatcttaagcaactgtctgattacatagttccagcccttgttgaggccatgcataaagaacctgagccacaaatttgtgcaagcatactggaatcattgaatgaatctatacagctatcaggaacacttcttgatcaaaatcaagtaagatctgcagtggaaggtgtcaaagaagttatagttgcaagcactaacaggaggatagaacgaacagaaagggcaagggctgaggactttgattctgaagaagaggagctactcagagaagaaaacgaacaggaagatgaaatctttgaccaaattggtgattgtctaggcactctcgttaaaaccttcaagacttcttttattccgttcttcgatgaactctccatgtatttgacacctatgttgggtaagaataaatcaccagaagaaagaaggattgccatatgcatttttgatgatgttgctgagcattgccgtgaagcagcagtattatgatacataccttccttctctattagaagcctgcatgagtgaaaatccagatgtcaggcaggctgcagtgtatggaattggcatttgtgccgaatgtggtggttctgcatttaggcctcacactggggaggccctatccagattatacaatgtaatcaaacatcctaatgccctggatttggataatgcaatggcctatgacaatgctgtttctgctcttggaaaaatatgccgatttcatcgtgatatcattgatgtatctcaggtaattcctgcctggttaagttgccttccgataaaaaatgatttaattgaggccaagcttgtccatgaacagctgtgtgtgatgcttgagcagtctgagagggagcttttgggtcataataatcagtatcttccaaagattgtgtctgtttttgcagagatattatgtgcgggcaaagatctagcaacagaacagactgccagcaggatggttaatctactaaggcaacttcaggcaacattgcctccttcagtattagcctcgacatggtcttctctacaaccacagcaacagctcgctctacagtccgtgttgtcgtcatagctaacctaaaatagcctcaactgtgtaaagcatatgagtcttcacagcttgacctttcgtgttctatttatgcgcttttgagccagagccagggttcctggggtttgctttcgcgttcatgtgcccttaggttttgtacaaggggcactgcttgcatccggtgtgtaatatcggctgcagttgcagaactgcacggatgtgtacgagactgggctctctccacatcgtcgattaagttgtaaagcagtatatcttgctcgcttagtaattttagttgggttgaaagaattgtaaattaaaacaattttggtagttgattttaatgtcgtatttcttataccatcagcatgggaaattttgtgttcaaaaaaagaagagaaaaagcagcttggttatcttgtgtcgtgtgccttttctcgatgtgtacttattcttcgtatgtatggggatagtaacgcatttgcctagtgatatttaacttt

SEQ ID NO: 17048 - DNA, 442 bp, Zea Mays
ataaataagtgctgtccacagatgggtgtcgataccgtgtaccaattttcctcggatgcctcggatgaagtgagagccagtagatatgaaatccgtgtctacgcatgacatcttgacacataaaaatgctccttccagtcaaccggcatacgttatacgagtttcagtgtcgtgtgtaaataagagaaagaaaaggcattttaaaaacaaaagccatagcaaaagcaaaaaaaggaggaggagaagaaaatactcgatgctgctggagaactacaactcggtgagatggaaacagaaaggtctgggttgtatcatgaggtgtaaactggggtggtgggcgtgtggccgtgtttgtgtgtgtgtttacagttttgtcacctccgctgcttgaattatgatgaccgaagaatggatcacaatgctatagtttgatttcttttac

SEQ ID NO: 17049 - DNA, 1470 bp, Zea Mays
tagttataaatagctggcattggatcttctgttatcctttaagaattcttgaaagcaatgggcgcggttgctgtcaaccttgttcccggagagaaacctgcagatatctactcagaaatagcttctagggtactgaatgttgtatgtgaagactcgatgaaggatcctgctactaacccaactgcttcattagcaagagttttagttgatcaggtggataggaagcttgtcaagcagacagtcatgacatcagtctatggtgttacatacattggtgctcgtcagcagattacaaagagactgcaagagaaagggcttatcacagatgataaattgctgtatgatgtatcctgttacgctactcgggtaactttggatgcactgggacaaatgttccaatctgcccgtggtataatggcctggcttggtgactgtgcgaagatgattgcttcaaaaaatcaaccagtcaagtggacaagtcctgttggtctcccagttgttcagccctacaagaaatataagaattatatgatacgaacttctttgcaatgtctggctttacggcgggagggtgatgcaattgcaatccaaaggcaaaaggcagcttttccaccaaattttgtgcactcactggatagttcacatatgatgatgacagcgattgcttgcaaggagtctggccttcattttgcaggagttcatgactcattttgggtgcatgcgtgtgatgttgatcaaatgaaccagatattgagacaacaatttgtggagctttacagcatgccgattcttgaaaatctgctggaggagttccaaacgtcattccccacactagaatttccaccctgcccaccgcaaggtaactttgacgtgagggaagttctgacttcaacatacttcttcaactaagcttaacaggggaagttctgcacatgaaacatgcataagcaagaaacaggagtcaatcaattatctgcactccagaccaagccaagtggttccaaggaatttgaaatgaacaaacctaaagtagttcctgctgagtttttaggttgatgcagaatctgcttggatgttcaggtcactcattggttgccatgacaactcatggtatactccaccctggagtgcaaaggtaaattatgagatgccagagcagaatactgactgacagttgatcgtgctgacctcattgatcatagacgacagcggaacacaaagttcgctgaatatacgtgtacgttgtaccatcaatttttttgctgtcttaggacttgtagatcgcataatgccgtggcatcaccctgtaataaatgtgtaagatatgatagccaaatagatgtatacgagactagttgctgttgacagcaagttttgaaaagagagacatgaatcaggcagacttcaccggttcactgatgttctgatctcttcctgaaataatcgtagtaccttcattttggtcttgct

SEQ ID NO: 17050 - DNA, 3511 bp, Zea Mays
actactatagcctagctagagccagctgcttgcctcgccctcccctttgcgcgtcgtcgcgctcctcgccgtccccctctctcggaatcggaaggcgatcgatcgcacaaggctgcgtctgcgtgctcggccgccgcccgacccgaccggacaaggaggggagggggcaaaaaaaatatatagttagtcacacgcacgcagcacaggagggaggagagggattgagggataaagaaatttcgggagacaaggagagagagacagagatggagaggagcggctggactcggaggcaggcctttcactactcccgcacccagataacgatgtggtagctagttcctcttaggctaaggtaagcagcagcgccgggagctagctcctcctcactatcctgcatgcttcgttccttcgttcagctttggttgcccggtcgatcgatcggttcttttttgtttcttcgtatacatgcaaagctagctagttggagagttcctttatttttcgatttctttgctttgggagagtgcaattcggttcatcgtcttcttaatttggattctatattcgttttccccgcctggccggtgcttattacgatggtgctgctgctgctcatgagcttcgcaggaaggaggtcgtggccgggatcccgccgatgatgatgacagtggcgccgccggcatgggcgtagcggcgccaccgtacgagaccaccacgtacgtgagccaacgcaccaagatcaacatcgcagcgatctccgccgccgccgccaccagggcggctaccgcggcttctatgtcccactcgcagggattccaccagggcagcgccggcgtctacggctactcctcggatggcttcgaccgcccggacgactccggccaccaggaccatcatcagcagcagcagcacgtggcgcagcagagccgccgcgacaagctgagggtgcaggggttcgacccggccgccggcggcggccacggcctgctccccatcgagggcgacgagcatggcgggcccgggtccatgtacgagcacgcggcggccgcagctggggcctccaacatgctctccgagatgttcaacttccccgcgccgccgtcggggccctccgccaccgagctgctggccagccagatgggcgccaactaccgcttcggggggctacggcagcagcagcagcaggggcccggaggggtggtggctggcttgtccggcgacggcggttggttcgtcggggccggcgcggcgggtcgtgctgctggcttggtcctcggtggtggggccaacatggggtcgttaggtgaaacgtcgtccccgaagcagcagggcagcatggctgggctggccaccgacccggccgccgcgatgcagctcttcctgatgaacccgcagcagcagcagcagtccagatcgtcgccgccgtcgccgtcggacgtccaggtccagcaccacgaggcggcgttccaggcgttcggaaacgccggggccccgtttggcggcggcgccgggaccggcgtcgtggaaggccaggggctgtccctgtcgctgtcgccgtcgctgcagcagctggagatggcgaagcaggccgaggagctgagggtccgggacggcgtgctctacttcaaccgccagcagcagcagcagcagcagcagctgccgatggcattgcacggccaggtcggcgcgctggggcagcagctgcacgtcggctacggccccgccggcgtcgcgggcgtgctgcgcaactccaagtacacccgcgcggcgcaggagctcctcgaggagttctgcagcgtcgggcgcgggcagatcaagggcggcgggcgaggggcctcggcgtctaaccctaacaacaacccgggcaacaagggcggcgcctccagctccggcgccgccgcgcagtccccgtcgtccgcgcccaacaaggagcccccgcagctgtcccccgccgaccggttcgagcagcagcgcaagaaggccaagctcatctccatgctcgacgaggtggaccggcggtacaaccactactgcgaccagatgcagatggtggtgaacttcttcgactcggtgatggggttcggcgcggcgacgccgtacacggcgctggcgcagaaggcaatgtcgcggcacttccggtgcctcaaggacgccatcgcggcgcagctgcgggccacgtgcgagctgctgggcgagaaggacgccggcaccagctcgggcctcaccaagggcgagacgccgcggctgcgcgccatcgaccagagcctccgccagcagcgcgccttccaccacatggggatgatggagcaggaggcatggcggccccagcgcggcctccccgagcgctccgtcaacatcctccgctcatggctcttcgagcacttcctccacccgtacccgagcgacgccgataaacacctgttggcgaggcagaccgggctgtccaggaaccaggtctccaactggttcatcaacgcccgtgtccggctatggaagcccatgatcgaagagatgtatcagcaggagtgcagggagctcgacggctcctcggccggcggcgggggccccgagtccgtcaacgacccctccggcgccgacgactcgcactccccgaccaccaccggcgcagcgcagctcccgcaacagcaacatcacctcggcacggtgcctggggtgatgccccacaagcccgacccgggcgccgccggtccctcggctgcggacgcggcgttcgtcgggatcgaccctgtggagctccttggcggtggcgcggacgacttgtacgggcggttcgagcccggggtgagggtgcgctacgggcccgctgcggcaggcgctgctgccggcgacgtgtcgctgacgctgggcctgcagcacgccggcgccggcaacgccgccgggcccgacagcaccgggcggttctccttgagagactacagcggttgttgatgcttacacatcgcttacatcacctttattcatggctcatgcatgcgcccatcatgcatttggaagagcaaggatcgacgaaagaaagagagagagagaaaagagtaaccagagaagagatagagggcgctagacaaagagagatgagcatctagaaagagaaaaaatgcatggtgcctggaggtgatgaatgggatgggatatatgaatatgagattatcacaaccaccttcgtcgtcttcttcccagatgattcttaatttacttagctagaagattaattccttttgctaggcattgttgttggggggttaaggataattaatttgtatacagcaaaggaagataggaagtgtataattgtttagtcacacttttttggttctttgttttgcatttgcccgtttttgttctggtgtaccaattttccttgtactcatttttcttccctctgtaaactaaacataagagacacatacatgcatacgtaaatacatatattggtaaatatggtcatacgtatagcatatatatgtaaggcctaaaaattgaacgtacg

SEQ ID NO: 17051 - DNA, 198 bp, Zea Mays
tttcaaatccgggtctgtgtgattgtcctcgacaagagcatttggaaggccttcaccatcaactgtgacatacaggaaatgcagtggtggcaacccatctaatttgggagccagagataacaagatagatgatttatttgggcctccatattccactatcatgcaaaattcactgaaggggaatgaagctgggatgtt

SEQ ID NO: 17052 - DNA, 514 bp, Zea Mays
gaaccggctctgacaataggccccaccctcacggcctaacctttctctttctctctctacctcctcgcgcgccctcgtcagaccagccacgcgctcaactccacgggccttgagctagggttttcttcgccgctacctccctacgaggcgggcgtgcagccatggcgctggtgcaggcgggcatgggccttacccgggtcgttatcctcgtcggcgccggcgttgccggctccgtcgtcctccgcaacggccgcctcgccgagatcctcggcgagctccaggagatactcgacaaggggaagaaggtgaaggatggaggagggggagacggggaaaccgatctcaacgaggctcttacctcgcaggtgcgtcgccttgccatggaggtccggcaacttggtaattcacgttcaataactgttctcaatggaggttctgcacaatcagcatattagcgtattagcctatatgcttggcgaaggataggcctgatgccgtctcactgagtcactag

SEQ ID NO: 17053 - DNA, 2262 bp, Zea Mays
cacaggcgcatagtgcgggaagcctacggcactgggtgcctttgtgctctgagcaagtcagcaggtagaggtccaggattagtggaaaaccttgttaatattttctacaagcatctgtgtggagctaattcagatagtcagctgttgggtcgatcactgttttgtcttggactcctccttcggtatggttatcaattgatgctaacatctgaaaatcagcttgattttcccaagatcatcaacttgctccagagaaaatatcttctcaaggatgatttcagcttgaaggttcgagctttgcagactttgggatacatacttattgcgaagcctgaatttatgctacaaaaggatatgttgaatctcatagagacagcactctcttctgaggttgattatagattcaagattcaaggacttcaaaacctctacgagtatcttagagatgctgaaagccaacttactgctgagagtactgcgaaacctcctgggcagtgtgaaataaatggcagaagtgaagtgcctgttgctgctggtgctggagacaccaacatatgtggtggtattatccaattgtattggagttctattcttgaaaggtgcttggatacaaatgatcaagttcgccagagtgcacttaagattgttgaagttgtacttcgtcagggtttagtccaccctattacctgtgtacctcaccttatagcacttgaaatggacccgctggaggggaattcgaagttggctcatcatctcttgatgaatatgaatgaaaagtacccttcattttttgaaagtcgcttgggtgatggactgcaattgtcatttaaattctttgaatccatagtcagcaaccataagatgtccgcaaacataaaatcaaatccaattgcatttgtcaaacctggcatatctagaatataccgtcttatccgttcaaatcgaaattctagaaacaaatttgtccactcgatagttcggaaattcgagtctgatagccggagtcgcagcacagttagctttcttgtatactgtgctgaagttctcgcctctctgcctttcacatgctctgatgaaccactttacttgatctatgatataaatcgagctattcaccttagagctggaggagtcgagggcaatttgaaaaggtggacttctatgtctcagtctcaagagatggcgggtatgccaaccttgccaggagagagtcatgttgtcatgcaagaagagcctggcggatattatgataacatgggagatgccactgaaagggtgaatgacaatccttgcagtacttcagatgtggacattgccaaagttcagggagattgccatgatgcaatagccctccagctacttctgaaattgaagagacatttgaaagttgtttatggtttagatgatgcccgctgtcaggcattttccctgaaggagcccccgaaatctggagaaacattctccaggcagaatgtttcttttaatattggcaacactaacctcagtctgccgagctgcctgcaggacgcagcctctgtttaccaggatttcaagacagtgcttcgcgaagattccatggactttgctgtgttcgtcccttcagtccagactaggaagcgcccaaccccaagaaatacaacgagcccaaccccaagaagtatgacgagagtcaggagaacggctgccccgagtgttacaaaagcccgtggtggtgcacgtggcgacgattccgacgataccgatgacgacgactggaccgggggtccaagagtgctagacttcagtgggggcggccgcgtgacaaggcagagggtccaagtatgatgtttcttttttgcgtgcgtgcgtgtgtacattatagggaagggaaacctatagcaggcttagcagctgacacgagagagttaggggttgaattttaggtttcaggtcgtttattttagggtacatagaagcagaaaggaaaggaagatagccttttacttagatgtcattaatttggagcactccttttcttgctctgcccctgtcctgtttgtaatttccgtggggcttcggcaaaaaactgacaaaataggttgtgctccggtttctgatctctgattcaatgggaaatggaattattccttttgctttgcctgtgtaagcagttagcgcctactccgtctgttccaatatacaatttgttttagcattttatttttgtgtctatatttattcgtttggctttaatccgtatcggtttctatagatgtttttgtc

SEQ ID NO: 17054 - DNA, 6769 bp, Zea Mays
cgattttcacagcctgcacattctactggatgtactgcataggcactaaagaagcgtttaagagctatcaatgaatctcgtgctcaaaagagaaaggccggacaagtttatggagttcctctttctggatctctattaatcaagcctggagtttacccagagcaaaggccatgtaatgaggacacacgtagaaaatgggttgaggcccttgctcagccaaacaagcgactgcgttcattgtctgagcacgttcctcatggttatcgtaggaaatcactttttgaaggtctcattcgatataatgttccattactaagagcaacatggtttattaaagttacatacctgaatcaggcccgaccggcacctaacagtacttcagtagttgcttctgataatcaacgatctaatcaatggacaaaggatgttgttgaatatttacaacagattttggacgaagtttgttctaaagagggtgccattgtacctccatcttttaaagagcagtcatcaccaggacttgctgctggaaccaatcaaataaaaatgaaaacggaatcatctccagctggagacagtgaagaacccttggtgcacttcaaatggcggtatatggttcgcctcatccaatggcatctcacagaagaattgcttgttccctcagtacttatcgaatggttatctaaccaacttcaggagagggattcagatgatgttttagagcttcttttgcctattatacttggtctggttgacaccattactctctcacaaacatatgtgcgcatgttcgtggagctactagtgagacgtctcaatgtcgatcgtccaaaaaggttttcagtttcttctgttatagcagagttactgcgatacatggtacttgcagtgccagatacatttgtttctttggattgctttcctttcccatcatttgtggttcctgatgtatatggtagaggtgctttgttgaagataaccagtggtggtggaattttatgttctaagaggcgtgatgcttatcggtatttgtcctgtggttatgctgtttcttccattcagaaacgtgcacatgatcttgcagcagttgctaaccctagccttcaagcacgtggtgcagccaaagtggtacaggctttggacaaagctcttgtcacaggaaatttgtcagtggcatatttttcactctttaatgatttatctgatgcgttaatggaagaaagatggattaaagaagtgaatccctgtttgcagtcttctctgatgtggattgggactgttgagctatcccttatctgttctatatttttcctttgtgaatgggcgacatgtgattaccgtgattgccgagcatctccctctcagaatgtgaaatttacaggaagaagagatttgtctcagatacacatggcagtgtctatcttgaagaataaaatggatgagatgaataacttgtctcgtcctaagagtagtactcgcatcacccttaataaagttgccaaaggttctttgaatgatgcttgtttgacagcagctgctgtggatgattcttctggactgagaagtaatgcaaaaaatgttgatgagaagaaggatacaaatgatatctttgaaagccctggtccactgcatgatattattgtgtgttggttggatcagcatgaagttagcaacgttgcaggttttacccgggtggatgttcttatcgcggagcttatccgcaatggtatatttttccctcaggtttatgtcaggcagctaattattagtggaattactgataagaacgatacaatgctggatgttgaaagaaaaaggaggcatcacagaactttgaagcagcttcctgggtcttctttatttgatgttcttgaggaaactaggactgcagaagagcaacagctatatgagatgatgtcaacatactctagtgagcgacgccttgttctctcagaactttcatgtggtcattcattttatgcaagtggcagaggtgagtacacttcaagttcctgcattcggaagcagagtgatcttccagttgcatcagaaggtgataagcatggaagagtgctagaacaagtagaagatgttaaagctcttttgtcaagtctgttgggttttacatatcctcccctagtggaatcaaaactttgtgaaatcaaaacaagctttcaagaatcagtaacgtcaacgctcacacaagttgagactggggaagccaaaagtggatgcgaggattgtatgaggtccaaggggcagaaattggatgacagcgccactcctttccaagggtttccattgattcaatcaggcgaggaggatatttggtgggtgaagaaagggacaaagttacaagaatctttcaacgttgaacctgtacagaagtctgttaagcaaacttctagaggtagggcaaaagttgttcgtaaaacacaaagtcttgcacagcttgcagctgctagaatcgaaggtagccagggggcatctactagtcatgtttgtgaaagcaagatgagctgtccccaccatgaacctaataacgatggtgacaacgtcaaagattttgatcacacaagggcagcaaacgtgactgcaatagggaagtcactaaaaagacttagattgctcgaaagacgatctgtctcttcatggttgttgaaatcaataagacagcttgttgatggaaacggaatgacagcttctaaagctaccaattctataagcatccttcctttgcagcctgatgataaaactgcatccaaatggaggctaggtgatgaagaactgctgtcagttctctatgtactggatacatgctgtgattcagtctctggagtgaagttcctcatatggttactagtgaaaattcgtggagtgggctcctcaggtcaacctgggaggacttatatgcttatgaggaacagagatcaccaagtttgtcaggtcaacgaggcacttgtgttctcatctctgcttaggtatgagaacatacttcttgcgaccgacatcttgcctgatgttctaagtgctttagtgaacagaaattctatgtcagcaactaccaggcatcctggttcaacagcttttgcttatgttcgatattttttgaagaaatatagagatgtggctagtgtggccaagtgggagaaaaactttcggaccacttgtgatcaacgcctgttagctgagcttgataatgggcggtccattgatggtgatttggtatcttcttcgggtattttagcaggcgaggagattgatgagcaggtccgccaaaagttgaatggaaggagttcaagactcgtgcagaatatgaaagagatagtgcaacggcaagctgatggaattcagcgcagtttaaaggaaaagaaagttcttgcaggcgcagcacccaggaatccactcacttttgagaaagaagatagttatcaaattgcacatgacattgttttgggcttagtagaatgcatcaggcaaaatgggggtgcaaatccagatggagacctttcaatagttgcttctgctgtttctgcaatcgttgtgaatgctgggcatatgatagcaaaacatttggattttgcaggaggaaactatcaaggtgttaattctgtggctacttcgctaaattttgttcggcacactttacttattcacataaattctctttgcttactaaaagaaactcttggagatcgcttcagccgtgcctttgaaatagctctggcggttgaaacttctgcagctgttacagcagcttttgctcctccaaagatgcaccgcaatcagtttcaaccatctcctgaggcccatgatgcatatggaaatcatacaagtgagctcagcaactcagggaaaggttttgttgggagaactgcaaaagtatctgctgctatttctgctcttgttgtgggggctgttgttcatggagctgttagccttgagcggatggttgctactctaaaaataaaagatggtctggatattatgcagcttttgagaggtttgaaatcaaatacgaatggtgtatcccatcctactggaggttttaggattgaaaattccacggaagtttcggtacattggtttaggattttattggggaactgcagaactgtctatgatgggcttattgcagatattcttggagatccatacattattgcactctcaaggttgcagcggatgcttcctctaactgtaatttttcctccagcctactcaatttttgccatggttctttggagacgatatatttttaactgtgaagatccacaactttatcagtctttttcaaatgcaataaacgatattaccagacatcagccttttcgagagatctacttccgtaatacacatcggctgtataatcttctggcttctgatgttggtgattcgaagtttgcagcaatgcttgaaagtcatagtccggaccggaattcaaaaatattgccatttatacctctccgtgcacgcctttttctggacgctattattgattgcaacacaccaactattcagggggatggtgcttcagagccttgtgatcccaaagataatgaactaaagctttcagagaggcttatgcaacttcttgatactcttcaacctgcaaaatttcactggcaatgggttgagatgaggcttcttttagatgaacaggctcttatggaaaaagttgcagcaggcaagacaacacttgaatcacttcggtcattatcccctaaagctgagggttttgccctttctgatagtgagaaaggatttactgaagtcattctatcaaggctacttgctagacctgacgctgctcctctgtattcagaacttgtccaccttcttggaaagcttcaagagtcacttgttatggatgtaaaatggattctacaagggcaagatgctattcttgggcgcaggtcaacaagacaacagcttgttcatattgcccaacgaaaaggtctttcaacaaaggcacaggtttggaaaccatggggttggtccagcttgcttagcgatgccattcctaataaaactgcaaaaaggaagttggaagtcacatcaattgaggaaggagaagttgtggatgacactgttgatgctaaaaggactaccaagactccccctcatagtgttgatagaagctttgaagggattagatcgataaataaatatttaactgagaaagcccttgctgaattagtattgccttgcatcgacagaagttctgctgatatccgtggtatactttctgttgatttgaccaaacagatgggggctattagtgaacatatcaaagcaatagcattgaatggtgctaaacaagctggttcagtttcttcaggaaatgaagtgccatcgaacaaatcaagtggccgtagaggaattcgaggtggaagcccaaacattggtagaagagctccggttggtaatgacccaagtcctccttcggcttctgctctgcgggcagcgttgtggttacgcctccagttcatcattaggttgcttccagtaatcatggcagataggagcatgagacatacgcttgcttctgcaattctaggcctgcttgcaacgcgcatgatttatgaagatgcagatttgccccttcctcctaccaacgcaactgctttaaggcgggatgtggattccttgctggaacctcccctggatgtcctgcttgaccggcctggcgaaagcctttttgagaagcttttatgcgttctccatgcactgcttggtagctacaaaccaagttggctgaagtcaaggtcagcctctaggtcgtcaattaaaagccaacgagatttctcagcatttgataacgaagcagccgagggcttacagtccgcgttggaccacatggaattgcctgaaacaatcaggcggaggatccaagcagccatgcctcttcttccaccatccaggcgcccttgtatgcaatgccaacctccgcagttgtcgttggctgcattatcaccactccagagcagtacctctggtgtaggtcctcaacagaaaagttcttgtgtgagttgggtgcccactaacgtatcagtcagaagcaaggcagcattgccttctcatgaccctgaaacggaggtagatccatggagcttgctggaagatggcacaaactgccccccctccacagcatctggaagcaatggctcgagtggagtgacgggagaccatgctaatctgaaagcttccagctggcttaagggtgccgtgagggtgaggaggacagaactgacctacattgggtctgtagatgacgacagctgatacgtgtatgattatcttggtgaattggaggcaaagaatttggtctcacttgttggcatttgtgtcgtgtgcaagttaaaagcaccaactgcatcgaattctttgagagctctgtaccacaaggtggaatggaaaccatatggcttttggttggttgttgtagtgttagaatacatcgctgcccccgatttgttttagttagggcctgtgggggcggctgtatatagttggaatccatttctggattcaatgggggagcttatttgagaatcaggcaggaagccatgtagtagatttctagccaagagccctgtacttgttttttttttgggtctgagatgtaattgtcatgtcacatatattcttttgatctaaggctgacggaagttgcattgcctatttgctttagctattactagtgcagcctagacatcatgagtttggatcgttctatgactaaaccgtcctactggtttgctgtttg

SEQ ID NO: 17055 - DNA, 1748 bp, Zea Mays
attagtccctctccctccatccctcccgactccgtctccctacccttcccccctccgccgaggcgaccagccccgtcaatccgagactcccacgcaaaccctagccagctagctagccacaccggctgggtccaatggcggaggacggctgcgacagggaccagcagcagcagcagccggcggccgccgcggcgtcaggtggcgccggggtcgaggggcgcagcagggagagcgtcaagctcttcgtggggcaggtgcccaaacagatgtcggaggccgagctggtcgccatgttccgcggcgtcgccctcgtcgacgaggtcacggtcatccgcgacagggccaccagggtctcgcgaggctgctgcttcctgatatgtccatcaagggaggaggctgacaaggctgtgactgcataccacaacaagcgcacactacctggggcctcaagtcccttgcaagtaaaatatgctgatggggagttggaaagattagagcacaagctctttgttggaatgctaccaaaaaatgtaacagatgctgaaatgatagatttattttcaaaatatgggaatatcaaggatttgcagattttgagaggttctcaacaaacgagcaaagctggctgtgcctttctaaaatatgaaacaaaagagcaagctgtggctgctatagaagctctaaatggaacacacaaaatagagggttcaagtgttcccttggttgtcaaatgggctgacactgaaaaggaaaggcaagctcgaaaagcgcaaaaatctccattccagtcttctaacatgttgaatgcaaatgctatgcggcagaattcagtgtttggagctctacagatgggatatgtgccgcagtacaatggatttggctaccagccacaaggaacctacgggcttatgcaatacccacctctatctcctgtgcaaaatcaagctgccttccagaatatggtccagcctattaatcaagcaagctcgacccgtggagctaattctgaacttccccctgatttagttcctagatcatttaattccacacagttgggaagcccctattcgcctctgcctggcttgcagtatcctggagtgtatcctggtggccctattaatcatcgccccttttcaaattctcacagttcaaccaaagttcaaaatttaaatgctaatttaccgtcttcaagtcccagcagcaatcctgccccccagatagagggccctcctggagccaatttgttcatatatcacattccacaagaatttggtgaccatgatcttgcaaatgcatttcatagttttggtagagtactgagtgctaaagtttttgtagacaaggcaactggtgttagtaaatgctttggtttcgtaagctacgattctccagcttctgcacaagcagccattagtgtgatgaatggataccaattaggtggtaaaaagttgaaagttcaactcaagagagacaacagcaagcacagtaaacctttctgacacagcgaattcattgtatgctcacatgatcaggaaaatcggtacatactatgtttcacaattgattattacattgtttcctctggctcttgtatctttgttcaattcacatccttgaaaactgtcacatcgtgtatttttatcgcagcatagttgtagcatttgtaccattagatcttgtacatcagacattaattcattcaattctttatttttaattttcatcatgaatcattttattgtaaataa

SEQ ID NO: 17056 - DNA, 1054 bp, Zea Mays
cacaaacaaaaggttcatcctgtggagccttggctgatcagcatactatctttccatgccattctgctactggttaccatcatctcgaggaggaatatcaatttccagctcatcttgtcagctctaacattttctggtgtattccttgctgagagattaaatacgttcctggcgcaaaactggaagagcttctctacccaaaactattttgatccccagggccttttcatttcggtcatctggtctggccctctcctcctgataacgatccttattctggtgaacactctcgtgacgctctgcacgctaatggtaaggtggaaaagggcagagctcaggcatcgcgctcggcaagctcgtgacaagcaggactgatctgaaacctgcgtctatgtatcattcggtggcaagtagaaagtcgtgttcttgctacggttggtctaaccaagaatcacatccctggaaacggtgcccatttcattaggtagcagaatataacgttaagatggtcagattttgctcttgtggacccttttggtgcccggatagccatttactacgctgcaatattatcacgtcacgcgatttctttgggcgaggacactaggcctgtgataatgatgtgtccatttgttcgatgctgaacctctgaacctcggaaccggttgatagttgttgttttcctagctgtgtcgggtcgggtgcagcatgctctgattgttgattacctcaagaataattcgttggactgctgaattttagccatctttacagatgttccgatctgaaactgtcgctcgaatttcactgcatctggtgtcggtgtgcaagctattcctgatgtttgtgggcacttgaaaatgttctctggttgtactatggactgaatgatgcatggcatccgttgtcagcttcgtgtgtgaaagggggatgctttcttgttttgccagagttgcaagagaggtacacattcgcaatccgtgtgtttggttgcccgtgtcgcctggtgcatggcccatgggatgcagaaataaaacaaactcattgtttggtt

SEQ ID NO: 17057 - DNA, 1053 bp, Zea Mays
gattgaaaaatggatgttgtttcgttcttttaacgaaagcttgctttgggaaacactgactggaaaagaacatcttttcttttatggtaagttgaagaatcttaaaggttctgcattaatgaaggctgttgaccactctctgaagagtgtaaatctatctcatggtaatgttggtgataagcaagtgaagaaatacagcggaggcatgaaaagaaggctcagcgtggcaatctcattgattggggaccctaaagttgtcttcatggatgagccaagcacaggaatggacccagcatcaagaaataacctatggaatgttgtgaaggaggccaagaaaaaccgtgcaattattcttactactcactcaatggaagaggcagaggtattgtgtgaccggcttggcatctttgttgatggcgatttccaatgccttggaaaccctaaagagctaaaggctagatatggggggacatacatattcacagtgacaacacccccagaccaagagatggaggttgaacatctagtgcgtcagttctcgcccagcgcaaacaagatctaccatctatctggaactcagaaattcgagctgccgaagcaagaggtgaaaatagcccatgtttttgacatggtcgagaaggcgaagcgccggctctcaatacatgcctggggactggtcgacacgaccttagaggacgtcttcatcaaggtcgccagaggagcacaagtgttcaacgagtttgcgtagataacacctttaggactgccttcgtagcaagcacgggaccccaattattggatgggcggactgcatagagaatcttgtggttttgtaggtatttttcattagtgagtcattcttgtgtggaaaataggctccatatgcttggtttacgtggttgtacataaataaatacatttttgagactgcagttgcagaatagaataattgtccagttgtgtccatatatattttttctttttcatgtgtggtgctcatgttttacttactccgtatctttaatcagcttattcgattggccttaatttata

SEQ ID NO: 17058 - DNA, 550 bp, Zea Mays
ccacccaaagatctgcaacaacaacaacaacccgcacaacggcacgattctcctcctccgtccgcgtagctctcggtttcggcgatgtcggggcgcggcaagggcggcaaggggctgggcaagggcggcccggcgatccgtaggctggccaggaggggcggcgtcaagcgcatttctgggctcatctacgaggagacccgcggcgtgctcaagatcttcctcgagaacaccgtcaccgccatggatgtcgtctacgcgctcaagcgccagggccgcacgctctacggcttcggcggctaggccgcctccccttctgatgctttgatatgacggccgtggtcggttgtgtgtctagttggccggtctactgtagtttgttctgtatcttcgtttcgaggtgttccagtttctagcccatttggtgtaatattttcacagctattatcaatggaaagccctcggttctatcctcattgttctggatcaagataatccgtttgatatggatacagtacccctcatgcttttactctttgatacgacggtagta

SEQ ID NO: 17059 - DNA, 902 bp, Zea Mays
cgcggggtgggatcccgccggaacgttagggccactgccgccgatcgttttggagaagccgtccatgacgctgagcacggaggtattctagatgggagagatctcgatgggagacggtggcgttcgccggtcgatgcgtgggttaaccgcgctcgggatcgagggtgccgagaaacgaacaaagggagcagcaatggcggcggcctggtgttaagaggtgacctttttctttcttgcaaccgaagccgaagaggagagcgccacctatgggttgagatccaagccggctgggctgggtctcgtgggctagtatatgaaaaccaacggctaggatggattaagaagcgagacaacatcaggtcaaccgtccgatcccctcagagctaggagtggggaccaggggagctgggagtttgcggcttcagctgctgctgcgagcctgcgacctccgaggcggagctcaatggagttatccactcccgtcgggagctcccttgctagaactgcgaccatggccctcgttagccccagcttcaagataaccaatcaaatgtgtgccaggggtatgccacttgaatgccaatttcctcataggctaccatctgtagcttgttcaatgttgttaaacacacaaccttcacaacgaaccaaccataaagattgtggtttgcttcaggtgcaatgtacagaaaaccttatgcagtcgccagtatctttcagtgacttctctgtttcagtgtgtgctcaagaggatggtctgataaagctacaggtaaatgtatctggcacaatgacagattctatctttgagaaagttttcacaaagaatgttgccgccgctcaaccccttcccggctttcgacgaatgaaaggagatgtacttaaaggatactgagttcaat

SEQ ID NO: 17060 - DNA, 96 bp, Zea Mays
gccacacaatgaggagtttgacttgatctaggtggcgtctgccagttgactttatggcgcaaggagggactttagtttgttttatatttatctttt

SEQ ID NO: 17061 - DNA, 557 bp, Zea Mays
gaagatttgagtacttgccggcaaggggaatgctgcagatctttgttgctatcatgaccaaggcgtacccaaatgttgagaggagcgagctgattttgatccaggagatcgctacttacatgcttcttgtgtgtggagctgtctacataatcgcaggtatactatgtcttggtgttttaaaacgttctaggcagcataaagcaacatcacaggagcaagcggccaaggatctggaggagctagagaagaggagagaggagcttgagtctctgttaactgccgagcggtcagagatggcctgatgtcgacctaccatctctcttctggtgtaaataagtgtttttttttttattctctgttgaatgttggtagcatgcatactgctttgccgtgaccatcggtttcatcgccttctctagctagtttggagcatgttgtttcagctgggttctagacattcgtgtaatgcactgtttacttatatgatgatctcctgttgtagatatatgttgcagaaatttacgaatctaagcaaagaatctgggatgattgaggaa

SEQ ID NO: 17062 - DNA, 337 bp, Zea Mays
gccgccgaagaaagtgtataccttccgcctagatcacactcctaggtgctagggttttgcagagtctggtgatgcgaagacgaaccggcggcgtatacgggaccggcggcgtatacgggaccggcggcggtacctgtactccaagagcctcgaggcctcccattgggtgctgttggagaaggagcgccgtatccgggcggcgctagaggagggaaagcccattcctaccgagctccgcaacgaggagcacgacctgcggaagcagatcgacctaggagcgtggagatctccaactcaggcttgagcttggcacatatgcaccaagggagactgctgt

SEQ ID NO: 17063 - DNA, 1381 bp, Zea Mays
cagttaaaggagatttgaaaggatgaggaatataaatttaatccgtcagcagtagctattgatcttaattctggagagtctagggaggctgaatttcgtgcaaccagagtggcttacagtgccatgggttctgtaacactattaactggccaaccaaaggagggtgtttttgttgaagcaagatctgaatccacaggtttttatgaggaagctaccacggattcttttggtagatttcgtcttagaggacttgtgcctggatcgacttactctataagagtggctgcaaaagataatcttcagtttgcagcagttgagcgtgcttcacctgaatatttgtcagttaatgttggtcatgaagacatgactggtattgattttgtggtttttgaacgccccgaagtaacaatcttgagtggccatgtggaaggagatggcattgatacgttacatccgcatctctctgttgaaatcagatcagcaacagactcttctagagtagaagctgtacttcctcttcctctttcatactactttgaagtccgagatttgcccaagggcaagcatcttgttcagcttcgatctggccttccatcacatacacataggtttgaatcggagttagtcgaagtagatctggaaaaggatccccaaatccatgttggtcccctcaaatataaaactgaggagcgtcatcaaaagcaggaactgaccccagcaccagtttttccgcttattgttggagtttctgtggttgcactggtgatcagtatgccaaggttaaatgacttataccagagcgctgtagggatgacttctctgggttcagggatggcaccgaccaaaaaggagccacgcaagaatatattaagaaagagagtgtaaatggcagattagcttagccttaggggtcgagaaatgagacatgacaaattgagcaatttcaagagtggaatagcttctggtttccccctcgggtaattttgccgacgaaaaggaatgccagttttgttgtacgatagcactatgcacagtttttgaagccttagattgtgccgttttgcagttttagactataaagaaagagttgctgcatcatgaatgaactttctcaccagtcagcatgcacgatcgaataggttaatctgagcggtccaggactaagtagaatagacaagtttgttgtggcacgttgtttgcccctctttttgattgtacaacgaccaagtaaagcgtgcgcaatgacttctctatgacttacggatctggttcgccctttagcatatgtggtctagcgtggagcgtttataatataaatttaaatagtttttaaaattatttttaatgtaaataataaataaatatgatttatctaagcgtg

SEQ ID NO: 17064 - DNA, 2006 bp, Zea Mays
ttcggggtccttgctgccgcaccattagtggagaattcttgggatgaggacatagataggcctcttctttctgaaaatcagagcgatcactctagacagaatattagttttcttggaagttctgtaggagaaccttcgaagattcaaacaaataggagtaacacttcgcctagaagtcatgcaattgctgatacagggaggatttatcctgctgaatgttgtgttacacaaggagaaactcatgtaatcaatgttgaaaatgatacttctgaagagttccaattaggaagcacactaagacgtacaccgccaccaaaatggccaacacctgaccagaagcacagaagaagggtttctggagatgacaatcataatggaagtgttcctttgaaggataatacatatcatagccgcctggatttagaggttatagctggtccatctcatggaataagctgttctcggcagtcaagtagaccttctatgctcccaataactcttggaagggttcccccaagtgatttagtgttgaaggactctgaagtatcagggaaacatgctcagataaactggaatggaaagacattaaaatgggaacttgtggacatgggcagcttgaatggaactttcttgaactcccaggcggttcaccatccaagtgctgggtctaggcattggggtgaacctgctgaacttgcacatggtgatattataactctagggacttcatctaaactgtctgttcaaattttactgcaaaatcaacgagttcctgctggtgttggtatggcatccgatccaatggtggcacgtagaagtggaaagaaacttccaatggaagacataagcttttgccagtgtcctctgcagggtgttgaacattttgggctctttggaatttttgatggacacggtggggatggagctgctaaagctgtcagcaagattcttccagaacatctgggatacattttatctcatcctgaaacaaaagaacgagtgcaatcatattctgatgcttctgatgttcttagatatgcttttactttgacagaagacacaattgatcatcagtacgagggatgtacaggcacagcacttcttatttggtttgaccagaataaagattgttttgcccagtgcgctaatcttggtgactctgcatgcgtcatgagtgtcaacggcaagacgatcgatatgactgaagatcaccgggtaactagcgcgaccgaaagagctaggatagcaagaactgggcagcccctgagagacggtgaagctcgtcttagcggactaaatcttgctaggatgtttggtgacaagtttctcaaggagcaggacccgcgcttcagctcagaaccatacgtgagccaagccgttcgcatcaccaaagcgtgcacagccttcgccgtcattgctagcgacgggctctgggacgtcatcagcacgaaaagggcggtacagcttgtcgtcgagggaaaggagaggaggagctccggcgacgccacctcagcggcggccagagtagccagccgtgtgctggacgaagctcggagtctgcgaaccaaggacaacacatccgtaatattcgtagattttgacgtcctgagaagggatccctgtatctcgccagttgattgacatggcagattccggagactgcagcttcccatggatcgtcgtcttcctggctgctctattatatagctcccaagttttgttgtgttttcagtgagatgatgtggtgtaggaggcagagtgcgtgcataccgtgtaatctggtgcatgccttttagagtctcctctctctctctctctctctctctctctctctctctctctctctctctctctgtcaccctagttgatgaaccgatgatcacccatcatccaggaatggcttaacaaatctccattaactgtgaagtcattcgccatttttgttaatccgtttgcgcgtccagtttgaagtccaagggacgagatggaggcaagagaaagttgct

SEQ ID NO: 17065 - DNA, 1553 bp, Zea Mays
actgatccgtccaggagcgatataagtcagaagatgattatccctatccgcctccgcttaccttagatgtctccgagatccaaaaacaagaacaagagcgagcagagcgtggcgacaaatcacccgctgccttttatcccgcaaccagcagcagcgaaggccgcgagaggcaggtagtagccgcacgccacatcaacccaccacggatggccggcggcggcgaccgtgacgcatccgacgcggagctccgcgcggggttcgagaccctggccgtgacgcggccggacccttccgcgggggtctacgaggtccgcctcaaccgcccggcgcagcgcaacgcgctgagcccggccgcgttcgcggagatcccgcgcgccatgtctctgctggaccgcgccccctcggcgcgcgccgtggtgctgtccgccgcgggcccgcacttctgcgcgggcatcgagctcgggggccccggggacccgctgtccgccgcctccgccgatcccgtggccgccgcggaggggctccgccgcgcggtcctcgacatgcaggcggcgctcacggccatcgagcggtgccggaagcccgtcgtcgcggcggtgcacggcgcctgcgtcggcggcggcgtcgacctcgtggccgcctgcgacatcaggtgctgctccagggacgcctccttcgtgctcaaggaggtggacatggccatcgtcgccgacctcggcgcgctgcagcgcctcccgcggatcgtcggctacggcaacgctgctgacctcgcgctcaccggacgcaagatcaacgccatggaggccaaggacatggggttggttaccagggtctttgattccaagcaagacttggatgcgggcgtcgcaaagatcgccaaagaaatagctgacaagtcggcatgggcggtgattggaaccaaggccgttctgctgagaagcagggatgcgaccatagaacaaggcctggagcatgtagccacatggaacgcgggtatgatgaggtcgaacgatctgaaggaggccatcagagccttcctggagaagcggaagcctgtgttctccaagctgtaatgatcagataccatcataccatacctctgtgttacttaacaagtggtgctacgtatctggaaatgcaaaggaataaagtgtgctaggagtagacaattgtcagggaaaaagaaaaaaaaaatgcctgttctcgatggagctgtgaaggcatttttccatgtcagttgagcttaccaaagttgttttggtcggtatggatgaaccgggggtgttactgttttgttacctgttccagtctgtacgtagattcatctcttctgcaccgagacaaaatgccaaacaatcatctggagttcaaagtcatctggggctttgagcgaactgggacattcactacagtctgtggtgcacaagaaatgaatctgcgtacaaactggaacaggtaacaaaaccgtacaaactggaataggggcagtgatggtcaaaacgttctacgcagttgttgcagatagagcaatgggagcaacgaggaggcctgta

SEQ ID NO: 17066 - DNA, 184 bp, Zea Mays
gtgccgacgacggctgccgggggcgcctagggcccccgggctttggccgccggcgcgggcgacaacggtccacgccccgagccgatcggcagaccagcaggagccgttccgcatacggccggtgcgcgtcgccagcccccatccgcttccctcccggcaatttcaagcactctttgactctctt

SEQ ID NO: 17067 - DNA, 165 bp, Zea Mays
ctgcgacgaaggcccatggcggcactggagcgaggcgagggtggctactggctatcgtgcggagcaggtaaacccaaccgcaatccaccttttcggaaatgaaattgggcgatggagggcggctccatgttctactactccgcaccccaaactcgaatccacctg

SEQ ID NO: 17068 - DNA, 2962 bp, Zea Mays
cccccccccggttgtctctacctcctcacgacgcgaggaaccgatcaggtcactgccggacccgccggagatccgctcagcccgcgctattccgatccgaaacacctcgtcggatctccagggatctgacagaggaccagcgcgtcggctgctgacccggcggggcacgcgcgcacgccagccatggcgcgtggtggcggaggcgggtgctgcccgccgatggatctgatgcggtcggaggcgatgcagctggtgcagcttaatgcagagaagagcccgtttcaacgtacatatgctgcccagatcaaaaggtgtagtgaaatggctcgtaaattgaggttttttaaggagcagatgtcaaaagctgacataggtcctacacaactaaatgaaactcatctggattttgatgacttggagataaagcttggagaactggaagctgagctaactgaagtcaatgcaaacaatgaaaagttactgaggacctacaatgagctattagagtaccatactgttctccaaaaggctggtgattttttctattcagctcaaagaactgctgcatcacaacaaagggaattggaggcaaatcaatctggtcaaacttcactggagagccctctgttggaacaggagatgtcaactgatccatcaaaacaagtgaagcttggttcattgagtggccttgttccaaaggaaaaggcaatggctttcgaacggatcttattccgtgccacaaggggtaacattttccttaggcaggagcctgttgatgagcctgtcactgacccagtttctggggagaaggtaacgaagaatgcatttgttatattctactctggagagagggcaaaaaccaaaattctgaagatatgtgatgccttcaatgcgaaccgttacccattcccagaagatgttagcaaacaacttcatgctgttcaggaggtatctggaaagatctcagagttgaaggcaacaattgacatgggtttagctcatcgtgacagtatactaaaaaatattgcttctgattttgaacagtggaaccatctggtgaagaaggaaaaagcaatttatcacaccttgaacatgctgagcgttgatgttacgaagaaatgcctagttgctgagggctggagtccagtttttgcaagcattcagattcaagatgctcttcagcgtgctactgttaatagcaaatcccaagttggttcaatatttgaagttctcaacacaaaagaatctccaccaacatatttccagacaaataaatttacttcagcgttccaggaaattgttgatgcatatggtgtagccaaatatcaagaagcaaatcctggagtattcaccatcgtgactttcccttttctatttgccgtcatgtttggtgattggggccatgggatttgcttgttacttgcaacactttatctgataatacgggagaagaaactagcttcacagaaacttggagacataatggagatgatgtttggtgggcgttatgtaattatgatgatggcagttttttcaatctacacaggattaatatacaatgaatttttctctgttccatttgggctttttggtaaatctgcctatgcatgccgtgattcttcttgtagtgatgctactactgaaggactaattaaggtaagagatgcatacccttttggtgtggaccctgtttggcatggtagccgcagcgagctgccgtttctcaattcactgaagatgaagatgtccattcttcttggagttgcacaaatgaaccttgggattgtgatcagctacttcaatgcaaaattttttaggaacagtcttaatgtgtggtaccagttcattccccagctgatcttcttgaacagcttatttggttacctgtccttgcttattattattaagtggtgcacggggtcaaaagcagatctataccatgttatgatctacatgttccttagcccaacagatgagattggtgaaaaccagttgtttagtggccagaagacagtgcagcttgttctacttctgcttgctctggtgtctgtgccttggatgttgattccaaaacctcttctattgaagaagcaacatcagcaaaggcatcaaggtcaccagtacgcaatgcttcagggcgttgatgaatcagtgggagcagagctgggggaacatcatgaggaagcacatgaccatgaggagtttgagttcagcgaagtttttgttcaccagctgattcacacgatcgaatttgttcttggtgcagtctcaaacacagcttcgtaccttcgcctttgggctctgagtcttgcacactccgagttgtccactgtattctacgataaagtactactcatggcatgggggtttaacaatgtcatcatccttattattggcatcatcgtcttcatatttgccacggttggtgtcctgcttgttatggagaccctgagtgcattccttcacgcactgaggcttcactgggtggagttccagaacaagttctatgaaggtgatggttacaagttcgccccattctcctttgcgctgattcgtgaggaagaagattgagatcgtcccatgtagccgatgtacaatctttgatggcctttgttcccggaacaaatcattttttcatctgttgtctcggatggatcataaacctcagtcccctttgtttagacatgggacgaacagcaccatttttccttgtttagctatgcagaggatttttgggtcggttggcggcaaacatggggggtgatatcaccattgtatgatgctaataagtagttgccgattgggcggtgtgttggatataaataagcactgtattgaaggttaaacattccgctacgttcgttgtcaataaagagtgctatttacgctgctggcgttagtcatttcctggtctgttaagcattgccagtgcttcgttcgcctttatctcattgataccctc

SEQ ID NO: 17069 - DNA, 2864 bp, Zea Mays
tccctcggcacaccgcacacccttgcttgtctccaggcgtacttgcgtttagcgtctcttccctgctgccatctctgtccggagggcaagccatggcggcgggcggggacggcgtcgctcgccaggcggagctccgccggatcgagggcaacatctgcttcaagaaggcgcgcctcggcgccgccatcgactgctacaccgaggcaattgcgctctgccccgacgtcgccgtctactggatcaatcgggccctgtgccatttcaagcgcaaggagtgggccaaggtcgaagaggacagcaggagggctcttgcgcttgattacactttagtcaaggggcactatctgctggggtgtgcgctactcgagaaggaagaatctgctcttgctatcaaggaattcgaaaaggctctaactctcttaaagtctgtggattcaacgtatgaaatggctgaggacatttggcaggtccttgcaaaggcaaaatacttagattgggagaagcattccactgaacgactatggaggatggaaagtttgaaggaagcttgtgaaactgctctgcaggagcatcactttctaactggtacacttgaggaagactccaacaggtcagacaacgagtattcagagcaaattaaactactatcagaggtcttcagccaagcgacagtcgccgatacaccaacagatgtgcccgattacctttgctgtcagataacattcgagatcttccgagacccagtgatcacaccgagtggtgtaacatatgagagggctgtacttgttgaacatctccacaaggttggcaatttcgacccggtgacgcgagaacctctgaaggagcatcagctggttccgaatctggccatcaaggaagcagtgcaggcctacctgaaagagcacagctgggcccacaagttgaactaattggatgccgtgtgctttgctgactgcagatgctgataaatcggggatggcctgttattagagttagattttatgttgtgttggaatgagattgattggatagctcgattcatcgttcttagtattgattgggtaacttgacctgtaactgcaattctgcaaacactcattggatggatgtaatgaagcaagtgtacatgaaacattggttggttcagctcactgcatgtatatggttgcagcattatatatggttggtcgtagacccagtgggcctcaaacaagttaggcctagtttggatactctagtaatgagtgggattgaagtggattaagatgtattgagagagtatttgatgtattggggatttacaccctctccaatcccttcaaaacactccaatcctaaagtatccaaactaggccttaggtgggccggcctctatccaaggcccagccttttacttggcgctgacaagacaaaagagaggagacgagaaagaaaacaaaccctagcccgctacccctgccccttctctcttcgtcgcgcctccgcctccgccgtcgtagcatcctcctccgccacctcggccatggcgacatccccagcgctcctcttcccttctccctcctcggcatcctctgcgccttcgtcggcgcgggtggaggcagtggtgcttttcaacgtctgcgacagctacgtgcggcgcccggaccaggcggaccgcgtcatcggcaccctcctcggttccctcctctccgacggcaccgtccacgtccgcaactcctatgtcgtcccccacagcgagtcagccgaccaggtcgccatcgacatcgactaccaccataacatgtacgcctcgcaccagaaggtgaaccccaaggaggtcatcgtcggatggttctcgactggatttggtgtttctggggggagtacgctcatccacgagttctattcaagggaagtacaaaaccccatccatcttacagtcgacactggcttcactaggggggaggcttccatcaaagcctacatctcatccaatctgtccctcagagatagtcaactcgctgcacaatttcaggaaatccctctggatctgaagatgattgaggcggaaaaggctggatttgagatcctgaaatctactatggtagagaagctccccaatgatctggaaggaatggagtcatcgatggggaagctttacattcttatcgatgagatctacaaatacgtcgatgatgttgtggaaggacgcgtggcacccgacaacagaattggaaggttcatctctgattcttttgcttcggtgccgaaattgtccccggctgctttcgataagcttttcaatgacaagattcaggataaccttgcgctggtatacctgtcaagcatcacaaggacacaaatcagcatcgccgagaagttgaacactgctgctcaagtgctgtaggtttggcggtgtggcatctggtttggacgtggatggcttgatgctatctgtgatgcttggcgtaagtgtgattggtgacagaaatgcatttttgtactcattattattattgctaaatgagagacctgatggaaagggttagccaacgatgagatcccataatgttgccagaatgccagtagagtggtggatggcgagatgtttctgtttggatagtattctgtgctccaggttgaatatttgtaatgctcgttggttttgtgtagcgacacattttacgtcgtcatttagaggtgtggtggcatgcaatgtgatgctgttgttgcaggaaaatcggttttgctgtcctgttatagcaagctttcctcctgcggccctgcttttcatttccctcttgattcttgcctctgcccttcgaaaccggtctaggccgggaacaatcacgtcatcccatgttatgtgtctagcctgaacgaac

SEQ ID NO: 17070 - DNA, 995 bp, Zea Mays
cccacactaaacgttacgtgagatgcgcgtcttgatgggcttcagcttcactcccatgctctccggcgacagaagctcgggcgagatgcagaacgggctcagtgtgctccgggggctgctttcctgctgcgatggcctgtaaagcccgtatcccataaggaagtactccatcgggatcaccatcgcatggggttgctcttctgtgacaagtgaaccacatgcctgaacctgcacgattttaacaccacacacacaaaaaaaaaaccctcagccatcctccttatactcctctgtgtgccgtagagatcaaactgtaacgtcaattttttgaactgtatgttacctcgactagggcgcagtatctccggtctagctttgtggtcatgtggacagcgtcagcatggaactgtgagttttccccaacaaaaatcagcgtctggcactgaagcttctccaacgattctgttagatcatgtcgcctattaattgcctgaaggaaccgccagacattagtcccctgcctatcgtcaagtaactgcacagaagattaccatgttttcaatttcatttccaaatagcagcactagagaaaatgaaggaggttgatactaacacttctgcaggcttggacaatctctgattctggatcctgtccgttaccaaggacgtcctgcacaatgcatcagtcctgagtgaatctgggtaacaagcaccctactccctccgaatatgggcgagaactcgagaaagcgaagacgaaagttgaagagggggatcagaattcagaagtaccatgctgaaataccgctgaagcaaactttccttgactatcccacgcgtcccatagtaataaagcaagtttaacaatacctgggacaccggattctgaggttaacactctgaaacattgcacggtgaaatgaataattgaaaggacatacggcatctgaaataactgaagtaggtggttacaaccttattgtacaaccactcgc

SEQ ID NO: 17071 - DNA, 1277 bp, Zea Mays
ctatcacctaaaatctaggatatattattccccccaaaacaaaccctaaccggccggcccaattctcacgcgctcgccgcctaggagcattcacgttggcggcgggcggcggctcggttcctctcctccaccgcacctccaagaatccacctccacgactgagctgacggctcggtagcgccatggcagttcaccggctccaaccttccccatccggcctacagtgctccaccgcccggtcgccagtgctcctccatgggccacggctgacgggtgcacgcaccggttatttttccagcacttgacattcgagtgaaaaatgtcgcagggacatattctcttgaacataaaggagaaaatgatctcttcgcacatcagacaaggcttctactctttcagaagaaagtcatttttaggagaatcgtgaacaaaatgaccagatgtttaggcctggttggaaggacatttttcgaatgaatcagagtgagctcgaggctgagatttgaaaaggtctctcgagattctactcttgatccaaggaggaaggcctatctgatccaaaatctcatgaccagccgttggatagttgctcagcaataatcaccacaaccaagcgtcgaaggacataatggatgtacacgatgacctggatgtgttccttcgtaccgagacccagggaaacaaatatttgggctgtgagcattacaaaagaaactgcaagcttgttgctgcatgctgcaataagctattcacttgcagattctgtcacgataaagtaactcaagaggtccacttattgactcttatgaccatgtaattggtgttaatacaactacattaacatgtaaaggttggtagatctggaaggtcttgatggtctaatacctatctatgagtacggaagaaaaggcgggagaagtcggtctctgcagcatcgcgcgtgaaaaaaaatcagccaattccacgagcattgatgttgtcatgacttcaaaagaggagagaccatgctaagaataatgcattatgacatttgtcaggcttacatatcgactgtttgatatggatagatgtataggtttatgaccaatccagttcaaagcaattggagtatagaagaaataaggagaaacaggaaagctctgtacatcttgcattttgctgttgtttgtcgaagtttcaatgtctgtcgcgtgacaaaatatagttgtaatttatattttggcatgcacgaaacaggtgtatttattcatttttgaacgaaattttatgtcaaatcc

SEQ ID NO: 17072 - DNA, 2143 bp, Zea Mays
ttttttttctcaacaatcatacatgccttcgtacttcttggcaaaaggtggcataatattttcaggtgccagctgcacagtgcggtgcccagctcaaatccttttggggccaaattagatttacagaactttacggaggggctagatgaactttcctcttcaacggcccccttgtcttctccatttgttcatttcgcgtggcttcccttgccccctattaaaccaccgagctgggcgcctccccgtggcgctcgcggccgcattagcgcggagatcgagagacaagagagggaaggcggcggcttgccggcttaagccttctctccctccgtcgtcgcctcctccttacgtccgcttcttcctcctgatggagacgtcagcgccgcccaatgcccccgctccgccggcgcagccacggaggcggttgccggacttccagcagtcagtgcggctcaagtatgtgaagctggggtaccactacctcatatcccacgggatgtacctgctgctgtcgccgctgatggcgctcgtcgccgtgcagctctccaccgtctccccgcatgacctcgccgacctgtgggagcagctccgcttcaacctcctctccgtcgtcgcctgctccacgctgctcgtcttcctctccaccgtttacttcctcacccgcccgcgccccgtgtacctgctcgacttcgcctgctacaagccggagtcggagcgcaagtgcacgcgcgagaccttcatgcactgctccaagctcaccggatccttcacggacgagaacctcgagttccagcgcaagatcctcgagcgctccggcctcggcgaggacacgtaccttccccccgccgtgctccgggtgccccctaacccgtgcatggacgaggcgcgtaaggaggcgcgcgccgtcatgttcggcgccatcgaccagctgctcgagaagaccggtgtcaggcccaaggacattggtgtcctagtggtcaactgcagcctgttcaacccgacgccgtcgctgtcagccatggtggtgaaccattacaagctgagggggaatattgtgagctacaacctcggcgggatgggctgcagcgccgggcttctgtccatcgacctcgccaaggatctgctgcaggcggtctgacaggcggaggtccaagtatgagctggtgcacacggtgcgcacgcacaagggcgccaacgacaagtgcttcggctgcgtgacacaggaggaagatgagattggcaagattggcgtgtcactgtccaaggacctcatggcagtggccggagacgcacttaagaccaacatcaccacgctggggccgttggtgctcccattatcagagcaacttctcttcatgggcacattgattgccaagaaggtgctcaagatgaaaatcaagccatacatccctgacttcaagctggctttcgagcacttctgcatccacgcaggcggccgcgctgtgctggatgagctggagaagaacctggagctcactgactggcacatggagccatcgaggatgaccctgtacaggtttggcaacacatcaagcagctcactctggtacgagctggcgtacactgaggcaaagggtaggatcaggaagcgcgacaggatctggcagatcgcatttggttctggattcaagtgcaacagcgccgtctggaaggcactccggacggtgaacccggccaaggagaagagcccctggatggatgagattgacaacttcccggtggatgttccaaagatttcaaaggttggtggcgcttgaagaaccattcttcttattattaggtggcaagtggagttgggtgattgtcaggggctgggcagagatttattccatcgtttccaccgttggttcttgtattcagttgtagcatggcatctgtgaaggaacttgagtagatgattcggttaggtagaaagggtgtgttcttcggctcgctagggttgtctgaatgcctgatatgtcctatttattcagattggagagagcaatcgatttgcattctttgctgcgtgattgagatgttcccattgcaggccaacttaaacttgaaattcccctatccaattgattggttctgttctaacatctttaccagtgttctgttgcaactatagtttgttatc

SEQ ID NO: 17073 - DNA, 1309 bp, Zea Mays
atcgatgcaggaaaaagggagcgaaaaagcgtaaggcggccgccttcgccatttctccgctcctccgcctcgcctcgcctcgcccatcgttccatgtctttctcctccggcggtcaccacccctcccggccggaccaaccccggatcccatttccagttagatgcttccccttcaccaccaccccgccgccgcgccggagtcggcggccccggcgacagaccctccgcccccgccggaatggtgacacctacgctggagagtactttgctgataggatgcacggctttggaatctacagctttgccaatggccatagatatgagggagcatggcatgagggtagaaggcagggtttaggcatgtatagtttcaggaatggagagacacaagctgggcactggcaaaatggagttcttgatactttaagcacccagaacttcatccctggatcacctattgctgtgaaccattccaaggtcctcaatgcagtgcaggaagcgagaagagctgcagagaaggcctatgacatcccaagagttgatgataaggtgaacagggcggttgcagcagctaataaagcagccaatgcagccagggtggctgccgtgaaggctgcacaaaagcgcatccccagtaatggtgacgatctaccactgtcagtagtgtgacaatgaagccaatatggcaatatatgttggcatggagctgcttcgcgatgccatcgcatcaccaattgcccgacataaccttcaacttcccagtaggtgaagccactgctcgtccatcaggccatggcgtgttggcgacacctgagtcattgccagcagcattcaagcttgcgggagaagaccaagttttcagccatcccttccatacatctttgtgatgtcttttgcgatgcagcagaaccactgctctgaggactttccattgtccaaggcagccggtcgaggtcagcagtaggttttatcctgccttttctgcagtgtaatactcacccgatgttagtagagatatgatgaatgtacaccccaacatcagtcgataaaaaactgtgtttattttctctcttggactatgtacagaacctacaaatttagcggttgttggccgtgctggttggagaaacgacaggtgccttcgggttcggccattttcgtactttgtacttcatacgagaacaagataccatgatcatgagcgtctcctgttgttttgtggtcggcgtgttgctgcaaattgtttagtaatggtgtagtacaggagtgccgtatcagattccccatgccggtcaaaggcgatcgcgcg

SEQ ID NO: 17074 - DNA, 467 bp, Zea Mays
aagccgccgccgccaccaccgcctcacccaagctttcatttgtcatgctggttgcccccgccttatcgtgcggtatcataaactgattttttgtggttcagttagacgagagcgatgaagagcaacttttgtgaactagagtttcagatgctaccatggtgacttttttctgggatggagctcatatttgcaggtgattgattcatcttggggctgagattgaaataggatatggcacatatgataatgatcagagtggtttctgaacatacgaagtagccgcccaagagctttcaacctgccaagtttcagagctagtgctgttacatcgttggcaatgccacaacattttttcacatacatttatttcccaatgcgttgtccttaatgccatgtccttatgtagcagttcatgaacaagattggaaggatataagcactcaacgaccttcgtcgacagagctgaa

SEQ ID NO: 17075 - DNA, 98 bp, Zea Mays
acatttcaaggcgcgggagagagaaccggtcggcgtttagcggacgctcagcaagctccacatttggcgtctcccggacgagcgctaaaatttagcgt

SEQ ID NO: 17076 - DNA, 180 bp, Zea Mays
aaccggcagaatcgacgacacgatgagaattaaggccaagagagccgagagggcgcgctggcgaacaggaaaccgcgcgagcacaggacagggaaaacgactggctcgacaacacgcgaagctatcaccagcgacgacagtcgaatcggcaacagagcgttggcggatacgatgaacacg

SEQ ID NO: 17077 - DNA, 186 bp, Zea Mays
cacccgatgtcgccatgcgtgatgcctgcattgtgtgttggacctggacatggttagccgcatggtgcggcgtgtaggatgagctggagcacggtcatgacgtggcgtgcatcgtagtgcagagccgaggcgagcacccgctgctgcaggaggtggtgagggaggaggcatgaccgcgacatggtg

SEQ ID NO: 17078 - DNA, 2204 bp, Zea Mays
ccgaattttccttctccccgtctcctcgccgtcgctccttcggcccttcctctctcccatctcggctagggttaggtcgtctcgccaagtcgccatgatgcagcagcccccgccgcagcagccgcagccgggcatggcgccgcctccgcctccgcaggctgctggcgggcagccaccgcagtggggtgggatcccgccgccgatggcgcagcagtacggcgcaccgcctccgcagcagcctccggcgatgtggggccagcctccgccgcaggcgcactacgggcaggcaccaacccctcagcagtactacgccgcgccgccggtgccggtgcaggcgccagccgcccccgctgcggcggacgaggtcaggacgctctggatcggggacctgcaatactggatggacgagaactacgtcttcgggtgcttttcgaacactggggaggttcaaaatgtgaagctcatccgtgacaagaattcagggcagcttcagggttatggttttgttgagtttacaagccgtgcagctgcagaacgagttcttcagacatacaatggacaaatgatgccaaatgttgacttgacatttcggctgaattgggccagtgctggtgaaaagcgcgatgatactcctgaatatactatttttgttggggatttggctgcagatgttacagattacttgttacaagagacattcagggttcattatccctctgtcaagggtgcaaaagttgtgactgataaattgacaatgcgcacaaagggttatggatttgtgaaatttggtgatcctacagagcaagctcgtgcaatgactgaaatgaatggaatgccttgttcttccaggcctatgcgtattggtcctgcagcaagtaggaaaaatacaggaggtgttgttcaagagagagatatttgttggtgggcttgaccccaatgtcactgaagataccctaaaacaagttttttctccttacggtgaagtcgtccatgttaagatccctgttgggaagagatgtggttttgttcagttcgttaccagaccttctgctgaacaagcgctgctaatgctgcaaggggccttgattggtgcacagaatgttcgactttcatggggtagaagcctgtcgaacaagcaggctcagcctcagcaggaatccaatcaatggggtgcggctgctggtgctggtggctactatgggggctatggacaaggttatgaggcttatggcagtgggtatgcacaaccccaggatcctaacatgtatggttatggcgcttatggcggttatcccaattaccaacagcaaccagctgcacagcagcaacagcaacaacagtgatgcctgtttgctcgggtaggtcattgggttgtcgcgacggaattaattaaatattatttcaggacactctcatattgcattcttgtcaattgaggtggttttgaaaggctcctgattttgatggccccatggcacggtttcatctatttattagtatatgacatatatgcgctgtgaacaagtggcgctctactgtgattgctgtgttgagacatgctttcttagtttctttccatgtttctcggatctgttgtgttacctttattactgtgtatttgcatatctactgtgatgctatatatgcactgtgccgtttgtttcctattccatttttttctcgttactttattatagcgttggattctttcttctatcacaacgaacagccgtgggcacatgggcatgcacgatgtcatgacagaatgtgtcgatggcaacatgggctccatcttttatctgtttcgagtccttgacatcaggataatgtaatgtgggttttgttgccgctgtgactgatatggaagcatgagctgccatcgttttcatggccgtccgagtctgaaaaatacatttacagtacgatgaatccttttcattcggtctattattcggtctattaggttaattcggtttggtttatttgggtttgtgaaattttgggttttgaaaaatgagaatcgaaattttcaaaattattttagaaaccgaatctgaatagactcacaattttagtttggtctatttagtccaccgaatagacccaaatagtagagagactaatatcttttgttaaaatatataataaataattaattgaaagtactattattaaaaaaattataaaaatatcatacaaagata

SEQ ID NO: 17079 - DNA, 111 bp, Zea Mays
gtcctcgatcatcaagcctacattcagtataatccttaatcaacctgggtagaacatcacctgttcctagcccaagtctcaatttaagtacttccatccttagaattgttt

SEQ ID NO: 17080 - DNA, 216 bp, Zea Mays
aatgacttccacgagtgatggtgaggaccgcgagcagacgtgcgcaaagcacttcctagaaacctgattcgacggcacccgtgcaggccgtcaaaacgccggcgttggttcgaagacaccgctctctcttgatctgatgcatggcagacgaagagaaggcatggcagagaaacagcgacacagagagatgagaagaagaggacgagtcggttgcta

SEQ ID NO: 17081 - DNA, 1910 bp, Zea Mays
tgatgtggctcatgtttggacagctttacggatattcctttactccgtccaagaaagaatgcaatgatgcttctgaatcagatcaggggcaaggcagtcgtgttcacgggccactcccttggtggcgccgttgcggccctcacggcgctacactacctctgcatctcatcgtcaagctcgccacctgctcctcctgtcctgtgcgtcacctttggaagcccattacttggcaacgaggcgctgtccagggccatcctgcgtgagcactggggtggtaacttctgccacgtagtctcacagcacgatgtcgtcccaaggctcctcttctgctccccggacgccgtacccgcgcacatcattgttggaatgcaactgcagcaatggccggcgtggactcggcacacaggagctgtgagcacggtcaccgcgcacatggcggacactgacaaagacgtgctccggcagctgatacagacgcacgttggcgctgtggccgtggaacagaagcttgccgcttctgagacgacaggtgggagcccgtaccggccgtttgggacgtacgtgctgtgctccccagaaggcgcggcgtgcgtggacaacccgaccgccgcggtacagatgctgtacgccaccttcgcctctcagagctcagccggtgcagagtccccggaggccgcgcactcctgctacggcgagctcgtgctgaaaatgccgcaccacttgcttctcaagagatggctgcgtgtggacgacgacatgccggcgacgcccaactacgacgacggcgtctccctcgcgttggaggcctctggcatcgacgtcatggccatggaggcgtcgacggcgcggcattggctgaaaacatcaaagcgggcagggcggcggccgagcctgaactgcgctcgcctggcgacgcagctgggccgggtcacgccgtgccgtgcacagatagaatggtacaaggcgctgttcgacgcagagatggggtactacgacgcgttcaagcagcggcggtcgcccaggaagtacaccaaggtgaacttaaaccgcatcaagctgggccagttctgggaccgagtgctgagcatgctcgacgccggccagctcccccacgatttccaccgccgcgccaagtgggtcaacgcctcccgcttctaccagctcctcgtcgagcctctcgacattgccgactaccatcgacacggccaccacctgacgagcgggagctacatgactcacggccgggagaggaggtacgagctgttcgacaggtggtggcatgagaagggatgcactggcgctggcggtggcatcacgtcctccatgtcggcagcgtcggcgagcagccggagacgcagcaaatacgccgggctaacgcaggacccgtgcttctgggcgagagtggaggaggcgagggagcagacggagagcgcacgccgcgagcgcgacgtggccgaactggcgatgaagctggaggagctgcaagagttcgagcgctactcccgtgagctggtggcgaccaaggaggtgtccgtcgacgtgctcgcgccgcagtcgagctacacgctgtgggtggaggattggaaccagctcaagctcagggctcagggatgatgtgaggacaatgttgcttcggttttgagctgggctgcaaacagatgatgaattcgtaggtagctggtgggcgttctacaaatagttcaggtgtaaatgaatcattggatcatggtgctagtatatgtgatggtaaatatatccaaacctatagaagcgctgcagtggattacagtattgttgtggttctcgtcgaaattctgaaaaaacgataatatgacaataccaattagttttaaaatcctccttttcttcgaagagttctgaggaaaaaacgaataaaatgctattttcac

SEQ ID NO: 17082 - DNA, 629 bp, Zea Mays
gacgacatggcggttgatattgcaccggataacttggaggcggacacttcctcgtaccactgcagtgttgtccgagatttggctctagaacaaatagacccatccctagccattggtttttactgtcgcgacaaagacgatttcgatgatttctgttctcgggcatctgagttggcagagaaagccaatggagcgccactctttactgtcatgcagtcagtccagccatcgaagcaaatgtataaacaggatgatgggctgtgctgttgttctggcagtagcatggccaacgaggactacgaccttgacgcctctggcgaggcaggagaagagtggcagatcctctaaaccaggggaacaccgatgacatgttgggttgaaaaactcatggaacatgttgcctgaatgccctcgtttgcgtgtgaatacaggggatgatttgttgtctctgagtgtcgttgggtgccaacgtctcttaggaggaaaatgttcaaaacgtgacaggtggaaatgttcaaaacatacacttgtgaatgatcatagataaatgtatttaacattccatttgctaacaccatttcaccacggcgtgttcgcttttcaattgcttgctagaaatgcacctgcca

SEQ ID NO: 17083 - DNA, 2442 bp, Zea Mays
cagaggtaggagagtaaggagaggaggaagagcactgccagtgctaggggcagtcggcaggcgcggcgcgttcccctcagtccccttccccggctggtcttgccgggagtaaggggaacgaagccaccggcgcggcatggagcccaagccgtcttcggcggcgcatgctgacgcgccagcggtcgaggccccccgccgccgtggcggcggcggcaagcgcaagtcggccgggtcctcgttcacgccgtcgaagcgtcaggccaaggagcggaacgcttccttccacgtgcccccgcatcttctgcacagcgggccgctcacccgcgccgcgcgccagtcgccgcacaagctctcgggcacgccgtcggagtcggtgccagcgtcgtcggcggccgcaactggggacggggtgagcggcgggcaggcggtggttgatgcgatccggcccgagacagaggaaacgccggccccggagctgccgctggtagacgagatgttcgaggccgtccgatcccgtggcgctggcgtccatgtggtccctacctttgctggatggttttcgtggaaagaaatccacccagttgagaagcagaccttgccttctttttttaatggaaaatctgagaagcggacacctgagctggagtccaaagacctggctgagttgtcaatcggggagaccgatgctcggcaggaaatcttggaattcttggatcactggggcttgataaatttccaccctttcccaccagatggacatgaggagagtaagccagaggagacccaagacaattctaatgacgagaaagcttctttgatcgagcaactgtttaagtttgaatcagttcaatcatatatgacgcctttaccaatgaaagaagatcagctgagccttctgttgagtaccactgcaattcctgttcagttgattgctcacggaagcgctatcattgtcggacccaggcagattttgacctctgttgtgattgctataatgaagggaaatttgatccaggcatggccaaaaccgatttcatcctcatggattctgcaggagtttcaggtgctagtggtactagttggacagatgaggaaacattacttctattagaaggtttggaaatttttggtggaaaatgggctgagattgctgaacatgttgctactaagacaaaagcacaatgcatgttgcactttcttcaaatgcaaattgaagaccgcttccatgatggcaaagatattaatcaaaacatcccagtaagtacagatcaagccacaactgagaaagccattgctgaaacatctgagaaaatggaagttgaagataaagtggaaggaagaggtactgtggatgaaaaggcctcagagaaaacagagggaaactgtgaagaaacaaaaactgaaaatgccagtgttgttgtaaataaagatactcagaattcagatggcagagattcaggtgcatctccaagcactgaagagccaaagcaatcttctgatgagcaacctgtagtaaaggaaaattctgcagatgtagatacttctggtgaaaaactatcaaatgttgctattgatatcttaaaatctgcatttgaggctactggtcacagcccagaatatgaaggttcatttgcggatgcaggaaatccagttatggcactagcagcgtatttagctggtcttgtggaagatgataacaccaccacttcattccgtagttcactaaaatctgtatctgatgtgtctcctgcactccaattatcaagtaggcactgttttattcttgaggatccgccagatgaactcaaagacatttgtgctagtgtaagtaagaaaaatagagatggtgatcaaaaacaagatgaggatatgattcaaaattcaattgataccgagaaaaaagagatcaatgagaaagaaggtaagtctttatctgtggaaaagaaaaacaattcatccatgtcacaaaatgaccaccaagaatcaggcattaagagcgtctcaagtgatgattgctccttagtggagccaaaaaccaataatgctaaggagtcaggtgattcaactgctattggggacaagagtgcaaccgaaactacaaaaggtaatactgaacaagtgaatgacttgccaagtgttgaggtggaggctcctgatgattcatcttcaaaagcaagcgtccaaatgaatacaaatataatgagattcagtgtcaaagaatgatcagctaaagacatacaaaccaagtttggtggtttgttggcacacaaaaacaccaacagaaaggaaccacgtgcatgcaggacatacacaccgcggactgagcaagggcaacaaaaaacaacaatcgcagaccgagtccagtgctgcaagacccaaaactgtttacaaacctcaaaaacaacagcagtaacaattgtattcacgctcctgagtgtgaaa

SEQ ID NO: 17084 - DNA, 716 bp, Zea Mays
atcatcagtgaagcaatgtaaccagctgtcgaagtatcaagacggcagaacagggtgagggaatctactgggaatggcgatatggtatcaaaattggaagctgccgagtacaagcttgaagaactgaagtcaaacatggtgggattagggaaggaagctattgcagcaatgtcggctgttgaggctcagcagcaacggttgaccttacagcgtctcattgcactggttgaggctgagagaacttaccatcagagagttctggagatacttgacaaattggaagaagaaatggtgtctgagcgccaaaaaattgaagcacccccgactccagcagctgaaaattatataccaccaccagcaccaccatcttatgatgaaattaatggagcatttgcatccacttctgttaacgagtcagtccaatctgtcgatttcttccttggagaggcccttgattcatttaatgctgaaagtgagtttgagcttaccttgtcagctggtgacattgtaattgtccgaaagatctcaagcaatggttgggcagaaggtgaatgcaagggcaaagcaggatggttccctcatgcttatatcgaaaggcaggaacgtgttctagcaagcaaagttccacatatattttaggtaagactatttcacttctggagtctcaaggtgaaatggtcaagttgcatggaatttgaagctcctgctggatacct

SEQ ID NO: 17085 - DNA, 2612 bp, Zea Mays
tcagttcttagctcaacccgtgcccttgcggttgatgaggcacatttgctgggaattagggcaatcaacgtttaagtacatgtggtctactgctgtttgattattactgagattcaatcatttggtcagatgagagttctggctggggacttacaagtgtagcactgttgtcggcttgtgactaaatagcatcacttcacatacaacactggataatggatcgtagggatacttcagggtttgttagtggaggatgcaaaaataatgaagcctactagtttctctatatcttctaacttggtagctttattgacaattatttaacccagaagtgaggccagctggtacttcccataaagtttggttactctaatagcaatggaacccaggcatgggcgttcagcattcactataagtttctcaaatccaaatggctttgctaatcagtgcaccgccattccagccgtcagttattcagcggctggttctagccaacttgatgtgctggctcctactagaggttgcaagagaaagtggactgagttggctctaggtctgggtgacacatcaagctcagacagcagcaagcagagcatgggtactggctgcactgtttcttctctcaagggaagcgatgatgtctcatgtatggattacgacataagtttcaagttatctcttggcaatgaagatacttccaagctgcataaacaggcttgtggttctaaaaggactatggagaagcctcggttggatcttaagttatctttggctccatctcaatccgatgtaactgacgcggatctaatcagaagcagtgcacctcaggacatgtttgtgcagccgtacttgatgtcctcagtgccaacagtcgatgaaggatctacatctgctcgacatccatctggaggcatggtggtttccttccttaaccaggctgggatttctccgaaccagttgcccccacttaactctcatctggtccagggtccagcttgttcagcaccaacagtgctccaactgccaaaaagttcagctgccacttcttctgggtttgtccgcccacagcaacgcaacggtagcacaaagatctgttcagagccaggttgtgcaaaaggagccaggggttcatctgggcggtgcattgcccacggtgggggcagaaggtgccagaaagaaggctgcaacaaaggagccgaggggaggaccatcttctgtaaagcccatggagggggcaagcgctgtgagcgccttggatgcaccaaaagtgccgaaggccggacagatttctgcatagctcacggcggcgggcggcgttgcagtcatgacgggtgcaagagggcggcgcgaggcagatcgggcctgtgtatcaagcatggtggcgggaagaggtgccaaacgctgaactgcacaaagagcgcggaagggcggtcaggcatgtgcatcgctcatggtggcgggcggcgctgccagtacgctggctgcgggaagggagcccagggcagcacaaacttctgcaaggcccacggcggcggcaagagatgcacgcaccccgactgctccaagggcgcggaggggagcacggcgttctgcaaagcccacggaggcggcaagcgctgctcggctgacggctgcacgaagagcgtgcacggcgggacccagttctgcgtcgcgcacggaggcgggaagaggtgcgtggtggaagggtgcgggaagagcgcgagaggcaggaccgaccgctgcgtcggccatggcgggggcaagcggtgccactccgccggctgcgggaagagcgcgcaggggagcaccgatttctgcaagtcccacggcggtggcaggcgctgctcgtgggggcaccctggctcagacctcgggtctggtggcgctccctgcgaccggctggcgagaggcaagaaggggctgtgcgaccggcacaacccgctggtccatgacaacagcgtgcatgggggtgcgtcgttcggtggcttcagtgtcgtcagtgccgccgccctttctgagggagatggctctccatctccaggcaccgagacaagcatgcgcagcttcttcatgcacgcggtggaggctcctcgctgtgtggcggcctcggcccatgaaggccgggtgcatgggggcaacttcatgcctatcatgctcgacggtggcgtgggactcgggaagaggccggccgacaacgctgatgctggtgcctctgcccctcctcgcagctggaaaagtatggagaaggcctgtggatctgcgccgcgcagctggctgtagtatttgccagaagttcgtgacctgctcacagctcactctctccatctgggtctcctctgctcctgctccaagtgtctcccgtgtcctctggtcatgcgtggtatggtatgataacatgaactgtgtgtgtactggttggtcaggactcgggacttgtttggtactgtggatattgtggttgtttgtgctcttgtagcataggtctggtcgaacatacctactagtaacagtcgtcgtgtgcggtgtgtgattgaattgtaaatgaaaggaacgcctcgtcatgatacaaataaaaaatagtacctttcctcgcggcgcccgccaaataaaaa

SEQ ID NO: 17086 - DNA, 1038 bp, Zea Mays
attatattttaggacggagaaaggttttgtaaattttattccgctagggctttgttcttgtttgccgccgccggcaccaccctcagtccccacatggccgccgcctgccttcgccgcctccaccgcatccctcatcctgtccttaagctcgccgcagccactcactggcccttgccattccccggtgccaagttggctccggtcacacagtcgtgcccatccgccgaccgcgtcgaagtacagctgagcgcccgctgccccggttttgcaagtaatggtaacttcaaacatcgatggcatcacaagctgggttcatcagttggtgctgtactgattggacatgcagccttttttcttggtttgagcaatggctctgcatttgcccaggaagattcagttagcccagctgcagctagtgagcatgctgagggaaatgctcctggtttacaaccgattgaagatggatcagtggtctcaaacgaacacacggtcaaatggagaatttacactgataatgcgcgggagtttttccagaaaagacaattggatgaggctgagaagttattccaggcagccctactagaagctaaggaaggatttggacttagagatccacatgtcgcgtcagcccttaacaatctggcagaattttataggctaaagaaagagcatgtgaaagctgaaccactatatttggaagcaattgagatcctggaggaatcatttggacctgatgatatacgggttggaagaactgtgcatagtcttggaatatgctatcatcttcaactcaagcttgctcaagcccagacatgttatgagcgtgctttgaagatagaaggacgtgttctgggggttggtcacccagagtattcaagtacaatgtacagtctagccaaggtgctcagtctacaaggaaaaagaaaaaatgcagaatgccttattgaagagtctattagaatacttgaggaagctgggcttggcgattcactaacatgtttacgaagaatggtctctctctctagagagaattgacat

SEQ ID NO: 17087 - DNA, 3411 bp, Zea Mays
caagccggcaacggcataactcgttagctgccagatgcttattgcaaatgatagagggaaaatgaacagttgtctaagtatggggatactaaatcagctcgaagtattatgctggttgagctaaaaaaacttattgaagcaaacccccttttccgggaaaaacttgtcttccctactcttaaggcatcacgcctccgaactctaatcaatcaaagcttgaattggcagcatcagctttgtaagaaccctcgtccaaatccagatatcaaaactttattcaccgaccatacatgttctccacccaatggagctcgtgcatcgccggtatctgtaccactggcagctgttccaaaggctggtgctgcatatccaccactcacagctcatactccgttccaacctccacctggtccatctttagctggttggatggcaaatgcagccgcctcttcatctgttcagtctgctgttgtagcagcagcatcaatacctgttccacccaatcaagagtctgagcaactaatgaagcgcttgaggcctggtggacatggcattgatgaggccacatatcctgctcccacccctcaacctgcatggtcagtggatgatcttccaaggacagttgcttgttcattgtcacatggatctaatgtaactagcatggattttcatccaactcggcatacactgcttctagtgggatctgctaatggtgaatttacactttatgagatcggtctgcgtgaaacattactttcaaagcccttcaaaattcgggatataaatgcatgttcaccacaatttcagaatgctgttgtcaaagattcctccatatccattaatcaagttacctggagccctgatggagaaatgattggcgttgcattcacgaaacatttgatccatctgcatggataccaaccaccaaatgagacacgacaccttctagagattgaggctcattctggaggtgtaaatgatatagcattctcccgaccaaataagcaactttgtgtggtcacttgtggagatgataaactaataaaggtatgggatatgcatggacataaattattcacatttgaagggcatgaggcacctgtgtattctatatgtccgcatcacaaagagagtattcagttcatcttctcaacttcccttgatggaaaaattaaggcctggctttatgacaatatgggatctagggtggactacgatgctcctggcaagtggtgtactactatgctatatagtgctgatggaactaggttgttctcatgtggaactagcaaagagggagactcctatttggttgagtggaatgaaagtgaaggatctatcaagaggacatattctggattccgtaaaaggtcagctggtgttgctggtgtagtgcagtttgatacagctcagaatcacattctggctgctggtgaagataaccatattaaattttgggatgttgacaataataacatgctgatctgcaccgatgctgaaggaggcctcccagctcttcctcgcttgaggtttaataaagaaggcaatcttcttgctgttactacagcagacaatggttttaagatacttgcaaatgctgatggacttagaactctacgcgcattagggagccggcctccttttgaagcatttaggccgcaatacgaagcttcttctatgaaggtctcaggtgctcctgttgttgctagcatctctcctaacataggccgaatggatcacttggataggaattctcctgcaaagccatctcctatactgaatggtggggatacagcatcaaggagcatagatataaagccaagaatctcagaagaaaagcctgataaagcaaaaccttgggaactaatggaagttctaaatccccagcaatgccatgtagcaacaatgccagaaactccagaccaagccagaaaggttgtccgacttctgtacacaaattctggtgttgggttgctagcactagggtctaacgccattcaaaggctatggaaatggagtcgaaacgaacaaaatccgagtggaaaagccacagctagtgttgtgccacaccattggcagccaaatagtggtcttgtcatgacaaatgatacagcagataccaatccagaggaggcagttccatgcattgcactctcaaagaatgattcctatgtgatgtctgcttgtggtgggaaggtttctttgtttaacatgatgacattcaaggtgatgacaacattcatgccacctccaccagcatcaacatttttagcatttcaccctcaagacaataacatcatagcaataggaatggaagattcaaccatccacatatacaatgtcagggtagatgaggtaaaaactagactcaaaggacatcaaaggaggataactgggttggcattctccaccaaccttggcatacttgtttcttcaggcgctgatgcacagctctgtgtgtggaccaatgacacctgggaaaaaaagagaacagtctcgatacaaatgccagctggaaaaactccttcaggagatacacgggtccagtttagttctgatcaaagtcacttgctagtagtacatgagactcaactagccatatatgacgcatcaaaaatggagaggatctatcagtggataccccaggacacattgtcagcttccatatcgcatgcatcatactcatgtaacagccagctagtttttgctgccttcactgatggtaacttaggtgtttttgatgcggagaacttgagattaagatgtcgaattgcaccatcggtgataaacagcaatccacctgttcaccctcttgtcgtcgccgcacatccccacgagccaaaccaatttgcggtcgggctgtcagatgggtccgtcaaagtgctggagccattggagtccgaagggaaatggggagcgcccgctccggcagacaatggcatcattcccaatggcaagacgccagcttcgtcggctactagcaaccctgctgcggatcaaatccaaagatagattgtattccctaagcttttctttttctgcaaactttctaattacactgacttatttgtatgtggatgccgttaggatattatcgtcatttgttgtaaaaaggacagaataggttttatgttcaggtgtggttaactttcaggtactaccctagttatcctgttcatggaagattatgtttgcgatacggggtaatagtgtctataaagtatgtcgcctaaggttttctcaggtttagctcgatagctcaaatgatgtaagctatatatttcttcatgaatgtaaagcaatacatagtttttgctcaagatctatttttacctggttttacatagtttttgctcaagatctattttacctggttttttaatatagcgtgtgttcatcgaaaaagaggaa

SEQ ID NO: 17088 - DNA, 4944 bp, Zea Mays
cagcgagcaagctgaaggtgaaagccacagcagctcgtccccttccccccacttcttcctcagataaggagaggccccaggccagagaaaaaagcatcgaatttccccccgttaattggcctgagccctcagccgtctaccagcagcagctagaggcagacaagctaggttttactgcttcattgagcacaaagatccgctgacctcttgctcttggtaaaaatccaacctttcttgtattgttttcttcctgggaaaacctccttgtggtgcataaacttcgtagtacactctgccatttctggagaggaagctgagaactactatccatatctggcacgacccttgtcaagaaccatggctgttcacatgccatgaagctgcttgaactggaggcacctaaatgctgtggattgttcctatgcagatgattggatcagtggtttcaggcttcggggggttcgatcagatgttgtatgaataatagcaggattgcttgagagactatagtttgggtactgtttgcttctgtatttactggtacggtttcctactgatctgcggctgcgcaggaaggcattctcttttttgccgtaccatggatgcaccggatgttcaacagagcatgggatataaggagtccaggggtggtatgcctaagtttttccatgcccttggaccagcactcctgatttcaatgggttacattgatctcgggaagtgggtggcagccgttgaagctggttcttgttttggattcgacctggtgttgctggctctccttttcaatttcactgccattgtatgtcagtaccttgctgcttgcattggcactgtcacagggaagaatcttgcagagatatgccaccaagagtacaaccagccaacatgtatattccttggtgttcaagctggattgtctttgttgacgtcagagctgactatgatttttggcatagcactcggattcaacctcctgtttgaatatgatgatctcatcacagggatatgctttgcaacagtggtacctaatctgctaccatatgctatatcccacctgggaaagaagatggaagggacaataaatgcctgcatagcaggatttgcacttcttagttatgtgcttggcttattggttagccagccacaaattcctctcacgatgaatgtaatattccccaagatcagtggtgagagtgcttactctctgatggcgcttcttggtgcaaacataatggcacacaacttctacattcattcatcagttgtccagggtcagaaaaagtcatctgcagttggtcttggagccttatttcacgaccaccttttttcaatattgttcatttttactggaatctttatggtgaactatgttctaatgaactctgcagcagcggaatctactaatactcttctcattaccttccaagatgttgtagagctaatgaatcagatatttgtaaaccctctggcaccaactatatttttagtggttcttctcttctccagccacatcatctcgctgacatctgctatcggtagccaagtgatttcacaccatttattcggtataaaccttcctctttctggacatcgtctcctactgaaggtttttgccatagttcctactctgtactgggcgaaagttgcaggagctgaagggatataccaattattaattatatgccagattattcaagccatgcttcttccatcttcagtcgtcccactttttcgtgttgcttcatcaagatcaataatgggagcccatagagtgtctttgcatctggagatactggtttttcttgcatttctccttatgctattttcaaatatcatatttgtggcagaaatgctatttggcgacagtgggtggatgaacaatctgaaaggatatactggaagccctgtggtgctcccatataccgttttagttttagttgcacttatatctgtggctttttcactgtacctggctgttacaccattgagatctggaagtcatgaagctgaatcccatgaatggtctgtgcattctcagagagaactcttgaatacttctcaagaaagggaagatgttaaggtggacaatgttacatatgaggaagatcaaagatcagatgttgtcccttctcccagggatgtgcctgacagccatccggaactggccttggactatattgatacttctgacactgctgtagaatctgatcacgactctcaacaatctactgcttatgcatccactgctcctgaaacctgctcctccccgtcgtttactcgcgaggagtcaaaatcagttgttgcagtcaactggccggagcctttggagaaggttcctacttctactgtgatggaggaaagcacagtagaaaatgtggtctctaggatcacgactgaaagagatgttttagtagaaacagatgttgtctcgggcaaggataaggaagatatccgtactttggagtctgagaagtcaattgttgatagcaccccatatgtgtctgatgacggtccgccatcccttactttcagcaggggaaagggctcagatgcaggaaatggcagtggtagtctctcaaggttatctggtttgggccgtgcagcaaggagacagctagctgctactcttgatgagttctgggggcatctgtttgattaccatggtaagctcactcaagaagctagcaccaaaaagtttggtatcttgcttgggatagaccttagaacacctagcacatctgtaagaacggataaacaagctgctgaaatacttaagagcccactggtgagagactcaatgcggggggcagcttttttgtcaagctcagtggacatgatgtcccctaagaatgaaacgtcgaatttggaacttgcatatgggcttcagaggggacctggcatgggattgtcaagctggtctcagggtatgcagctaccaaatacacagctgcagagctcaagcaatagcctacttgagcagagtgcaagattaaactcaaattttagttcatcttattcagacaacaatcagttctaccaacctgcaacaattcatggataccagctcacatcttacctgaaacagatgaatgccagcccaagcctttactctagcatgccgctggacccacaacggcttccaaaatcatctgtgtctgctgtgccaaactatgctgattccatgatgcatgctcgtaatcataacctgcttgcttcactgggtggtactactacacagcttcctgcaacatcccgcgtaggctcaatgatgcctgaaagatcgtattatgatccttccagcgttgatgggaatgaaaacgctggttcacctgcttactcaaaaaagtaccacagctcacctgatatgtctggaataatcgctgcaagtagagctgcactcttgaatgaagcaaagttgggtgctgccattggaccacagtcatacctcagcaggctggcggcagaaagatctcaatatgcaagctcaacagccaggcccgcggctccattagcatttgacgagctttcacctcctaagctccagagtgatatcttctcggcgcagtcaagcatgagaccaagtgctagatccctttgggctaagcaaccatttgagcaattgttcggcatgtcaagtgcagagctcagtaaaggtgacttcaatcttccaggcagatcaggtggcgtggccaaggatgatttctcttataaggaatctgagacgaagcttcttcagtccctcaggctctgcatcatgaagctccttaagctagagggatcagggtggctgttcaagcaaaatggtggttgtgatgaagatctaatcgaccgagtcgctgcagccgagaagctattgatgcaagggactgccgagaatcaactgctgcttcatggtggtgatctccagcaacattcttccgaccaggccggcatccagtacatgcgcacgcttcccaactgcggggaggactgtgtttggcgcgcgtcactcgtcgttagtttcggtgtctggtgtgtccgccgagtgctggacatgtctctggtggaaagcaggccagaactttggggcaagtatacctatgtccttaaccgtcttcaggggatcttggaccctgcgttctccaagcctcggggtgctctgacaatatgcacctgccttcagaaagacaccagagtgcgcaatagcccaccccacagtgggctaacagccatgggcccggtccccacaccgatccggggcgccttcacgaccgcaggcgtggttctggagatgatcaaggacgtggaggctgcggtctcaggccgcaagggcaggagcggcacggcggcgggcgacgtcgccttccccaaggggaaggagaacctggcctccgtgctgaagcggtacaagcggcggctcgccagcaagggccagtagcgcgcgggtgtcagacaggcaggcgatcgcaagcaatgttaggaggagcctgactattgttctccaggggggctgccactggcgccggcctccctgagccctggattttttcgttgcacgacgttcctagggaccggtggttgcccgatggtcgtcttggtcccttccagcaggttttttttttccttccctctttctgttggtttctttttgttggctttgtgatgttttgtaaggggcaactagggtatgtgctcagaaggactcaagatgtacacgcgaagatgtactagtctgctgatgcagcgttgtaaagtccacactctgcaggttaaccctttttggggccgtcaagtgttagtgcgtgccctatgtatgttaatcacccctgcagagaggttgcgaatactgaactactcacagacctgcacctgtcgagatcgtttgtaatatccgacgtcttgttcagaattgttctcactcttttttgcccgttgtgtaatttaccctgaagggacttcaag

SEQ ID NO: 17089 - DNA, 2493 bp, Zea Mays
atgcacgttatccatggcgcctcgaggagaccccggcgaatgctggcccttggatccaaccgagctagcatgcatgcgcattcgctgccttccaaacggaggaaggggaaattaacaacgcgattacgcgaagccttcaaaaagccagccccctcctctcccttccaggcaacccaaccacaggccacagcgcagcggtgtgtgtgggtgtgtgtctgcgccagagaccaaacaccaacctccccccaccctcgacccatccccacctcgccgccgccgccgccgccgcacggtctccttccccgaggttcaagtaggccattctccacagtacaaggttgaacgcaagttggggaaaggtggttttgggcaagtatatgttggcagaaggatttctgggggaacagagcgcactggacctgatgcttacgaggttgctttgaaatttgagcaccgaaacagcaagggctgcaattatggccctccatatgagtggcaagtttatagtgctctgaacgggtgttatggtgtaccatgggttcattacaaaggtcgacaaggagattattatgttctggtgatggatattctagggcccagcctttgggatgtctggaattcatttgggcagttgatgacacctaatatggttgcttgcattgctgtagaggcaatttctatacttgagaaacttcatgcaaaagggtttgttcatggagacgttaaacccgagaattttctacttggccagcctggatcccctgacgagaaaaaactttttctgattgatcttgggttagcatctagatggaaggaatcagggtcatctggacaacatgttgaatatgatcagaaaccagatattttcagaggtacaataagatacgctagtgtccatgcacatttaggacgtactggtagcagaagggatgatctggaatcattagcatatacattgatatttcttcttagaggaaggttgccgtggcaaggttatcagggcgagaacaagagttttcttgtttgcaagaagaaaatggctacctctccagatctattatgctgtttttgcccaactccattcaaacttttcctggagactgtgacaaacatgaaatttgatgaagaaccaaattactcaaagcttatttcccttttcgatgaattgattgagccccagcatttgaggcctattagaattgatggtgcattgaaggctggacaaaaacgtggaagattacatgtaaatccagaagaagatgagcaaccgaagaagaaagttcgacttggaagcccagcaaatcagtggatttcagtttataatgctagaaggcccatgaagcagagataccattacaatgtagcagatgccaggcttcatcaacacatagagaagggtaatgaagatggattgttcattagttcagtagcatcttcagccaatctttgggctctcattatggatgcagggactggtttcacatcccaagtatatgaactgtcacccatattccttcataaggattggattatggagcagtgggaaaataactactacatcagtgccatagctggtgcaatgaatgggagttccttggtggtcatgtcaaaaggaactccttacactcagcagtcttacaaagttagtgaatcattcccctacaagtggatcaacaagaaatggaaagaaggttttcatgttacatcaatgacaactgcaggaagccgctggggtgtagttatgtcaaggaactctggatactctgaacaggtagtggagttggattttctttatcctagtgaaggtattcaccgacgatgggagaacggatatagaataacttctacagcagctactggcgatcaagctgctttcatattgagtatacctaaaagaaagttaatggatgagacacaagaaactcttagaacatctgcttttccaagcaaccatgtgaaggagaaatgggccaagaacctttacattgcttcaatatgctatggccggacagtgtcatgaggcttgctcggctgcatccctagttgggaagagcatgttctgatgagtaacccgttcaagatgaagcaccttacagtggccagagtaggagctcaagaaagaaccgagaggaaggtggaaagcaatcggccaataagcagacgaggagtatgtgatctggctagtagcgggtacaggcgctaatggcgtcaaatgttttgtatcagcatgttttgcttttgcttcgctcctgaccgctgtgcaaagagtagacagcttgtttctttcggaggcaagtcatctgagaaccatcgtgtatagcgtatgatgtcattgtattttctttagtggaggccaagttccatctttccggaactcccaaaatgctaagttattatgcgaggaaacaagtgtactgataaaatcggtgtatcaattccattattcgacaattctcacctgcattaattaatgcaatgctgcattacttatca

SEQ ID NO: 17090 - DNA, 1144 bp, Zea Mays
tgccaatgtgttaacctggacattaaactgtattttagcagcttaaactagtcgctgtaatagttttgaagatgcagcccttttactggaacagcttcgcttatttgataactctgtctatggggttgcgtatgggcttttgatgggccatcgagaagcttggtctcaagcacggtccctctttaatcagctgggccgcatggattctccaacatcttctgccttttacaatgctcttaccgatgtgctatggcatttcggccagaggcaaggagctcagcaagttgtgcttgaaggggtaaaccgccgtgtttgggagaacacatggggtgacttctgcttggacctgcacctcatgtcatgtggtgcagctcaagcaatggtgcatgcatggctcctgaacgtgcgctctattgtttttgaaggtcgagctatgcctgagtttttaagcattctgacaggctggggaaagcatagcaaggtagctggatcaagcaccctccgtcgagtcattgaagcgctgctcctttcaattggagcgccgtttcaggccgagcgcttcaacatcgggaggtttgtgtcacccagtgccttggtgtctgcctggctgagagagtccggcaccattaacatcctcctcctccgcaacgagcgaacgcaacatgcaaacgcgtccaatctggtaccgaggttacaggcgttgcagttatagccccttgatctcatctccttgtccctggtagggttggttcagttctgtcacaagcttcgctctgtttttttttatattcatcttcattgagaagattgtagagtaccataggctgagggaatagctcgcttgttgaatcccagtgttttagtccggtttagccatgaatgtaaaaatgttgtaaaattgtcagcctgccttacaactccttccatcaaggcaaaacgagtgcaatttctatttcttcacgaaaggagctccacggctggaaacctcagacccgtgcctcgcttccttaactgcaaagccctcgtgctcctctttcggtttgtttgatgaaagctacacctggccattactgctttctccctttttggctcgtgatgcctttgctgctttgaggagatgccagctctgccgaagatggagaga

SEQ ID NO: 17091 - DNA, 711 bp, Zea Mays
tcgctcgattgttctgttgcgagacgcccttttcatttttgtttggcggctgtagcggccatggagaggctgaacacgaagctgtacctgcagaactgctacatcatgaaggagaacgagcggctgcgcaaggcggccctgctgctgaaccaggagaaccaggcgctgctctccgagctcaagcaccgcctcgccaagtccgccgccggtggcggtggcggtggcagcaacagcaacgcggcagcggcgagccgcgcctcgcccaagcccggcgccgacgccgacgccgctgcgccgccgtctcatcatcaggccggcggcatgcctgcccccaagcccaagcccaagtaggctgcggctgcggctgcagtccgtcgcacggctgctgctgctgctgtcggatagtggtggccttcatggtgtttgttttagcgatcactttaattagctccggatgttacttagtttcaggaatgtttgtctagttttagttgatgggcactcatgtgtggcaatgatcttgcgatgaatggataactagctagatggatcgatcggtcgatcgtcggggggtatagagaggtgtgcgtttctgaactctgatgagagcggagcttcttcagtcttcgattcgcaaatggtttgaggagagtggcttcctctgaaattcctttgtcatcctgcaatctcttgtcggtacacgtcgtcagt

SEQ ID NO: 17092 - DNA, 1567 bp, Zea Mays
gggttagcgtatcgaaatcaatcgtgttcctcgcctgcacgacgagagcccgagaccaatccagccgccgcctccgccttcgcctcgcctagtattccctccgattcagaggccgatggagtgcatcgccgagatgccccgcgcgccgctggacagcaggctgcgcaagcgtcagcgtctcggctgggacgtcggccctgccgagatgtataaggccgtgcggccgcggcacgggtgggacgtcggccccgccgagatgtatcagttagaactttgtggacaagaagttgtgaatgccatcagtgctgcagccttgggcctttcgtcgggctgtgtttcttctcaagtcaaacaagagcagcctcatgatggttcccctcctctgagagaagatgacagggatgggcattatgtttttgctgttggagataacctcacatctcgctataagatcaatgcaaaaatgggagaaggtacctttggtcaggtgttggagtgttgggacaaggaaaggaaagaaatggtggctatcaaaatcattaggggcattaaaaagtacagggatgctgcaatgatcgaaattggcatgctcgagcagcttggtaaatatgatgaaagtagatctagttatgcacgaattgtgtctcatacacactgatttaaagcctgagaacattctccttgtttctccggagtacattaaagtgcctgattacaaagtttcatcccgatccccaaaggagggatcctattacaagcgggtgcccaagtctagtgctatcaaggtgattgattttggtagcactacctatgatcaacaggatcagagttatgttgtgtcgacgaggcattatcgggctccagaagttatactgggacttggatggagttacccatgtgatatctggagtgttggttgtattcttgttgagctttgcacgggtgaggcgatattccagactcacgaaaacttggaacatctggctatgatggagagggttcttggacctttgccataccatatgttcaagagggcagatcggcactctgacaaatacatcagaaaaggacgcctgaattggcctgagggttgcacttcgcgtgaaagcatgaaagctgtgatgaaattgtccaggcttcagaacctggtgatgcaaaatgtggatcaagctgcaggagatttcattgaccttttgcaagggctgctgaagtatgatccatcaagccgtttaacagcacgagaggccctgaggcatcccttctttacccaagggttttggcgaagatgatgatactccttgcattctaccttgtttgtctgacttgatgtcttgcatttgacagtctgtacttttcagtggtgtatgtaggcggtagatcaatctgtataaagccgttgtagagttgtttcagtcttgtttggaacgtcgtgcagattaagttgtagcataatggaagtcaaatggatgcatttgactttaaatcctgacttgtttgaatttggaatgtcaatggaaatctggtttgaggagaaagtgaacatcatatattaaggccctgtttgatt

SEQ ID NO: 17093 - DNA, 614 bp, Zea Mays
acataacgagaacaggctgctctggaaattggggacattgccgccagggcttctaactttttacaagctgacacaccctctggacaaatcatggcatgtgcttggtttagggtacaatccaaccgttgagcgctcagaaatagacaatgccgcagtcatccactacaatggtaacatgaagccatggctggaaatcgcaatgacaaagtatcggccttactggacaaagtacatcaattatgagcatccttacattcatggatgcaagttcagccaataggaactacctaaacattcttctgtgatgaacactgaagttagagggcactcaaaatatagtcctctcttagtagtataactatcacatgttctttcttcgttttatattaagcttatcatgtgtatgtagtagtttcatcgcctttagtccgttgtcggttcttgtctttttttttgtcatgaaaaggacgatgagttcaaagattctcatcagctgataaatgcaatatatgaatttctgttggtagcaaattaatgatgtcactcaaactgtgttacgtgttccgttgaacattcatgcgagcattttaatggccattcgagagttatgctag

SEQ ID NO: 17094 - DNA, 871 bp, Zea Mays
ccccgccctcaagatgagcacatcctcaaatgaaagaagctggcattccaagaagactgataaagccagaagatatccctggtctcagggaagctgggtggacgcctgatcaattggggcattctaaatcacgatcatcattctccccggactataatacttacaggcaacagcttactacccttatgcagacagcgctgaagaatctgaatgaacatcctgatgcttggccattcaaagagcctgtggattcacgggatgttccagactattatgatatcatcaaagatcctattgatttaagaacaatgttaagaagagtcgactcggaacaatattatgtgaccctagagatgtttgtagccgacatgaagagaatgttcagcaatgcaagaacttacaattctccagatactatctattacaaatgtgcgacacggcttgaaaacttcttctcgggcagaattactgtactgcttgcacaactctcaaccaagagctaggctggcgtgggctcactggactgggcactactgtcgcatgttgtaaaattattattggctcactggactggacactactgtcgcatgttgtaaaattattaagttgtattgatatagttgtcaccttgctgaatgttcggcacggtgatgaacttttagtttagcattattttaaccaggagggacactgattgatctttacatttcggtctcaacctggccggcctaataatatagattgaggagattcttcagtttctagcacctatgggtaaagatgttttgcatccttaaatctctatctcactcaatctagactcaagtgttgagaaaaaaaacgcaaaaaaaaaaaaaaaaactaaactaaa

SEQ ID NO: 17095 - DNA, 2690 bp, Zea Mays
aaaacatccgcggctagggtttaaggattttcttctccgctcccccggcccccattcgcacccagcacagctacagacggtctctatggccaagaaaggggcgaagagaaagcagcagccgccgccggcggctcccaccgcgaagaaggggagcaaggctgtgcccccaccgaaggctgcgaagagagcgcccaagaagcaggagcttctcgagtcctccgacgattctgatacggagcagcagctcctggaggaggcctcccacctcgacgtcccctctgattccgacgccgaagagctctctgggtcggacgctgaggctgacgagctctcgggctcggatgccgattccgacggaagctcgagcagcggcgacgacgtggaggatgaggaggaggaggaggaaggtgatggaagtgatgatgaccccctggcggacgacttcctcgctggtagcgacgaaggaagcgagggtggtgactctggactggagtcagacgagtctgatgacctcgaggcaaaatcacgagcaattgatgagcagaaaatcaaggcggaagaagatgcagaggaggaacttcaaaccaacataagatcagaatctgatgagttcagattacccacggcagaggagctggaggaagaggcacacagaccacctaacctaccaaatctcaaaaggaggatttcagaaattgttcgagtgctctcaaacttcagcaagctgaggcagaaagatgttccacgaaaagattatatcgaacaactgaaaactgatatcatttcatactatggatataatgattttctagttgaagcattaattgagatgttcccagctgttgagcttgttgagttactggaagcctttgagaaaaggccgcccgagtgcttgcggacgaatacactaaagacccggaggagggatcttgctgctgctcttataccaagaggatttaatttggacccgataggaaaatggtcaaaggtaggattagttgtctatgactccaccatttcagctggtgctactactgaatatatggctggtcattacatgaaacaaggtgcaagttcgtttttaccagtgatggcacttgctccacaggagaaggaacgaattgttgatatggcggctgctccaggtggtaagactacttacattggcgctcttatgaagaataccggaatcatctatgcaaatgagttcaatgagaaaaggttgcatggacttttgggaaatatccatcgcatgggtgtgacaaataccatagtttgtaactatgatggtaaagagctacccaaagttcttgggatgaattcggttgacagagtattgcttgatgctccctgcacaggaactgggaccatttggaaggatctacaaattaaaacatcaaaggacattgaagacatcaggagctgcgcctttgtccaaaagcaattgctgctagctgctattgatttggttgatgccaactccaaaactggtggttacattgtttactcaacttgttcgataatgattccagagaacgaggcagtaattgactatgcacttaaaaagagaaatgtaaagcttgtgccttgcgggttggattttgggcgtccaggattcatccggtaccgggagcatcggtttcatacttctttagaaaaaacaagaagattttatcctcatgtcaataacatggatggattttttgtagctaagctgaaaaagttaagcaatacaattccggtgacgtctgagccgtctaaagcatctgaagaagcagctaaggctgatggtgaagatgagaaagctatttctaatgaacaagagactggtgttcctgataaagatgagaaaactgttgagataaaaaatcataaaaatgtgactaataaaagaacaagtgtcaccaaagagactggaagccataaacgtgaatccaataagccaggaaagcatctcaagataaataagaataatgctacaaaagaaattgatggccctgagagcagtgaaacaaatagagatgggaaagaagagcatcgcgtacaaaccaagaaaatgagtcacaagaggaagtttgcttctgatagatccaaaaaatctggccccgagagcttctcgggtgtcaaagagaagagacaggtcagtgacaagaagcggaaaaagaaatggcaattcaagctgaggcgtgactgggaagctgaaaagaaaggtgacaagaggaggaaggtatgaaggagtattcagatgtccacaggccccaatgaaatttgatgggtgtgtaagggcaaccgagaattttgagcaagcacgagtttgcagccaccgaaaattttgatgtatgaaatagcgattgtagtttattattttttattcagtgtacgtctcaagttttatctttaatgagtgacatatctggcagggaaactgaagcatattattatcttgctgaatgctatgtgaatcctgctgtacgtgttataaaaaaaaatcatatctgagatactagctgcaagaacctgacttctagatactgtgggttctgaatagtttcatcatgtggcttgtttggagatctagatcatgaaggcgcagtggcaactgattctgaagttcacgtttggtttggagtcttggagacaagccttgatataccgaacaagggcctcaaagatctgaagtggtgtaaggg

SEQ ID NO: 17096 - DNA, 3232 bp, Zea Mays
atggaacaaccacaatgcaatgcgcctttgcaggcagtggggcaagaaaagccgagggagaggaggaagcgacgctaccggcgatgcgtggctgaacaattgagggagagttttgctgtcgacgccgactatgaatacatttcaaaggaccacaagccagattgccaaaatgggtccagcagaagcaccaaggtttcctccccagatgtgatcactaagccagaccatgatgaatctgctgaggtagttgactcaaaatccgaagaggcacaaatcacagatagtgagcaggcaacatatgcttctgccaacaatgacttaaaaggaactaaggcctatcaagaagctgatgtttctggcctttacaatcttgcgatggcaataattgattacagaggtcacagggttgtagctcagagtatcatacctggtattcttcaaggagacaagtctgattctcttctgtatggctctgttgataatggcaagaagatatcttggaacgaaacattccattcaaaggtagtcgaggctgcaaagcggctccatttgaaggagcatgtggttttggacggttctggcaatcctgtaaaattagctgctacagtcgaatgcaagggcattgttgggagtgatgacaggcattacattttggatctgatgagagtgactcctcgagattctaactacattggacaagggcaccgcttctgtgtgctgagacctgaacttatagcatcatttgttgaggctgaatccatgaaacaatcgttgaagcagaaggttccagatgctccagttgcaagtacttctgatgctaaggctacctctgttgaagcagatgacaagtctgaagaaagctctgttcatacacacaaggaaaatgacaactcaagctccgagattcttttcaatccaaatgtgtttacggagtacaagcttgatggcagtccagaggaaatcgctgccgacgaagagttggtaaaaagggctggtacatatcttatagacatagtgatcccaaaaattgttcaggatctatgctcccttgatatctcccctatggatggacagactttaaccgatgcattgcatctccatgggataaatattaggtatctgggcaagattgcaggcatggtcaaacatttaccacacttacaggacttgttttctgctgaaataatagttagatctgcaaagcatgttatcaaggatatactgaggcaaagtttggatcatgatattgggccagctattgctcatttcttgaactgtttcatggggaaagttttaggtgcttctacagagggtagtctaagtgacatgcagtcaaagactctgaagggccatgaaaatagccaaactcaaaagtctactaaaggccataaactgagcaatgctgctgcttcaagaaaaagcttgtcagcttattctcatctaacctctgatggaatttggtttagcattaaggaatttgcaaaatcaaaatatcagtttgaagtgccagatgatgcaaggctttcagccaaaagggtagctgttctccgaaatctttgccaaaaggtaggaataacaattgctgcacgtaaatatgatcttgatgcttcaactccatttgaagcctcagatattttaaatctccaaccagtcgtcaagcattctgttccaacctgtacggaagcaaaaaatcttatggaagcagggaaagtcaggatggctgagggaacattgaatgaggcatatgcattgttttctgaagccttttcactgcttcaacagataactggtcccatgcacaaggatgctgcaaattgttgccggtaccttgctatggttttgtaccatgctggtgatacagctggggcagttgtgcagcaacatagggaactcatcataaacgagagatgtcttggtcttgatcatccagacacagcccacagttatggtaacatggccttattctatcatgggctcaatcaaactgagctggcactgcggcacatgtctcgcacactgctgctgctaagtttggcgtcaggacctgatcacccggatgttgcagcaactcttataaatgttgcaatgatgtaccaggatgccagtaatatgaataccgctctcagcatgaaaagaagacatatgatatactggtaaaacaattaggggaaaatgactcacggactgaagactcaaaaaattggttgaatacatttaagcttcgagaagagcaggtcaacgcccagaagcagaagggccaggaagctaatgcatccgataacgctgttaaattcttgaaggcaaaccctgcagttttacaagcaatgaaggctgctgcgatccaatcaggtggtgtgtcagcaaatgtcaacaggtcgctcaatgctgcagtcgttggagaaggtgtaccacgactgagaggagtggatgagcgagctgctcgagcgactgcagaagcacggaagaaagctgctgcaagaggccttaatgtccgtaatggccctgtggcaaaccatgcgtctgatgaactagctcagattctcaaactcatcaacgctgtttcggggtcttccactcctggctctgcaaagactgaggtatctgcctctgaagggcaggcaacgaatggatgtattcaaaatggaactgacactgaaccgaaggctgcggataccaacgggctatctgcatcggttaagtccactgtcaacgcaccatttggactggggacaacattggagtcgaagaagcagaaatcgaagcaaaagtcgtagaaaacctgtgcttggaatttcctttagcaacagttttggactgtagagtgatttgggtttttgacctttataggattgccacgttcacgtggtggaagagttcatttgtttttgttggaggttttttaggaggtctcaataatcattacaagaaagaagacaattgtttcgaatcatcattgatagaccactgatgagatattggctaatccttaagttaataaatcttcagtcgatacaatacctgtttaaagcatccttgtgatggctgctattgtttgtcgtacggcatatgctggtataccgttaatgtagttcttgatcatcgtatctttttctagaaggtatacccgtacaatgttgccaactattttattattgctatcgataattattgaactaggctgagcgctgttgcttggcctggccgtgaattatttctagcatcactttttgac

SEQ ID NO: 17097 - DNA, 631 bp, Zea Mays
  misc_feature (1)..(1): n is a, c, g, or t
nagagatgaggaaaagaagatgggtacacttgtcaaagaggaatttggtcgtccaaatagggaaaatactatgggaatgcgccatggttcatatgataaactagatgatgatggccttgcaccacctggaacaagggtctcgggtgaagatgtcattattgggaagacatctcctattccacaggatgacgctcaagggcaagcttctaggtactcgaagcgtgatcatagtacttctctgcgtcacagtgaaagtggcatggtggatcaggttctgttgacaacaaatgcggatggtctaagatttgtcaaggttaggatgcgatctgttcgaataccacaaattggagacaagtttagcagtaggcatggacaaaaaggaactgttgggatgacttacactcaagaggatatgccatggacaatcgaaggcatcacacctgatattattgtgaatccacatgctattccatcccgtatgactattgggcagctgattgagtgtatcatgggtaaagttgcggctcagatggggaaggaaggagatgccactccattcacggatgtgactggcctatgttgtgcaaaacatgctatgatccatggttattacggcaccacagcgaggtga

SEQ ID NO: 17098 - DNA, 2229 bp, Zea Mays
cagcattctagggttttcagtttttcgagctccagtgcgccgcggccgccgcccgtgatgcctgactcaccggagctagtcgtgagggcgctcgggaagcgcctggcgcagccgcgcttaggcaaggacgcccttatcaagctcctcaagcaagctgaaagtgcattatcagagtttagtcaatcatcctctctgcaggatcctcttcatgctctgagcaaatctcttgtccagaccactttactcaaccataaggataaggatgtcaagcttcttgtttctgtttgtttaatcgaagttatgcgtgttcttgcacctgatccaccttttagtgatgaaatacttaaggaaatatttaagctatttatcagcatatttgcggaccttgctgaaactagcagtccatttcttactagaaggatgaaaattttggaaaatgttgctgcacttagatgttctatgatcatgctcaacattggctgcgaggacttgattcttgatatggtcaaaattttcttctccacagtgaagcatggtcttcaaaagagtgtgcaccaagctatgctatcaatgatgacacaaatattgaatgagaaagttactcagtctcttgtagatgtgattttacgcaatttagtaaaagatgacaagggagcatcccacaagctagcttttaacatcattgaaaattgtgctgacaaattggagcctatcattcacagttttttgtcctcatgcatttttaacaaggacatgcctgttactgaacttaggagattatatcataaaattattcttgaaatattccagtgtgcaccccagatccttttcgctgtcattccgagcttgacgcatgaacttcttagtgaccaagttgatataaggctggaggcagttcaccttattgggaggcttcttgccctatctaatcttcagtttggtcaagaaaacaagatggtttttatagaatttctaaggagattctctgacaaatctgcagaagttagaattgccgcaattgatgcagccaaagcgtgctatatggatgtgtctagggatgaagcacaacatatactttcatcacttgaagggaggttactagattttgatgagaaagtgaggatccgagctgttcacacagtctgtgatttagccaaatcaaaccttagctcttctgctaaactgatattacatgcagctgagagactacgtgacaaaaaagcatccgttagaaaaaatgtaatgcacaagttgttggagctgtatcgggattactgtgagaaatgctcaaaaggaactgccacagtcaacactcattatgaacaaatcccagctaaacttatagttctttgtttcgataatgatattgaatccttcaggccacagaatatggagcttatatttgctgaagaactctttccattctctctttctccaaaagagagggcgacccattggattgcgttcttttcttatttcaaaccagaacatattaaggctttgaacatcattttttctcagaagagacggttacaactggagatgcaaacatatttatcacttcgagcaaggaaggaggaatcatcagaagaaatgcagaagagaatccgtgcggcattcagaaagatggcaacatcctttccagatatttccaaagctgaagagtgctttgaaaatttgcaccagatgaaagataataacatatttaaggatttggatgaactaataaatgagggaaccagttttgcaaaaggccgcgtgaccagagatatgtttctcaagagaatcgggcagaaacacccaatttacacattttccagagtgctgtctataaaatgtttgcattcaatatttaatcaggagatgatctgtgccatcctcgaatctcttttgtcccgcggaaatgaattaattgattatgttgagtctgcttgtgatctattactggtaattgcaatggtgtttccatcattattccgaggctcagaggagtacttgcttaagttgttcttagaagaaccaattctgataaatgtgaagactctccagatgttggcacatttggcaaaatctacacactgtttgtctactaattttagcaatgttgtgtacccattattggagcaaaagtgcattgaaggtactcgtgctgaatcaaaatacgcaatcactgcaattgctgcactccactcagatgataagaaatttgctaaattatttaaggtaggc

SEQ ID NO: 17099 - DNA, 127 bp, Zea Mays
attcgacaatcgaactattctgaataatttatcagcttaccgtttcaatagctgactcgaatccgcgagatcggtagtgattttccgatccaagcaatttgtcgagcgcttgggaaatatcgtgctg

SEQ ID NO: 17100 - DNA, 794 bp, Zea Mays
ctcctgtttctagtcactgaagatttctcttgtccattttgctatgtacgatgtggaagcttcaagggtctaggatgccatttaaactcatcacatgatctattccactatgagttttggatatctgaagagtaccaggttgttaatgttagtctgaaggctgatgcttggagaacagagctttttgcggagggcgttgatccaaggcatcaaacattttcttatcgctcaaggtttaagaagcgtagacgatcaaagaacacaatggagaaaatcaggcatgtacactcacatattatggaatcaggttcacctgaagatgaggcaggatctgaggacaactttgtgcaaggggagaatgggacttctgtagcaaatgcttcgattgatcctgctcaatctttacatggcagcaatctttcaccaccaacagtactacagtttgggaagacaaggaagctatctgagagatctgaccctagaaatcggcaactcctgcaaaaacgacagttcttccattctcacagggcgcagccaatgcaactggagcaagtgttctcggaccgtgatagtgaagatgaagttgatgatgatattgctgacttcgaggatagaagaatgcttgatgattttgttgatgttacgaaagatgaaaaacttattatgcatatgtggaattcatttgttcgaaaacaaagttcgtgcagacaagcatcttgggtgaacaatctacaatctgtgtgtttagttttagccattcctgtatggagcaaaatacattctctcttgtgatt

SEQ ID NO: 17101 - DNA, 860 bp, Zea Mays
aacaattccatggaacatttctgctaattgttccatgtatgtaggaatcgcatgttgaaacttcctgcactcttttcttttctgcaataaaagggaaaatgatcaaattcaagaagggggaactgacaaaccttgagtcctggaacccagtcaaaatgcttattactgatacaagagttggtaggaacacaaaggcattggttgctggtgtgtctgaaagggcgtctaggcatccagatgctatggcttctgtcttccatgcagtgaactctattagtgaagagctttcaagcattgttgagttagcagccgaggatgagatagccatcacctctaaggaggataagctagcagagcttatggagatgaaccaagctaactggagctggtggtggaggctgtgtgttgactctaataccgacgttatcggccaatactgttctggagaaagtcaccacagagctcgaatctcacggttatcgctgcttcaaagttgaggttggtgggcgaggtctccaagtattccgtggatagcactcatcctatttcaaggagatgttgtaccaaacttagatggcttacctgcattgaagctgtttagattctcttcttgagttattccaagatcatgataggatattcttctcctaagcctagcaggttcttgtatccagtactttgctccaggattaggacattcttatgctatccctagcgatcttgtatcaaataagctcatagatgcatgatcattgctggtgtgattgttgtattaagtaaacagacttttaattgctccaaatgtcgtatcgacttcatgatgccagcagctacccatatgtgcgagtgcgacctctcca

SEQ ID NO: 17102 - DNA, 890 bp, Zea Mays
gagaaacataacattttgattccttgcggtcgcaaaggcaaatcgacacaagcaaatgataaatgtgtcatctatccatcgaatggtcccattccattccaagcaagcggtccaggtgggagaggaggcgccacacccagacgagaggcttcccgagtccaccgccagcacgagtccaccgccggcactttgactcggagccggagattcttgcgaggaactggcagggatctgctgcccatccgcatatcatgctgcaacagtagttcactcgtcggaggaaggcgcatcacacgaactaggtggaaggaaccggacggagcttggagagggcaagcgggcaaggggagtgagtagtggttctcggtgtcttctttaaccactctgtccgatccgctggtgtgtctgcgcgatcctgttgacgaatcaatcgccgggacggttaattaagcattccaatcctcagccatggccgtggacactactcaaccggagtactggctcaactggaggttcttgctgtgcgcgctctgggtctactcctgcatggccttggcattcttcctgattaagaagtacgagggggccagttcaccggacagcaatggcgatgacggtggagacagagaagaggcgttaccacgtgtcagacctggtgttgtttatcttgaagattgctggaagacatgccttgagggtatccaccctggctggctgctggcatttcgcgttgtggccttcttcgttttggcttcgctgctcgtggtcgacatcattactgatggatggagtatcttcctatactacactcagtggacgttcttgcttgtcaccttgtattttgggtaactgacactgacatcacatctcactgcactcctgcaacatgg

SEQ ID NO: 17103 - DNA, 990 bp, Zea Mays
ctggagtggagctatatgggcgatgcctgcgtgcccgcggactgtgccggagttggaaagagttgcttgctgctgcggttctctgatgacacattcacgacaagttttatcaccaccatcggcattgatttcaaggttaggacggtcgagctcgatggaaagcgtgtaaaattacaaatttgggacactgctggtcaagaacgtttccgaacaattaccactgcttactacagaggagctatgggcattctgcttgtatacgatgtcacagacgaatcgtccttcgataacattaggaactggattcgcaacatagagcagcacgcatctgataatgtcaacaagatcttggtgggcaacaaggtcgatatggatgcgaagcgggtggtctccacagctcaaggtcagaagctcgcagatgaatacgggatcaagtttttcgagacgagtgcgaaaacgaaccgaaatgtggagcaggtattcttcgccatggcaagggacgtgaagcaaaggctcaccgagaccgttgccgctgcggctgagcccccgaccattcagattagcaggccagaccccgaccaggctgacgcagcctcctcgcggcggtggtcgtcgtcctgctgtaacacctgatctggcgactgccgtggcgaaatcaagcagcgtgaatcttgatgcgcgtgactggactgctaggttactgattgtcgcatgtgttcactttcattccggtgccgtgccaagccaagccgggatgtataaatttcgctgtctagtattcacctcaatcaatgtgttaactcccgctgcttcgcacgtcacgtcgtttgtttgttgagagcaaaacgtgtgtggggcagataaaaaaaaaagccctggtgggtttgctcctgtcacgtactaaacagaacgtgtctgatgattgtgtcgacggtggaacttggaagcgtgcttgtctcactattgttccgtgttttcgtccaacgccgg

SEQ ID NO: 17104 - DNA, 1952 bp, Zea Mays
gggagagggactgagcctgcataaatcgtcagcgaataggccgcccgcacgacttctcttcccaattcccatagatcgatcgccgacccctcgagcaacgcgatcgcccgccgacccgacggcggcatggacaccgagtccttgcagcaggggagctcctcgtcgtggcacacgacgggcgccgtgtcgtgtggagccgcgcagcagcagaagcgccagcggtgccagggttcttccagcgatcaagctggttccagctcaagtagttctctgcaaatatcagaaccagaaccccaacaaatccaagaagaagaggattactatatggaggatgattgtgatgatgattttgatggctacgacgaagatgattatgacttcgatgaagctgactttaaccagcaccttgctgataaatttgatgatttggatcttcctccaggcgtggaggccaccgtaccttggttgcagaaaactacacccaaggaagatgtcaaagagccacctaaatcaaatactgcagatgagaatgcaaataaatatacgcagttcaagcagtttgatactgttcagaatttctctgaccattactacgctaagaattctcatggagagccaaacagagcctggtcaaagagagttcaacatgactggaaacttctggagaaggatctaccagcgtatatttttgtccgggttgctgaagatagaatggaccttcttagggctgcgattattgggcccaagggaacaccttaccatgatgggcttttcttctttgatattcacattccctctgcttatccttgtgctcccccgctggtatattaccactctggaggacttcggattaatccaaacttgtataacaatgggaaagtgtgtcttagcctgttgggtacctgggatggtagaggttgtgagaagtggaatccagctcaatcgacaatgctgcaagttcttgtctccattcaagctctgattttgaatgacaagccatattacaacgagccaggatatgagtcctatgccaacactccgaatggagagcggttggctttggactataatgacaacacctttctgcactcatgcaagactatgttatactcacttcggaggcctccagagcactttgcagatcttgtcgctggccactttcgggtgcatgggcacacgattctcgcggcatgcaagcactacatggcgggtaatgatattgggtcagtggtgccagaggaggaggaggaggaggaggaggaagagtcatcagaacacaagagcggtgatgctggagcatcgggtagtgcaccagagctaggagtgatcaaggcaatccctacgaagagacgcagctcattcaatccaagcttgaaggtgctgtacgaagatctgctgatggaattcaatgtgaagggtgccgacacaaggaaattcatcgatgagaagttgaagaagaacaaacctgcagccgcctgaggaacatgcttgcaggcaaagcttttgtaggtataactggtcttggtggtgatatctaggacctggaacttgcttgctcacatgtagtagagagtatggtttaggggtggagtgctgagagagttctctctcggcactatttatcgccaatctaaatctaatgataggtttaccgcatcataaatatatatgtaacggctatatcgtctttcgctgattgttctggcatatcatgataggtttacccaaggacgaaagctaagtaccaattggtttggaactgtattacggtctacttgtttttatatatttgacgccatatagttcaattctattaggaatatggtacattatgtatagaggatggatttaaagagaaccgttggagggcctagaatttaggggaatgaaatattttagagatgaaaaagtagaatttagaggggtgaagtagagggaatggttggccaccc

SEQ ID NO: 17105 - DNA, 110 bp, Zea Mays
cacagttccaagggtgagcaaactcttgtttatgtatgaaccttctttgcgccgtaaaccagttgtttcagttttggaactctcagacccagcaagatcaatcaagttct

SEQ ID NO: 17106 - DNA, 1248 bp, Zea Mays
ccctccgtgtcgtcaacggcaaagccaaacccatcaaacccgccgtccaaaccagctgaccacagcagcagctctccatcggacggcagagagcagccgttcgccacttggattcaaacgccccgtcactctaaccgctgctgaaactaccaaattacccctagcccgctccctcagcttcctgctcccccctctgtcatggccaagacgaagcaagggaagcgggatgtcgacgcctataccatcaagggcaccaacaaggtggtccgagtgggggactgcgtgctgatgcggccagcggacacggacaacccgccgtacgtggcgcgggtggagcggatggagtcggacgggcgcggcagcgtgagggtgcgggtgcgctggtactaccgccccgaggaggccaagggcggccgacgcccgttccacggtgccaaggagctcttcctctccgaccacttcgacacgcagagcgcccacaccattgagggcaagtgcatcgttcactccttcaagagctacaccaagctcgacaacgttggtccggaggacttctactgccgatttgactacaaggccgccaccggtgcattcacccccgaccgtgtcgccgtatattgcaagtgtgagatgccgtacaacccggatgacctcatggtgcagtgtgaaggatgcaaggactggttccatccgtcttgtatgggaatgaccattgagcaagcaaaaaagatagatcattacatgtgctcggattgtgctaaagaaaatggtgcaaagagaccctcaaattcatactcagtttcaccaaactcagattctaagattgaatcaaagaggcgcaagagataaatgctgcggcagaagcacccctggcaaaggagatgcggtatttatggtgtcagctcctcattactggtgcatatttgagatgttgatgtgtacactgcgagagaagagccaagccaattgtagggcaaaacctatttgacttatcattcttctgtgtattctgcctagacattagtgtgatgagtaggtgagttccccgttgcggcgtgtgcatgatcagctgctggaggcgggatgtcgggaaatgctagaattatgctgactcttgtcgatgtaagtgtatcgtgtgtgtgtgttaacatatgcactggctggaaacgttcccatgtgtgaatggaggatgctgatgatagcttgactgttgtttcatattcaaaatagacaataagaaaagaaaaa

SEQ ID NO: 17107 - DNA, 1024 bp, Zea Mays
ccacccgttcctatttttcctaaagcaggggccgggcaaaccgtattgttggctccgcctagggttttagcacctgccgccgcaacctcccttctacttctactgccgccgcaacctccccatccttcgaatcccatccgacctaaccccgcaacccgccggacgacgagtggcgaggcccccggccgagatggaccggtaccagagggtggagcggccgcggaacgagtcaaccatcgaggagaacgagatccgcatcaccgcgcagggcctcatccgcaactatgtctcctacgctacctccctcctccaggaaaggagaattaaagagattgttctaaaagccatgggacaggcaatcagtaaatctgtagctgttgcagagattatcaagaaaaggatccctgggttacaccaggataccaacatcagttctgttagcatcactgatgtctgggaacccatagaagaaggccttgtcccattggagatgactcggcatgtttcgatgatttcaattactttgtcccccagagagctggacaagcacactcctgggtaccaagctccagtgtacattgaacaaccaaggcaacagcaggtgccaccaccacagcgccaaccacgcagaccaccagcacaattccagcagctggagtatgaagattcttatgcacggggtcgaggaagagggcgtgggcgtggaaggggctggggtagaggtggctacggtggctatggtggatatggaaacaaccaaggtggctatcatcagggtggtgggtattatgacaatcaaggtggatataatggctatgataatcaaggtggatatagtggctatgataatcaaggtgggtatggtggtggatatggctataaccaaggcagatatgggaactatcaagaaaatggtggatataaccgaggaagaggaagtggtatgcgaggaagaggcaattggggttaccgaggagactccagtgctggaggctccctgggtctggtgaagggataaaccgag

SEQ ID NO: 17108 - DNA, 2144 bp, Zea Mays
ctttcaccttagtgatcagttaaaggtatcgagccatgttgttcgtttagcctcctttcagtacgctccatcgataccaccatttatagtaccaaagcaatccaagttcgatggagatgattcagtgtttcagaaagaactggatgacagaaggtatgctgaagttgctgtcgctggaggaggtgtgtctgttgcagtaactcgcttccctcctgaacagaagagacctatcggacctcttgttgtggttggtgtaagagatggagttctctggcttgttgacaggtatatgtgtgcacatgccttatcactcagccatcctggtataagatgccgttgccttgcagcatatggggaccctgttagtgctgtgaaatgggcaacgagacttggcagagagcatcacgatgacctggctcagtttatgctgggtatgggctatgccactgaagctctccatttgcctggaatatctaagaggctggagttcgaccttgcaatgcagagcaatgacctgaaaagagcacttgcttgtctattaacaatgagcaatagccgagatgtgggacaagaaacagctgctgctgatgccactgacgttacccagattcttagtttggcagtagctaagcaagctaagcaggaaagtcttacagatgccgtgcagggaatagtgaaattcgtcaaggagttttttgaccttattgatgcagcagatgccactggtcaatctgacattgctcgtgaagttttaaagagattagcggctgcagcttctgtaaagggagcactccatggacaaatgctgcgaggcctggcactccgtcttggaaatcatggggagcttactagattgtcgggtctggtaagcaatttgattacagctggccatggacgcgaagcagcatttgctgccgcagttctgggagataatgccctaatggagaaagcatggcaggacacaggaatgttagctgaggctgttttacatgctcaggcccatggtcgtccatcattaaggaacttggttataacatggaacaagatgctacaaaaggaactggatcacacaccgactgtaaaaaccgatgccgccgccgcattcttggcttctctcgaggatccaaagctcacaagcttgggggaaactgagaaaaagcctcccatcgaaatacttcctcctgggatgcctcccctatctgcacctccgatcgtgattaaaaaggctggagcaaaacctggtctccctaatgcagcaaaggcgtcaaatgggcctataggtgctcctatggctcaaggtgctcccatggctcatggtactcctgggccacaaggagtccccatgaatcaagttactccatcacagggcagtcatgacgaggcaaggccatcagatgctacagtggctgatgcagctgccgcggttgcagaaggtacagcagctcccccggctgcagaaggtacatcagctcctccggctgcagaaggtacagcaactcccagcagtgaggaagctaaagcagcacctggtaatgaggaaggcacatcaaatccaatcaacgaggaagccacagcagctgcagtttcagttgctgcaggcagccctgactctgctgctgctcctgcagctgatactagctcggacgcacctgctgttaatcccacggaagataccgtctctgccccctcaacggaggcaccaccagagttgacggataagccatcttcagcagaggcatcgttgccacctccacccagtgtttctggtgtataaatatttctgattctcttttagcagtgtgccgaattttctgtattctggttcgttcgttccaccacgcgcgctggtataggtatttgttgcctgtggtatacagatttcgcagacgccaggcagtatgtgagtagctttgtacatctgctgtctgcgtctcacgagaacgtgctaccgttgtgtcactgacactgtgtggccatatcttatgttgttggtgaccacagttcaattcttgcttgatgagttgatcgagctgcaccaccaatatccctgtcttggacgaccgattcgtctcttgcggaatctaacgtaactgctgaggttcgcaaaatgtcttgttgggtcatctaacttgggaatctgtgcg

SEQ ID NO: 17109 - DNA, 1551 bp, Zea Mays
cttcaagatggtcttgggggcccttcaacctctaatgctcgaagaataaggcgaagaagcattagcattacacctgagattggagatgacatcgtgagggcagttcgggctatgaacgaaacactaaagcaaaatcgcctccaaagggatcatgtcgaaggttcatgctcatatgttatggaagatcaaagcaacaccaatgactgcccaaataaagatgatgcatcttggagaattggtgctactgacagtgactcaagaaaccgaactggttctactcagaaggccatgtcactaccttcttcgcctcatgaatatagaggtcaagttacccaaaaaagtgatgattttataagtaaagagaagatggcattggcatggaacaaagttttccagagctccccatttcttaataaggctttgctgccttttaaggaatggaacatagatttctccgagataacaattggcacgcgggttggaataggattctttggagaagttttccgtggtatatggaatggaactgatgttgccatcaaagtgtttctagaacaggatttgacaactgaaaacatggaagatttttgcaacgagatatacatcctcagccggttacgacacccgaatgttatattgcttcttggtgcatgcattacacctccacacctgtcaatggttactgaatatatggaaatggggtcactgtactatctcattcatatgagtggtcagaaaaagaaacttagttggcgtaggaagttgaaaattattcgtgatatatgcaggggattgatgtgcatacaccgcatcaagatagttcacagggatctcaaaagtgcaaactgcctggtcaataagcattggactgtcaagatatgtgactttggtctatctcgactgatgattgatagtcctatgaccgataattcctctgctggcaccccggaatggatggcccctgaacttatacgtaatgaacctttcacagagaaatgtgatatattcagccttggtgttatcatgtgggagctgtgcacattgagtcgcccatgggaaggcatctccccagttcaagtggtgtattcagttgctaatgaagggtcacggcttgagattccggaaggacccctcggcaggttaatcgcagattgctggtctgagcctgagaatcgaccgagctgccaggagatcctaacccgtctgctagactgcgaatatactgttagctaaaatggaagctgcatgctcgttcacccaattcctgcacaggtgagaatatttcttgtataaaacctataaaaaaagcctgccgattctgcggacttgaggtcacatattgaagccctgttcttttttttttacaacggcgaccttttctctcaaaaatgtaaaaaaatgcttccccggttatagaagaacatattctggcccagaaatgtgccttatcgcagggcaagctaattctagataattagcatgccctcgaattaaccaagtgtttgttccgaagaatgttgccagtttgccattaccctgtggaatatggta

SEQ ID NO: 17110 - DNA, 1431 bp, Zea Mays
cgacggtgaaggataaacttgtgtcatgcgtgtttgacctagctacctcattatgctagaaaatgaaaaaagagcgtgctatacctggctatcttactgggtgggaaagagaaaaataatcacgctagtatgaagaaattgacgtcaactgcatttacggagttcctaccgagttgctaaatgtggagagtaaatagagttgaatagcaactaagtaaatttagcaagtctatttagagaaccattggagaagcatttttctgttcatttcttaaatttaagatttagagagttgtttagagaactattgaagttgctcttagaggcccttgttgtcttgttgaagagttgaagacaccgcagttccggaaacttctgtagcagctgaaatagtacggacgtgtttgaacatgtacaggatctcgaggccacatctgtaaaacgaccacccctcacgcggaagcggagactggaaatcgggagggagaccggagacgagaccgccggagatggagccgagatctgcaatctacagatccggcgccttccttctcctcgccgccatccttgcggaggtcgtcatccctgcatccgccatcggagacaagtgcgccgcctgcaaggccgttgctgcggagctagagattggaatttcgagtgagaagccgagaaatcacttggacttgcgcaaccgcttaaattctaaaggccagagggaggggaaggtcattgattatagggtcagtgagcttcgggttgtggaacttctggatggcctatgcgataagatgcaagattataccttaaagaagttggaatcaggcgaaaagggatgggttaaagtaacagactggaatagctttcaaactgaaaataaggcagcagcaagagctcactccaaaaaattgtccaccttctgtggaaggctactggaggaaacggaggatgagctctctgagtggatcaaaacaacctccacagaatcagaatatgtaagcaaggccctttgtgaagatattagcaaacactgccgatctacaagtgctaccatccagattgatgatgagctatgacatgccgggggcaggtcgttgtttcgcaaaaagcaaaacaggcgacaggttggaaaatgttaaagaacacagctctagtagtccctgacaccatttagagagacatgcagctgccaattctgattgtttgtgttgcactcatatttcctgtaaacaaaagcttagactgatctgtagagaaagcaactggacatcaatttttgcataccgatgaactacagtttaaaacggccggttgaattatcatgtcaggggctataggaaatttgaatgcttctattctaaggtcttgttgttgagtaaaacaaattttaatttgggacggagggagtagttctgaagtaattggggctgggtc

SEQ ID NO: 17111 - DNA, 3687 bp, Zea Mays
atggcctgctgggtggcggccgccatgcacctgctgctgctctgcaacgccgcggccgccgcgcgcgccgccgtcgccctgttcgccgcgactccgatgcccccgcgcctgtccctcgcggaggccgccgccgccgccggcgcaggcgactacgacgacggcggcaccggggacaaggggtcccaggccctcgtggggagccccatcgtggccggcgccatgaacaaccgcctgagggcgctcacctcctccttcgccgccgccatcggcaagaagctggactactgcatcaaggacacggagacggagtggaatcaggccttcgatttctccaaggacaccaccttcctcaccaattgcatgaaggagaccaagggggacctccagcagcggatctgcacggccgccgagatgaggttctacttcgacagcctgatgggcggcgacgacacggcggaggccaactacgtgaggcccaacgtcaactgcaaccggtcgtcgtggatcgacgggtgcgagcccggctgggcgtgcagcgccggggccgaccagaagatcaacctgcaggacaccaagaacatgccctacaggccgctcaagtgccagtcctgctgcccaggattcttctgcccgcatggcctcacctgcatgatcccttgccctctgggtgcctactgtccacggtccagcctgaatacctccacaggcatctgtgacccctacaactaccagccgccgcccgggaaccctaaccacacctgcggagccgccgacatctgggccgatgtggtcacgacagatgacatcttctgccccgctggattctactgccccagcactatacagaagctcccttgtagtagtgggtattattgcaggaagggatcaacctcacagactagatgctacaagaagagctcttgcccaccaaactctgctactcaggacatcacaatcttcggcgcgctgcttgtggtcgcgtcctgcttagtcctcctcatcatctacaacttctccggccaaatcctgaccaaccgcgagaagcggcaggccaagtcccgggaggccgccgcgaggcacgcgcgggagacagcgcaggcccgggagaggtggaagtcggccaagggcgtggccaagaaggccggcgtgggcctgcagtcgcagctgtcccgcaccttctcgcgcaagaagggcggtggcggtggcggtgggcagtcgtcgcagctgcaggccggagcgtccacaaaggtaggtgatgacgcgggcgggaagaagcacagcaacctcgccgacatggtgcggtccatcgacgacaacccggagagcgacgaagggttcaacctggaggtaggggacaaggcgctgaagaagccgacgggcaaggagatgcacacccggagccagatcttcaagtacgcgtacggccagatcgagagggagaaggcgatgcagcaggagaaccacaacatgaccttctcgggcgtcatctccatggcgcaggaccacgacgtgagcacgcgcctgtccgtcgagatcgccttcaaggacctgaccctcacgctcaagggcagcaagaagaagctcctgcggtccgtcacggggaagctctcgcccgggaaggtggcggccgtcatgggcccgtccggcgccgggaagaccaccttcctcagcgccatcgccggcaaggccacagggtgcgacacgtcgggcctggtgctgataaacggcaggatcgagccgatccgagggtacaagaagatcatcggcttcgtaccccaggacgacatcgtccacggcaacctgaccgtggaggagaacctgtggttcaacgcgaggtgcaggctgtcggcggagatgtcgaaagccgacaaggtgctcgtcgtggagagggtcatcgagtcccttgggctgcagccggtccgggactccctggtggggacggtggagcagcgcggcatctccggcgggcagcggaagagggtcaacgtcggcctggagatggtgatggagccgtcggtgctgatcctggacgagccgacgtctggactggacagcgcatcctcgctgctcctgctccgcgccctccgccgcgaggctctcgagggcgtcaacatctccatggtggtccaccagcccagctacacactgtacaggatgttcgacgacctgatcctactggccaaggggggcatgacggtgtaccacgggccggtgaagaaggtggaggagtacttcacagggctgggcatcgtggtgccggagcgcgtgaacccgccggactactacatcgacatcctggagggcatcgtgaagccgagcctgagctcgggaggcagcgtcaaggacctgcccatcaggtggatggtgcacaacggctacgacgtgccgcgggacatgctgcagagctcgtcggaatcggagtccacgtccaggggcgacgcgggacacgctccggacgagccgtcgtccgtggtctcgctgctctggggcaacctcagggacatcctcgggcagaagaaggacgagtacgactacaacaagacgtcggaggacctgtccaagcgcaagactccaggcatactcaggcagtacagatacttcctaggaaggtgcggcaagcagaggctccgtgacgccaggatacagggagtggactacctgatcctctgtctcgccggcatatgcctgggaacgctggccaaagtgagcgacgagacgttcggggcgctggggtacacctacaccgtcatcgctgtctctctgctgtgcaagatcggagccctgcgttccttcacgctggacaagataaactactggagggagcgagcctccgggatgagctcgctggcctacttcctgtccaaggacagcatcgaccacttcaacacggtggtgaagcccatcgtctacctctccatgttctacttcttcaacaacccgcggtcctccatctgggagaactacatcgtcctcctcgcgctcgtctactgcgtcaccggcatcggatacaccttcgcagtcttcttccagccaggttccgcgcagctgtggtcggccttgcttccggtggttttgactctgatagccactcagcagaaggacactatccttgccgacctgtgctacaccaagtgggctctggaagccttcgtcattgccaacgctcagaactattccggcgtgtggctcataacccggtgtggctcgctggtcaggagcggctacgatatcgagcacgaggctctctgtatagcggtcctcatcgccaacggggtactcttccgctgtgtagccttcttctgcatggtcaccttccagaagaactgagagaggtcggtcaaggaaaacacacccgtgattccgtgaactttctatgcccacgtagcagctctgtttttgttaatttcagtgcaataggattgtagattagagcccctcttggtaaggtatgtcagtatgtgtagatgaggacagattcttgaatagcaggcaactatcagggatgccctaaattacagaggcggtttcttgcctaacaccaatgtaaatttgatatgcaaattcagtgtatatatgggtacgacgactaatcatgaaatctgtagctcttcaccagcttccagcacaagtttaaagtcataacaaccatctgtaagaggcgccacaagcaatccgtgaatgaatgca

SEQ ID NO: 17112 - DNA, 1238 bp, Zea Mays
tgcgaactgcgaacgcagcagcagcagctcacgcgcgcacggcacaccagggaaggcggcgaagaaggggaagacggcggaggagaagctcgcgggcggcgacggcgacgacgagaagccggcgtacgtgcacgtgcgggccaggcggggccaggccacggacagccacagcctcgccgagcgggcgagacgcgagaagatcaatgcgaggatggagctgctcaaggagctggtccccggctgcagtaaggtatcaggaacagcattggtgctagatgagatcatcaatcatgttcagtctctccaaaggcaagttgagtacttgtcaatgaggctcgcagctgtaaacccaagggtcgattttggtgggctagacagctttctgaccacagagtgtggaaggatagcaggcttcaactgcaagaacggaatcgacttggagcaggtaacctggccagaaatgggtgttcatggagcaaggcagctgatgcaacttcaacagcagttctggcatggcgatttaacacatccacaccaagtggcttcacagtgggaaaagcgtggggatggccatcctcccgtctttagcaactccagtccctctctcttcggctatgatctaacaagctctggagcccagcaaaccccggcgagcaagctaaagacggagctttgagcgacgatggatggtagatagcattgtcaggagagcaggctgaacatatgcggtgggggcgcagcagcgacatgatttcagcaagttgaccaggtcaggctacaaacgggctgggaatgttgatgtgaagcgcatggagaccaacattttcagagacagagaggatgtacatatagcgatagagaatactattggtgttgagctgaagacgggaataccatagttgtattgtagagatgggcacgccctgctgctatcgctgaagagatgggagggcgagcgatactccggtctagttgctggtattcttggtgtatttcttactataatggcccaatcttaaggttatatgagcagcaatttttatgaaccaaaacccaaaaaaaaccatcatgggtcatcatatacccttctcgaatgcatttcaacaaaacatgaatgtagcacagtataactacatgtaacacacgtgcttgttacaatcctactgttccaagccattctaggttttctttaaggcatacggattttgttacatatttatatatggcttttgttatgt

SEQ ID NO: 17113 - DNA, 162 bp, Zea Mays
tgtggttcaagtggagccacgtatcgaggactttgattcgatctaggtggcgtctcccagttgactttctggcaccaaggatggattttagatcctgttatatttatcgtttattttgtaagacttctgctatgtaataagtactctgattttattgtgaca

SEQ ID NO: 17114 - DNA, 1304 bp, Zea Mays
tcatccacaactcgtcatcgctcatcacagataaatcctttccccctccatttcatttcagcgtcgcgaaaaatggtagtcgttgatccgaaagccgtcgcctcggcgcaccagttcaccgtggtcatcgacggcgtcgagacgaccgtccacgagggcgtgctccggcgcaacggcggcacggtggccgtggtcggcccgggcgtcctcgaggtgagccgtctccagcacgtggtggtgcgcggcgggggcgggggcgacgtgcgcttctcccggtgcctgtacgcggccgccgaggactgcggcgcggcgtcgttccaccggtgcgacgcggtgcgcgtggagggcgcccgcgccgtggccgtgcgccggtgccgctcggccgacgtggagcgcgcgggcgccgtggccatccgccgctgcaagggcgccgcgcgcgtccgcggcgccggggagctgcgcgtgggccggtgccgggaggccgacgtcggcgcgtgcgccgacgtcgccgtggcccgctgccgcgccgcgcgcgccgactggtgcggcgcgctcgccctcggcaggtgcggttccgccgacgtcagccgctgcggcgccgtgcgcgtcgaccggtgccgcgacgccaccgtggccgggtgcggcaccgtcgccgtgcgccgcggcaaggtcagcatggtggaactggaccagcagatgccgccggatttccaggatcagaccccgatgtgtcagcagggtggacctgtcctcgcgacgccggtggcagtcgtggccaagtgaaaggagcgagatgcatacttcgccccgtcgtatcgtacgaccgatagtcgcattcgtatttacgcgcaaagtatacattaatatttgtaatattattgtgtatatatgtggagacaaatccttgttcgattagtctcggtattgttctaatatatgttattgtactaaaaaaaaaaggagcagcgaagagcgaacgaccgagatgctggagaagctgtgggacgacgtggtggccgggcctcgcccggagacgggcctcgagaagctccgcaaggccaccaccgcccgcccgctcgtcgtcgtcgacaaagaaataactacatgcatcttctcatctgctggattgagtacatagaacacttgtgcaacacattcggcgagaacacgggtcatctttatattctactttctttaagtataccagtgtgagtaccagtgtggtccgtagttattcattatcgcccccacgggatgttgtacccattgacacttaaataaagggtattttcatgcttgggcca

SEQ ID NO: 17115 - DNA, 398 bp, Zea Mays
gttgcagactcgcgtcagtcagtgtgttagcgatcatgtgctacttctttggtgacatttcatcgaaaagagatccagaagcatatctgaattgtctattccattcgtatgactactttgttggaaaatatcgatgcgatgagaatgaaatgctgccactaattgtcaatacacctggatgggtaaaaggtgctggctttgatatgctcgtagagatgctaaggtatatctgccccacaatagttgttcagatacgcatcacaatcaagaacaaaaatctccctgatggagggttttggttagatggtgggcaaacaggacctatgatgattaacatcgatgctgcatttcatgatgcctcaaatagatcgtttcttttggggaaaagaagtgctaac

SEQ ID NO: 17116 - DNA, 263 bp, Zea Mays
ctgcgatggcggtcctgcaagggaattcctgcattggagcttcctataaactgtagcgggttttctgaagctagtggaactttgtaaaggcctcgtagtgttaccctgcctcgcctcctcggtagaggtgtacgggaagtcgcgatcccttggcagacgggtaacatgacttgtgggtaaagggtaccacctctgcagagtgtaaaactggtatactagccgagctcacggtcatgagcagctcaggactctctgatgattaa

SEQ ID NO: 17117 - DNA, 5160 bp, Zea Mays
gctgaacaacggagagaaaaagtgaggcggaagacgagggacatacttcaagcgcccgcggcccgcagcctgctcgcccaggtcttcgccggcgacgagcacccaccaggtccgctcagtccatctctccagaaatccccagatgttccacagcaagtcgctccctaggcccaaggacacatcggtggtggtggtcgtccttgagacgacagaagtgtacattgtgatcagcttgtcgacgaggagagacacccaggtcgtatacgtcgatccgaccaccggcgccctgcgctacctggggaagcatggggaggacgtctttgattcggaggcggcggcgctgaaccacatcaccaacggatcaagggttctatccaagagcactacatatgccaaggcagtgctgggatacgcggtgttaggaagccatgctctgctcttggtcgcgacacagttgagcgcgtcggtccccaatctgccgggaggcgggtgcatatacacattggcagagagccagtggataaagatccagctgcagaatcctcagccccaggggactggagaacagaagaacatacgtgagctggccaatctagacattgatggcaagttcttcttttgcgagacaagggatgttaccaggcccttcccgagtcctattacactacgggaaccagatgaggaatttgtttggaacgagtggctgtcaaagccctttaaggacattggtttgccaggacactgtgtcattcttctgcaggggttcgctgagtgccggaactttggaggtgctgggcagcaaggtgggttagtcgcccttattgcacgccgaagtcggttgcatcctggaactcgctatttggcccgtggactgaacgcatgttcaggcacaggcaatgaggtagagtgcgagcaactcgtttgggttccacggaagggcggacagcgcatcccttttagctcgtatatctggcgccgtggaactattccaatatggtggggcgcagaaataaaaaacgcggtgtcagtggaggctgaaatttacgttgccaacgatccttacaacggaagcttacagtactaccaacggttgggtaaaagatatgggaataaatcatctgaagcgaacgtgtccaggcaaaaaagttctggaagggttcccattatttgtgttaacttgctaagatacggcgaaggaaaaacagagtcagttcttgttgatcatttcaaagaatctatacggtacatgaactctactggaaagctgggaagcacgtggattcagttaataaattatgactggcatgccactgtgaagttaaaagggcagcagcagacagttgagggcctatggaggcatcttaaaccacctacaatggtcattggcttcagtgaagggaattactatgatgcaagacagcagcttaatgaatgtaaaggatcagttatctgcaatgacgatgtaaatggtgggttttgcatggaatctattcaaaatggggtgatacgattcaactgtgcagactctcttgatcgaaccaatgctgctagttactttggtgcacttcaagtttttgttgaacagtgtagtcgattgagcatctcgcttgacatagatgcaatgtttgggttgtcaagtagatattctgaatatgatggtagaaacactcgttctttgccccctggatgggaggagcgctttgactctgtaacagggaaatcattttatattgatcataatacacgtactaccacatgggaacatccatgccaggaggctccacagaagccctggaagagatttgatatgacatttgatcagttcaaaggctcaacaatgcttgctccagtgaaccagcttgctgaactttttcttttggcaggcgatatccatgctacgttgtacactggctcaaaagctatgcacagtgatattctgaacatattcaaggaggaaacaggaaagtttagtaaattctcagctgttgagaatgtgaaaattacggtgctaagaaggtaccaaaattttatgaatgatagttcccgtcaaaagcagttagagatgtttcttggtttgaggctatataggcatctcccgtccatccctatgttccctctcaaagtgctatcaaggccatctggatgcatgttaaaaccagttcctagtatcatcccaatggctgatggtggttccagtcttctgagcttcaaaaggaaggatcttatttgggtgtgtcagcaaggtgcagactatgttgaactttttatataccttggggaaccttgtcacgtttgtcaactgcttcttactgtctcccacggtgctgaagattcttcatatccagcaaccgtagatgttagagttggctcaagcatcgactccctcaaactcgtggttgagggtgcttgcattccacaatgctctaatgggacaaatttactgattccagtcactgggagaactgatccagaggacttggctgttacagggaaaagtgcgaggcccaatgttcaagagagctcctatcttcctttgttatatgactttgaagagctagaaggagaattaaactttttgaatcgggttgttgcattatcttttcatccatctgctgtatcaagaacacccattactcttggcgagattgaagtacttggagtttcccttccatgggcagacatgttaaccaatagtgaacgtgctcctgaatttatggagtttatcaataaaaaatcatcaagtgctcactgtaatctaggttccaagtcttttggaaattcttccatgcctgggaatgattctcatggtattgatgagtcttatactaaaagttcatcattagttcaaccgtgtggttcggaaaatttgttggattttctcacaggtgattttgacatgtcggagtcccatataactcaaaatacttttggtgctggagaacaaacaaacttcttagatgatggatttgatgttaatcctttcgcccctgcattggaagtgcctgttcctgttgctaaagtaaacaaggaggttgaagaatgtggcagcacccagctttatattaaattttttgaatccctttctggctataataagggaaagggtcttgactttgagcaaacgatgaagcttgaaataaaacgtctccgtcttggtctttcagccgctgaaagggaccaggcgttgttatcaattggtgtaattcctgccacattagatccaaaccgtttaattgattattcttacctattgaagttatccagcttagctgataatctagcactgctgggccatacagtccttgaggatcgcgctaatgcttcaatagggcttgaaaagggcagtgaacatgctatagacttttggaacatcagtgaaaatgatgaattctgctatggtggggcatgtgaagtccgtgctctgtcttcattacaagctttagcatctagagaaaatcaatcggtattcatggaatgtttccagtgtgaaaagacagtttgcaaagcttgctgtgctgggaaaggggccttccttttgcttaacacctacagggagttgaagatatatggtgggagtcaaagtggtggctactcagcactcacagatagttttgtgtgcaaatcgtgctgcagtgaaattatcaaacgtgcattgtatgtggattatgtccgggttcttcatagtttgcgcagaaaagatcgttcagagaaagcagcactgagtgctgtgaatcaggtctgccaactggagtacaagaaagcatctgatttatctcaaagtattcaatttggtcagagacaattgaagcagatccttgatggtgaagaatcccttgcagaatttccatatgcaaactttttacaaatggttgaaactgccaatgactctgaaccactgctttcattactggcgccttttggtactggagagtatacgtcttactggaaagctccacaaggtatcacttcagtggaattctcaattgttcttggtggtttatcagatattgcaggagtttccataattgtcagttcttgcggttactcagcatctgactgcccaattgtagagatatgggcgagtaataaaatacaccgagaagatcgtacatttataggaaagtgggatgtacaggatataatatcttcatctccacagcttcgtggacctgaaaaatctagtagattgagtgaagaaccaagacacattaaatttcacttcccaaatcctatccgttgtcgtataatttcaataaaaatgacactttcccatagaggttctcattcaaccaagtttagtgaggagtttgatcttctatcattgaatgatagctcatcttatgaatcgaagccaaccaatttacataattcatttatccatgcaaaaagaattgtagtttttggcagtttgttgagaaaggagatggagcctgacacatcaggggggataatgagaatgaaaagttatttagacagatcaccggccttggggagatttaggatcccagttgaagctgagaggctgagagataatgatcttgttcttgagcaatatctcttagctaattcacctggaatagctggattccggcttgattctttcagtgttataagacctcgtgtgacccattcaccttcttcatcagagttggacatgagggagttttcattgacacgaatggaagatagatttataaacccagcaattctgtatatacaggtcacagttgttaaggagtccggcaagttggttgtagaggaataccgtttaccagaagtaaaagcaaacacgccactatattttgatttcccagatctacaacaggatgcgcgctgtgttatctttagattgcttggtgacgtcactgcctttgtcgacgacatttctgagcttgagaacttaaacttgcggaatcttcctttggcgtcgggactgtctttgtcaaataagatcaagttgtactactatgctgatacatatgagatgggaaagatcggcagtctctcagctgtataatgtatgtgaggtcgtcgtacatgccaacctgggatggtaacccgtccctagaagattgttgtaacctactgtttctacgtgttgttgtggaagtaaccaagaccggaggagaaatttaatttcagttgttaacatcaaccggg

SEQ ID NO: 17118 - DNA, 7955 bp, Zea Mays
tgtctcggcttcgccgtccagcggaacagtgtacgggagcagttcgtcgcgtgtgtcgcgtcgcgttgcgttgcgccacccactaattcgaacggacgggactgggattcgaaatttcgaacacgcgccgcctgagagagagagagagagtgagagaaagagagagagagagcaggagagatggtcaggcctttgtgatctcccgcggggctggaggtgtgcggggatggatctcgcggggatgaagcggcgggagctccaggcgctctgcaagcggcacggcctccccgccgggggcaccaacgccgacctcgtcggacgtctcgacgccgtgctttcggggcccgctgttgtggaggaggaggttgccggagtgccggcgaggaaggggtgtctgaagcaaacgggcggaggtgccaccgaggccaagaaggttacttttggggcggaggtagggaaggccaggagactgaggtctcgggtcatatggtcgccggtcgttgccaagacaagggggaagtctgctcgagccggtactgattctgctgctgaagacggtatttctgcagatgtgggcgctgatgtcccagtgaggcggtccaggaggaattcgttcaatcctgccgaggctgaggaagcaggagaggctgttgctgttgacaggaagcccaagcgcaagaatcaggagaatgacgagggcgttgctgttatcgctcaggctagagttacgagaaggtcaaatttggagtggtctgctactgtattgcctcctgctgttgagaagaagagagggaggcagaatgcagctgagtctgatgtgcagaagtccgctctggtggaagtaacagctaggactacaaggtctcgctcaatcgtacctgttgtggtgccacccactgtggttgagaacaagaggaggaagactggagatccacaaacaactgtagagttgactatgctttcagatgtgcccagaagtgattttcctgccaccaggtctttaaggaacaaaattgtccacgttaacaacagcgtcgtggacgaaactcacactaccaggcagttggaaaacaagatgcgtccgtctactcgtaggcatcaacaggttgcatcttctccggaggataaaggtcaaaaaattcctgctaccagtaagtcccctctactgaggtggtcacggagaaactattctgaggccaatagtgcaaattcagtaaacatcaaattggccaaagactcgagcacagctcagccattggcacaccataattctcattctgaagatttggagaaacaaccagcagttaaagaaccaattaaacggtcaacacgtaaatctattgctttggctgcacttgagaaagagaaggatgtaattgaaggaaagaaccctgaagcacatgttaggcgatcaacgaggaaatcagttgtgcaggttaaagataccaaaagtattgttgaagagactcaatatgctaacagtgaagatgtggcgaagcaaccagcaactaaaggacctgctagggggctgagacgtaaatctgttatcacagaattgcatgagaaagagaagagtctcattgccgaaaagaacatggaaacagatgaagcgatattaacgcggaagcctgtaatcccagttaaaaatattaaagctgttggtgaaggaattcaaattggtaagggcaaagatgtggataaacaatttgttgtgaagcaacctactaggcgatcatcgcgcaaatctgtgctgcctgatatgcttgagaataatagtggacttctagcacccaaaatgaatgctgagatgaatgttaggagatcaacacggaagtctgttcttcctgacatgcataatgagaagcaagatcaccataaaatggctagaaatgagaacttgcaaagtggtaaatatcaagatggtgagaagcaacagaaagtaaaagattctattaggcaatcaaggagatctatcgctacagtgctacttgagggacaaaataatgatgaaggaaaaaagttcaaaaatcctacgaggaggacaacacacaaatctcatgcccttaatgcagttgaagaggtcagcatggatcacattgaagttggtgaagaaggcttgaaattgaggaagcgcagtaggtttttgctggaaatatcatcttcagctaatgtttcctggaagcatcagaatgcacagatctctaatgaaaaagataacacagaaggatcgcagcaggcatcaaattgcacaacttcaaagagaaggtcttcaaagaagagacgaacaactgctccagaagaagtgatgcctttcaaggtggcaaatgatgacatagttatcatggaagaaacaaaggacacacttgaatataataatgagtctagtagtaaagttcaagaaatttgtcaggttaatgctgcaagagaagagttctcttcaggtccattgcttgtaacagtagctcctagtgacgaaatttgcacagtgcagagtgtagctgtggtgatacctgggtcagaatctggtgacgatgcaaatcaaagttctgataagagtaagcaacctcaggaacattctgtcactcaaactgttgatgaccatttatctgaaacaagaagtgggaaattagatcaatcaacatgcatcacaggattagtctctgacaattgtgttgtctcagaggacaaaacattgatgagtgaagaccgtgaagagcaaagccctgtgtccggagaacagagagttagcttggaagcaaatgccaatgagcctgaggaaaagaacctagctaacgtcacatcaactgatctccacaccaaaagtctgcagcatgatattgacagaatagctaaagagactgataaagatgttttgtctttggttttccctattgaagagcatgaagaaaaatatggagtgagccctatagctgttgaaaagtgcgtctgtcgtgaagcaagtgcatgtgaatctgcacgaaaacccctaaccgttatcttttctaacaatctccacaccaaacatctgcaacatgattgtgatgtgctaattaaggagactggtgaagaagttttagctcaggagaattgtaatgaccagcctgttcctgcccagactgaccaagaaattaagttaaacgatgaacttgctgatccggatgttttagctcaggagaattgtaatgaccagcccgttcctgcccagactgacctagaaattaagttacacgatgaacttgctgatccggaccatgaagagcaaagccctgtatccggagaacggagagttagcttggaagcaaatgccaacgagcctgaggaaaagaacctagctaacgtcatatcaattgatctccacaccaaaagtctgcagcatgataatggcagaatagctgaagagactgataaagagcatgaagaaaaatatgcagttagccctatagccgttgaaaagagcttccgtcaggaagcaagtgcaattgaatctgcaggaaaacccctaactgtcatcttttctaacgatctccacaccaaacatctgcaacatgattgtgatgtgctaattaaggagactggtgaagaagttttagctcaggagaattgtaatgaccagcctgttcctgcccagaccgacctagaaattaagttaaatgatgaacttgctgatccggatgttttagctcaggagaattgtaatgaccagcctgttcctgccaacgagcctgaggaaaagaacctagctaacgtcatatcaactgatctccacaccaaaactctgcagcatgataatgacagaatagctgaagagactgataaagaccatgaagagcaaagcaatgtgttcggagaacggagagttagcttggaagcaaatgccaacgagcctgaggaaaagaacctagctaacgtcatatcaactgatctccacaccaaaactctgcagcatgataatgacagaatagctgaagagactgataaagaccatgaagagcaaagcaatgtgtccggagaacggagagttagcttggaagcaaatgccaacgagcctgaggaaaagaacctagctaacgtcatatcaactgatctccacaccaaaactctgcagcatgataatgacagaatagctgaagagactgataaagatgtttcgtctttggttttccctattgaagagcatgaagaaaaatatgcagtgagccctatagctgttgaaaagagcgtcagtcgggaagccagtgcatgtgaatctgcaggaaaacccctaactgtcatcttttctaacgatctccacaccaaacatctgcaacatgattgtgatgtgctaattaaggagactggtgaagatgttttagctcaggagaattgtaatgaccagcctgttccggcccagactgacctagaaatgaagttaaacgatgaacttgctgatccggaagttttagctcaggagaattgtaatgaccagcctgttcttgctcagactgacctagaaactaagttaaacgatgaacttgctgatctggctatggaatcaggttgtagcattactgaaaggaatgaagggcttgttgctcataatcttgatcaagaaggtttccttgaagcaacaccagagtgcaaacaggaatgtggtttgcctgaggagacagtaatttcctcaaaagaaacaggatctctgctgtgtgcagatcaatcaccaattggtctggaatctttattttcgcaagaaagcatagttgaatcagtggggcattgtgcacttgcttcagcaacaactcataccgaaaatggctttgatgattcaaaagattgccataacaagtctgcacttgaaaatgttcatgtgccagaaccttgttcacacaatgatactaaaggaggcatttttaaaaatgttgattgtatgcatacatcccagcgagatgatagaatggaaggagtaccagaggctaacactgatgaagaacatgttctgtcagcctttttgctggatgcaaatcacctaaacgtagtcattaattctgaagaagtggtttgtgagggtgaagatagtaaggagcttctccattcggaagactgtaaagcttcatccgagaaaacagatgtgaatgatggcaatgtatatggtattagtgatgctgtagtgagatgtgcactgcatgctccagccgatgataattatgagatttttttgggtcccaatactgatgtaccacgtcaggtttataatgacggatgcagtgatgtcaaagaagatcgatttgcttccaaaccctggacaattgatattattgaggatgcctctgtcaaagaaagatcaaatttaaaagattggcaacttgattccaagttggagggcacagaaatagtggaatctggcctttacttcaataaggatattggtaacattttacatagtggatctattggtgaaataactccatctggttctggtttatcaaaagattcatctgtggactatagaggggaggttttagatggcttctcaatggaagcatctcttgaaaggtcttctacacgtggggaacaaaatggttgtagactagatgctattgagaatccttcaattactttagcaacttctggttataagcatgaaggtgctttatctgaggaagcagtgtacacaaagaagaattacgctggaacatgcttgtcaaatcccagggaattaatcatggagctgcaatcccatttctcaaaggaaaacataaatgaatctgatcctcatgacagccttgtattcccaactgctgaaaattcagcagatgaacagctggttaaagtacaccatggttctaatctgtctcagttaggattaactgatctgttggatggaccaattgggtgttccaataccgacgtgttgtgccagtgtgacaatcataaaaatcaatccaatgaggacaaggtagaggaagttgaggcggtgtctgctgctaaatacatagaaagtgaagttgtgctgctcccatctcaagagagatcaaatttgaataatgagcagcttaacaccaagttggaaagcccaaacattatgggatcttgccttaactgtgataacgatgtttgtaatacttcggacaatggatctgtttttgtcattggtaaaagaactccatctgcttctggcttaccagaagattatcctaaggatagtgacttgcaacaaccggttttagatagcttctcagtggtttcatcttttcaagacaatatatctgggaagaaaactgtttctggtgtagcaggcagtgagattctttctttaagtttagcaactcctgattataaacatgaagatggtttctctgaggaagcagtatgcagaacaaagaattatactggaacttcctcggtagatccgaggcatttagacatggaggggcactctatttactctgagggaggtactgaaaaatctaatctgcaagataatcttgcatttctaagcgctgagagtggaaaagatgaacctattatttgccatgttgagaaactggttgacgcacatgcttcttcagatacataccaaggtccttgtcaagatctaggcagacatgaagaacaagagagctgcatgtctattcctatgcaagccaaagaaagtggaggggttttgaggtctagccacacgaaagggtcagttacagcagcccaaattgatttggcaggtgatgcccatcttattgtgagtgataatgctgctgccaagcaagtgtttagtgaggagaaagaggaaacaaaatctatctcttcttcagatattgatatccttcatgaaaaatcatactccagtggacacgatgaccatgctgcttgtgctgccgaaactcagttctaccatccacagaaagcatctatatctgatggactacatttgggtcctagttctttgcaagtagaatcactggatgctttggatagcgatatactgtatgttaacacaggagttctcgagcagcatcataaagagggttactatgaacccagtgtctaccaaatcacttcaggcatttgcacaatgtctgaagctgaaccattcgaagttttagaaactggaaaagatgtaaaaacgccatctaagctagatgagcaacttaatcctgggttggacggagatgaagctgagaaacacagcttagactgtggtacagacaccagtcctgtgatgagcaagagaaccctttcttcaccaggatcaggaccatgccagcagtatgtaaatgaaagcaccaccagtacacagtcgactgataatcacccaaacgacctacccgctccgagatctcctgaacaatccgcgtgttttcagaatgacaacgattcgggttcagtaggcatttgtcaaagcagcaggcgaagaggtatagatgaactttgcggtaagctgcagagtttcaaagtttccagcgccgtaaaaggaagctacgtagctatgggtgcacctcgtccgaagcctggggacagcacgagccgatctgcagccgcgctgctcaggaacatagagaacacaactgctgttaaagctggccgtcctcctgtcaagccaaacgccgatggtaaggactcgtctaggcgagccctgcagcccataagcggaaggcctgacagtaggtagttcggcggttccttaataagtgtgtcgtgtttgtgttcaaccctttgttgaaagccaggtccgtgtatttgtgcagcttgttgtcatgaagctgctgtgtgcgtgtcatttaacataagcgtgcgtgaagttgtgttatggaagtggctaaatatgtgttcgttaggaggtcaattggcttgaactgaccctgctgttccgtgatttctgtctaaatatacttgtgtggctgtgtcactttgattggccttatcgatcacatgcaatgggatcacatctagcgtgctctagggtcctcgtttggtaatcgctg

SEQ ID NO: 17119 - DNA, 1725 bp, Zea Mays
ctcttatctccttcccccagccgccctccgcctccgcgccatcgacacgctcgagagcgtcgctgcctgctgctcgcgttcaagaggtagaggtaaacacctgctatcacctagttatagtttgcattcacagacctcttctgaacaactaaaccatgtaccatcgtcaagatttcgccagaaaaggggttcacgttttatcgtcagagctgaagctgatttctatagtgtacttggtgtctcaagaaatgctagtaaatctgaaatcaagagcgcctatcggaagcttgctaggagctatcatccagatgtaaacaaagatcctggtgctgaacaaaagttcaaggatatcagtaatgcttatgaggttctgtctgatgatgagaagcgatcgatctatgataaatatggagaagcaggtctgaagggtgctggcatgggcacaggagattactcaaacccgtttgatctctttgagtccctgtttgaagggtttggtggaatgggtggaatggggggtggccgtgctgctcggaacagaccaatgcaaggtgatgatgagagctacaatctggtactcaatttcaaggaagctgtgtttggtgtggagaaggagattgagataaccagattggaaggctgtaacacctgcgacggaagtggtgccaagccaggtacaaaggcaaccacatgtaaaacttgtggaggtcagggccaggtagtctcctccacaagaacaccgcttggaatattccagcaagtctccacctgcaatacttgtggtggcaccggtgaattctccactccttgcaacacctgtgggggtgatggccgggtgcgaaggacaaagaggatcagcctaaaggttcctgctggagtggattctggaagcaggctgagggtccggtctgagggtaatgctgggcggcgaggaggccctcctggggacctttatgtcttcattgatgttctctctgatcctgttcttaagcgagatgggacaaacattctctacacatgcaaggtttcttacattgatgcaatccttgggacaaccgtcaaagtccccactgttgacggaacggttgaccttaagataccctcagggactcagccaggcacaactctggtgatgtccaagaaaggtgtcccgcttctcgggaagtcaaatgcccgtggagaccagctggtgcgtgtccaggttgagattccgaagcgtctgagcagcgacgagaagaagctaattgaggagcttgcaaacctgaacaaggctcaaacagccaatagcaggagatgattatcgcacatggcttcgtaggacagcgtgcttgtgtgataggcaattttgatgcaaactgcagtgatgattggatgaaaagagttggtagtgataaactcttctacgaactacatacagcaaggggtctggagcaaaaaaatgtgccgttccacatctgtaacctcgtttttaagctattgaaagttgagtcagtgaactggacgtttttgcaatagcttagcatatgcactaggcgactttattagccatttttttttgttgttatacggcttttgtattcttggaagccttaggcaagatatctgatggtggaatcaggtttagacttgacatttcttgcacaaatgctgcaccatgcattcatggaatctgtaagctgtaccatggaaatgttaactgtagttttatggtttgtgatgcattgg

SEQ ID NO: 17120 - DNA, 784 bp, Zea Mays
cgcagttgggtctatccatctgtcactgtctgaacaagttctgtcctctaatagtgctatgaaaatgaggaacaatcggaaacgtcgctcgctctggctgaggtaactgaaaaggcactgagcatccaaaaccagcacaacgacgctgtcctttaccaaggaagagcaatgtcctcaatcgactacctcaaggcacgttcctaccgtggtctaactggagaatacgaaggcccagttcctgattcagtcttggtaggcagaatgggcagggcagctggttacagtgacgagaaaactgagagcgcacagtgaaggtagcattatgcgagttgatcagttgctacaggctccccttttttggcggtgaaaaaccaggagggtgcacaatgattcaatcatgcagcctggatggtttaccaacctgtgtacttttgtttaggtgggctaacaggtttatagacaattgtcaacatttttttattgttgagaatacctgtttctagtcccagggaacaatactttggatgctgttcaatcaggtggcttttttgctattaggaactactagtgtgtgcctaatcagtttgtatgcaatagtgagagctatctcactgatgtggggaagcctttttttttctttctaacaactgtggcatgtgttcagaagatgagatgtacactattcacaacatgcactgtactcatccattatgtttgtacaagacaccaaatttactctgcacattcttatttattggtaccggtagtagttcccaaagcacaa

SEQ ID NO: 17121 - DNA, 1469 bp, Zea Mays
tttcaatctttccaatccatcatacttgaaactgaggaaattgatattacagctaaggattgtagtgctgatgagaattctaaaccaagtaacacagagtcaatttgggttgagggccttgtcccaggaattgatttctgcaatcataatgtaaaggcactggcaacatgggaagttgattctgtgggaaatgctaccggaattcctgcttcaatgtacctcttgcttgctgataaaagtcctgctgagactggagcagagatctgcataaactacggcaacaaaggaaatgaggaactactgtacctttatggatttgtggttgacaacaatcctgatgattatctcatggttcattatcctttggaagctcttagacagatccagtctgctgatataaaaatgaagctactagagatgcagaagggagaattgaggtgcctcctacccagaagtttgcttgataatggattttttggtatccgttctagtgaagataaggatagcaagaaaaatactggtccgttttcaagttttagttggagtggtcaacgcaaagttccatcatatcttccaaaaattgttttccctcatgaatttatgagtactctacgtactattgccatgcaagaacatgagcttgaacaggttgcttctttacttggagaggttggatatagtgaagacagagaaacatcttgtgcagcgatccaaagtgctatttgggaggtctgcggtgatcagggtgcactgggtttgcttgtggatcttctcggggtcaaaatggctgaacttgaagagggctctggaacagaagcatctgacgccgaactgctcgagcagttcgattccattcagccagaagactacgcgagtgaaagcggcgagaagcacgaaaggaagtcaaagacaaactaccgttcgtgtgtagtgtaccggagagggcaaaagcagctgacgaggctgttcctgagggaggtagagcatcttctggagctttctgcgaaagaacagagctaagagactctcatctggccctgcctgcatcaaggttagaactgcagggttgtgaaaggaggcacacccgttgcgaaagtagaataccgccttcgtttcgttcccttgcgaaagtactactactccgttccaggactacgatttcgtctcccgaggattccggattgcccgttggctgggcatttgtggaggagacgtcgtcttgcactttgctgccacggctaggctgtagctttacctgattcagcttgcagcggcggagctgcagcgaacagccatctagagacagctccagagctctggttttaccaaaatgcgtttcttttctagatgactttgccttcgtcagagatgcatctcctggtctcacgagtcacagttccgactccgagacggtcaaggagattatagtctgctaagattatgtaatctaaagtattttttaaaccggg

SEQ ID NO: 17122 - DNA, 433 bp, Zea Mays
acagtagtaccactgtaccagctagattgccaacatgataaggtttctggtggatagctacaacaagcccgtccctgctattctggagatcccatccaaggaccatccatatgatccagcgcacgactctgtgctctctcgagtgaaatatctgttctctgcagaatcggtggcgtctgataggcgatgaaggcatccttgcgtagcagtacccttcgatgcatctattttgttatggtattgaaaagaagatggcacgtaccattgggtgcgagcgagccagcatgaataataatgagcttgcaaacaatgattggttgaactaaaccaacacaattttttttcataaatggttcgaatgatattttggtgcttgtgtttgattggttattagggaataaaatgcgattgttatgacgaattgattgcccag

SEQ ID NO: 17123 - DNA, 559 bp, Zea Mays
cgaagcagtgcttatgggtgatactgacaagtggctacgaaaaagaaagccatagcagacgatatgggtttgctactacaagccaagctgaggcaagcgtcaccgggcccaagttcatgagagctggatgcacacctcgtctcttctacctatgttgtatcaaacatcatttagtaattttgaagttggagtcacgcagcagcgtagattgtattctttggcatcttctgtcgcacagcacactctttgaatggtttaattttgttcctactgctagcagcccgtggaactttcatgagcttgtatgggtgggaccaatcatcgttccatacttccattgtaggtctggccgatgggggtggtaccattgtaccaagcattgctctattatagtaggtgcaggctgttgcatttcgtgtgaaattagcacgggttgtttcaggtgatttttggatggtgacgctctatgagtactacaacgttcggcggtattgttgtcagatgcacgagagctcttgcctgtatggttccctgatagcaagcgaatttgcaaagctat

SEQ ID NO: 17124 - DNA, 495 bp, Zea Mays
taggtttctgggttcttctgatgctggataatggccggccattttcaactcagctccgactccgaatgaagcttcagaggcgggagcagaagcacaggctgcccaggttgacgaggaaccagattccgatgaagaagacgacgatcttccaccacttgaggcgaacacgaacaggaataggccgtatgaattgtattctgattcagacagtggttctgacgcttgaaaagtaccaaggccatccatcctgtgcgttttgtctccaaggtattcgtgatgtgtgaatggaatggctggacctggatggctggattcatatgtgccatgtcatgtatgttagttagcatgctgttattctgcaatggaatctgtgttttctgatactagtcattaagctagatcaaggaagctgggtttgtttccactgagggtccgttcggttcttgggggactggccacccggaactattcctagccagattggttatctaattt

SEQ ID NO: 17125 - DNA, 136 bp, Zea Mays
cgactcagtcgtttccgctgcggtgtcctctttaccatgatcctacctcactgtacctctcctctacgtgctaggcatgcactaaagaagttatctgtggctgtgaagtgatcgccggaccgccgcggctataaat

SEQ ID NO: 17126 - DNA, 1835 bp, Zea Mays
atctcaacgcaaacccaactgtcttggttgcgcaagcaccaagcaggtggaagatgatggaggtggcgggggctcaggcccgcgcggttcccctcctgctccgcaacaccgcctccctgcggacctccgtctccgtctcctgcacgggctcccgccggagctgggtggcggcggccacggcggagggggacgagacccgcggcttcgacaaggtgcccatggacacccccggcgcgtaccgcctggtagaccgggacaccggccgcagcgtcatcgtgtggggcggcaccgacgacagcgacgaggcctccatgccgtccccggcggtgctctcccggaccaccgaccgccgccacagccaaggtgttgggggaggtacaggtatcgggaatttcggcaggttcaaggcacagaaaataaaatccttggtcacgaggtcagctcaccgcaagagggagagttctaatcgctcaagcactgcctggtctgatgaatcttctttcaatggctctgatgatgaagaggaaagctattttgagagaagaaagcatgtctcagactctgaacgccacccgaagatgagcagtggctccagagatggaagaactcgaagtgcacattctctgagttctgttttgagccaatacagaggcgatgatgatacagacttccctggttcagaggctacttctggttccaaacgatggggtaatgttgccgatgttacttatggacggcagaatcagaagcaaagggagcctctgaatttccctcaaagaaaagggcctctggacggcggatttttcagtcgcagatctttcaaggagattggctgcagcgatgaaatgctaggtgcgttgagaaattttgatttccctcgtccgtctcatatccaggctatggcatatgggcctatcttagaggggaggagttgtgttgttgctgatcaaagtgggtctggcaagacactggcatatctttgccctataatacaaaacttaaggaacgaagaagttcaagggctccataaatcatcccctaggaaccccagggtgatagtattgacccctactgctgaacttgcttctcaggtccttaacaactgccggttgatatcaaaatctggggttccatttaggtctatggttgcaaccggaggatttcgacaaaagactcagttagagagccttgaccaagagctcgatgtaattatagcaacacctggccgtttcttgtatctgcttcaagaaggctttgtgcaactagctaacctcagatgtgttgtgttggatgaagtggacattttatttggtgaagaaggtttcgagcaagtgcttcatcagttgatcaccgtggcaccagtgacaacgcagtatcttttcgtgactgccactcttcctcttgacatctataacaaggtcgttgaaacctttcctgactgtgaggtgatcatgggacccggtgtccaccgaacaagctctcgccttgaagagatccttgtggactgcagcggagatgacaacgaagaaaagaatccagaaaccgccttttcgaacaagaaaacagcgcttttgaagattatcgaggagtctcctgtccgcaaaacaattgttttctgcaacaagattgagacatgtagaaaagttgagaatgcgctgaggcgggtggacaggaaggcctcgcagatcaaagttctccccttccatgctgcgctggatcaggcccagcgcatcgcaaacatcaaggagttcctgaacaagcaaacggctgactccatgttccttgtgtgcacagatagcgctgatgctaccatttgagtttgacgacggtcggtg

SEQ ID NO: 17127 - DNA, 98 bp, Zea Mays
gtatgaacatgtggtattactctactcgttagccatgcagataactcactgctatgtttgtgcaagcgatggccgcagaggaggaggcataaaacgaa

SEQ ID NO: 17128 - DNA, 5147 bp, Zea Mays
aaagggtcaatgtgagcgtatctgtttggactggagctgctcttccgatccaagcgtggaagcatcattaccactcgactctatagccactagtcactcagtcaatcatccacctgcgctgccgctggaatttaattaaaaaaaaagagcccgatcgatccagcaaagtgcatcacgccgttcacggcttcaggacatagggagctcccaagttctcctcctcctcctcctccacctcctcctcgtcgtcgtcttctctctcaggtctcagccatcgtatcgtccggacccaccgtatccccagtccgccggcggccgtcgattcattatcccggccgcccgggctgcccgtaagtcaagcggcggcggcggcggcggctaaggtatagccaaggctggagcgaggccggtgcggccgaccatccctgtgtgtgcaccctgcagaaccaacctcacccccgatcaaggttcttggatggcgggcgtgtgcgggagcccgttctgctccagggaagcttcagctccagctccagcgtcatgtggacgatgggacgaactactcaactcctccacctgcgcgaacaacatcctggcgaccggcgccgctgcgctgctcgccgtcgtcctcgcgctgcagctgctcgtcagggtcgcaaggaacggactacgacacgcgcccgtcgtcgcgctcagctcgccgctgcagcgggccgccgtggcggccaacgcctgcctgggcctggcctacctgggcctcgcggcgtggatgctggggacggacctgacccagcgcgcctccgtctacctcccacaccggtggctggtgagcctggcccaggggctctgcctgctcctcgccggcttcgccttcagcgtcagggcgcagctgctcggagcggcgttcctccgggtctgggcggctctgctggccgcgtacgccgcgttcgtttgctgcacctcggtcgtgcacatggtcgcagacaaggtgctggccgtgaagacgtgcttggatgttctgtccctgcctggtgcgctgctgctccttgtgtacggcattcggcacgccagggaagaagaagaaggagatggtaacggaggaaccgaaagttctttgtataagcctctgaacgccgaggctcacgacgacggtgcggccgactcgcgtgtcaccccgtttgctaaagccggggttttcagcatcatgacgttctggtggctgaaccccatgatgaagaagggttacgagaagcctctcgaggagaaagacatgccgctcctaggcccctcggaccgagcgtacagccagtacctgatgttcttggacaacctgaacaggaagaagcagctgcaggcacacggcaacccgtcggtcttctggaccatcgtctcttctcacaagagcgcgatcttggtctcgggtctcttcgcgttgctcaaagtgctcacgctgtctgcaggcccagtgcttctgaaagccttcatcaatgtctcgcttgggaaaggttccttcaagtacgagggctttgttctggccgcggcaatgttcgctatcaagtgctgtgagtctctgtcccagaggcagtggtactttcgcacccggaggctagggctccaggtgaggtcgctcctgtcggccgccatctacaagaagcagcagaagctgtcgggctcttcgaagctgaagcattcctctggagagatcataaactacgtcaccgtcgacgcctaccggatcggcgagttcccgtactggttccaccagacgtggacgacaagcgtccagctctgcatcgctctggggatcctgtacaatgcggttggtcttgccatgattgcatcgctggtcgtcatcgttctcactgtgatctgcaacgctcctctgtccaagctgcagcacaagtttcagactaggcttatggaagcacagggcgtgaggctgaaggcgatgtcggagtccttgatccacatgaaggtcttaaaactctatgcgtgggagacgcatttcaagaaggtcattgaggggttgagggagattgagatcaagtggctgtcggcgttcaaccttaggaaatccttcaatggtttcgtgttctggacatcaccggttctggtctcggctgcaaccttcctcacatgctatcttctgaaaatccctcttgatgcaagcaatgttttcacgtttgtggccactctgcgccttgttcaagacccaattaggcagatgccggatgtgattggagtcgttatacaggctaaagttgctttcactaggataacgaagtttcttgatgcgcctgagctgagtggacaggccaggaagaaatactgtgtgggagatgaatatcgtatagtgatgaactcttgcagtttttcatgggatgagaacccgtcaaaaccaactctgaagaatataaacttggtggtcaaggctggggagaaggttgcaatatgtggcgaggtaggatcaggaaagtcaacactattggctgcagttcttggagaggttcctaaaacagaaggcatgatccaaatttgtgggaaaacagcatatgtttctcaaaatgcatggatccaaacaggaacggtgcaagacaatattctctttggatcttcaatggacaggcaaaggtaccaagaaacgcttgagaggtgttctttagtaaaagaccttgaaatgcttccatatggagaccatactcaaatcggggagaggggcgtaaatcttagcggtggccagaagcagcgtgttcagcttgctcgtgcattataccaaaatgcagacatttatcttctcgatgaccctttcagcgctgttgatgcccacacagcaactagtctttttaacgaatatgtcatgggagctctgtcagataagactgtccttttggtgacccatcaagtcgattttttgcctgtatttgattctgttctgttaatgtcagatggtgaaattattcgtgctgcaccttatcaagatttattggcacattgtcaagaatttcagaacctcgtaaatgcccataaagacactattggtgtttcagatcttaacagagtcagatcccatagaacaaatgaaaacaagggatcgattgatattcatggaagcttatacaaagagtctttgaagccatcaccagcagatcagctgatcaagacagaggaaagagaaatgggtgacactggtctcaagccttatatcctttacttgcgccagaataaaggcttcttcaatggctctatgggtattctttgccatgtgattttcgtatgtggccaaatagcacagaattcatggatggctgctaatgtccagaatcctgatgttggtacacttaagttgatttctgtgtacattgcaattggattcatcacagtgttcttcttgctgtttagatcgatagcacttgttgttcttgggatccaaacatcaagatctttattttcccagttactcaactcattgttccgtgcgccaatgtccttttttgattctacccctcttggaaggatacttagccgggtatcttcagatttgagcattgttgatcttgatgttccatttggattgatgcttgctcttggtgccagcataaatgcatatagcaatctgggggtgttggctgttgttacatggcaagttctgttcgtctctgtgccgatgatggttttggcactcaggttgcagaagtactatttagcctcagctaaggaactgatgaggatcaatggcactaccaaatcagctctggctaatcacttgggagagtcggttgcagggtctataacaataagggctttcgaggaagaagatcgtttctttgagaaaaattcggaacttgttgacaagaatgctgcttcatatttctataattttgcagcgactgaatggctgattcaacgcctggaaacaatgagtgctgcagttctttctttttctgccttcatcatggctctcctccctgcaggaacttttagctctggctttataggaatggcgttgtcttatggtctgtccctgaacaattcctttgttttctctatccaaaaccagtgccagctatcaaaccagataatctctgtggaaagggtgaaccagtacatggacataccaagtgaagcagcagaggtcattgaagaaaatcgaccatcaccaaactggccccaagttggtagggtggagcttagagatctgaagatcagatacagggaagatgctccccttgtactgcatggaatcacatgcacttttgaaggcggagataagattggtatagtcggccggacaggaagtggaaagacgactttaatcggtgcattgtttcgtcttgttgagccaactggggggaaaataattattgactctgtagatatcaccacaattggcttacatgaccttcgttcacgtttgggtatcattccacaagatccgacactctttcagggaaccataagatataatctagatcctcttgagcaattttcggatcaacagatatgggaggttcttgacaaatgtcagcttcttgaagctgtccaggagaaggaacagggattggactcacttgttgtggaggatggctcgaactggagcatgggtcagaggcagctcttctgtttgggacgtgcactgctaagaagatgccgtgtcttagtcctcgacgaggccactgcatctatagacaatgctaccgatgcgatccttcagaaaacaatcaggacagagttcagagactgcactgtcatcactgtcgctcaccgtatacccactgtcatggactgcagtatggtacttgcactgagcgacgggaaactggtggagtatgacaagcctacgaagctcatggaaaccgaagggtctctcttccgtgacctcgtcaaagagtactggtcgtacgcatcgaatgggaatatctagaagccacctccaaactacgaccgtttgcatgtttccactcgctgcatcctcttgaaaggagatacaagaatctgggcttgcacatccgaagaactattgtatctgaaatcttgagaaaaggcgtcaggtcacaaattggaatggatgaactgaatgaatgcaccaagcaaggcccaaaaccagagatcctctgaacgcgaaggataggatggcgaaaaagaaaaggcga

SEQ ID NO: 17129 - DNA, 1449 bp, Zea Mays
cctgcccggcccggcatccaattcctgtgcggctgtgcccggcgaaaccacacggcccgagactggaactggagggcagaaagcgcttgcccgcggccggtcggccacttgtcactgtcacactcacacacgtctatgccatccacggaccatggtgtgccctctacttatcctcctctcggctacctccaccattcctctgctcagctcgaacgaacaaaaaggactcacctcggccctctcctcttgtgcttctgcttccccaccgagtctcctcaaccccaggcactcgccctctgtcccctcccttcctcgcctccgatgccgccgccgccgccgctcctcgagccgcgcgactacctcggcgccggcgccacctcgtcgtgctgctcgtcgtgctgctcctccggccgcgagggcgcggggccccacctcgcgctgcggctcgggcttccggggtccgacgactcccccggccgcggcgcggacacggagcacgcccgcgcccacgtcgacgccgcgctcaccctcggccccggccccggccccgcgcctcccaggggcagcgccaagcgcgggttcgccgactccctcgaccggtccgcgaagctggacggcgttgccgcggatgacgctgctgggggcgtcacgcgggtagctggagctgctgccggagctccgcccgctgccaaggcacaagttgttggatggccgcctgttaggagctaccggaagaataccctagctgccagtgccacaaagacaaatgggggagatgaaggtaggagtgaggcgggatgctgttatgtcaaggtcagcatggatggagccccatacctaaggaaggtggacctcaagacctattcaagctatgaggatctctcgcttggtctggagaaaatgttcagttgcttcatcactggtcaaaacagttcatgcaagacttcaagaagggataggcttactgatggttctagggttgatgcccttcaggaccaagaatatgtccttacttacgaagataaagatgctgactggatgctcgttggtgatctgccctgggacttgttcaccacattttgccggaaacttaggatcatgagaggctctgatgctgctggcatggctcctccaagaccaccggaacagacagttcggaacaaatgagggcggacagcttacttacctggcgctgaactgaagggagagcgacgctgccttggtcaggccttctttcacttgtgcagtgggatctgcgtcctgctgtctcggacgcccattttgcccacgagctggtcgtcacgtgctgtcgctttttgtctgggaaagatagcgtactgcttgctgtatgatactttcatctgtgttcggaagtttgtagcgcttcatatcctggaagggagtaaagaaaatgtccatgctgtccgctagggctgacgtggcgtcgac

SEQ ID NO: 17130 - DNA, 792 bp, Zea Mays
atcggtgcagagtggcgcgtatagtattgggcatgaactggatccagcaatacagtccgatgaaggtggattgggcgaacaagtgggcagtcattccatataatggatcgccagcatacttgcaaggtgtgcaggtgacattaccagccggcgctgtcaccgaacttttgctcttgtcagtggaatcacaggctacacccgctggacaatcggtcgatccaaaagtccaagcagttctggatcagttcgtggaggtatttgaggatccagtcggcttaccaccaagcagaacatgcgaccacactataccattggttccagggacaaatgtgtgtgtactaccactgtccagtaagctgtcgcagtgccagaccatgctgaagatgacaacaccatcaggggctgctctataggttcgggcacaacttcagactcgtcatctgttccctgactgaacatctcacggaaaagctcttccggattgtgagtactagagcagatgaaaatgaagtgagcagagtggaatatgtaataaaaaatagattgcagccacaaccagtttgccctcggttgcttgatgcatatgtgtgaccagaccaatctgatatccaaaaacttcttgccataataaatgaggctatcctagaaaaaagacaacaaacctttatcctgcacaacgctctaaacattagacctggtgaacataaatggccaatcaaccattctgtatttatcttgtaacacatcgaaccttactgacaggaaaccacgttgtgtttgttcagagacggc

SEQ ID NO: 17131 - DNA, 906 bp, Zea Mays
acagcctaagaggaacccaagtggatatttttctcgcatggtgcaaaagggaggaagcaaagatcacagcttgggaaaatctacagaaagcaaaagcagaggcagctatccgtaagctggagatgaaacttgaaaagaaacggtcatcatcaatggacaaaattttaggcaaactccgctctgctcagaagaaagcacaagacatgcgaagtgtagtttcttctagtgaaggtcagtgtagtgtgagggcaaccaagaagacatcttcctctgtcaaaactggcaggcctttcagctgctgctttacctaccgtgcttgctagttgtgatacacagttggtgcctgtggatacagcaatggatataggtctattcgacctcttctcaggcaacagttatggacgcgaagggaagtcagttgggttttgactacaaggcctaattgttaatgagatttgcactgatgaatgagatatcgttatggagcagcagacgaagaaagccacgcgaaatccactcatgtaactgatggagtggactaatgcagtctagtatgcgacgatcaatctctgtacacccggtagaaaaagttcatgagcttcatggcagttagaatcaggattgagctgatattcatcccgcttgatgtgtagctagcattcttgtaactggaattgtgtgtgtaatgcaaatcatgggcgcattagactgtaatgaagaaaaagtcagggctgcgcctttagaatgcagcttgctcactttttgagtttagtactgagactgggcttgtttgttattggttggcagcaattggaactgtgacgacgtatattttccttttttttggaacgcgctaaacttgttttcccgaattttatggcgaccaacaaagtacatattccattg

SEQ ID NO: 17132 - DNA, 2487 bp, Zea Mays
ttatcaattcataattgccctaataaggtttcgagtcttacgacgatccggcgacgctacctttccgtcgctcctcccccacccacgaaccctgccggaagggcaaaaaggggttcgaaattggtcctgatccaggagccaatcctacagacttcacctcccaaattcttttcccgatccgatctgcaagttctccttggatcctgcatcctccagccgattcctgggaagatctgaatcctcctctcgaccatggatccacgcgccaggtatccttcgggcatgggcaacggccgcggtgggaacctcaactactacggccgcggcccaccgccgcaacagccgcatcagcaccacaaccaccagcagacgtcgggggcgcaccaccaccagcagacgtcgggggcgcaccaccaccagcagtacgcgcagaggcagcaccagcaccagcaccacggccacaatcgccatcagcaacagcagcagcaccacatttaccagcagcaacagcagcagtggctgcggcggagccagattgcccgcgagacctcgggcgcagccgtgaccagcgagccgaagtccctggcgccatccacggccgccgatggcgtcgattcgagttcacaagattggaaggcccaattgaagctgccgcctccagatacacgctacaggacagaggatgttacagctaccaagggaaatgagtttgaagactattttctcaagcgtgaactcctaatgggtatatacgagaagggatttgaaagaccgtctcctatccaagaggaaagcattcctattgctttaactggtagtgacattcttgcaagagcgaagaacggaactggcaagactgctgcattttgtattcctgcactggaaaagattgatcaagaaaaaaatgctattcaagttgttatattggttcccacaagggaattggctctgcaaacatcacaagtttgcaaggagcttggtaagcatttgaagatccaggttatggtcaccactggtggaaccagtttgaaggatgatattgttcgtctgtaccaacctgtgcacttactcgttggaacacctgggcgtattttggatcttacaaagaaaggtgtttgcattttgaacgactgttcaatgcttattatggatgaggcagacaagcttctctctcctgagtttcaaccttccatagaacagttgattcgctacctccctgctagtcgacagattttgatgttttcagcgacattccctgtgactgttaaggagtttaaggacaaatatctgcctaaaccttatgtgattaaccttatggacgaacttacactgaagggaattacacagttctatgcttttgtggaagaaagacagaaagttcactgtctcaacactctcttttccaagcttcaaatcaaccagtcaataatattttgtaactctgtaaatcgtgttgaactattggcgaaaaagatcacagagcttggctattcttgcttctatattcatgcaaagatgctacaggaccaccgtaatagagttttccatgatttccgtaatggagcatgcaggaaccttgtttgcactgatctttttacaaggggaatagatattcaagctgtgaatgttgttatcaattttgatttccccaagaactctgaaacatatctccacagggttggtagatctgggagatttggccaccttggtctggccgttaatttgatcacctatgaggaccggtttaacttgtataggattgaacaagagcttgggactgaaataaaatcaattcctcctcagatagaccaggctatatactgccaataatctgaccgttttcatatgctttcatttctccgcgaataatgagaacttttgtaaataccagctcatcaggttttatggtgttgatctcgtttgttgcatcagagacaattctatgttggtggataacattagatgaggcacccaactttttttattacaccttgtcatgctgacactgttatggctatatgagggcaaatgtcctgccacattaggcacaaagtagtgtatattctaggacattttaaccctgttgctggttctgggcgtgtgatctgtcggtgctcacacaagcttgttgcccgagtcgaacttggggatgtgggcctcagatgggttattgggtgacaggtcggccattgaacttgaagtctggagtctgaacggtagtgaactggttaagtttgcaaataatcggtggtgagctgcatcatgttgtgctgtcttacccttgcagtcatgtcacttttgcttggtgccgtggtcaccatttagatttgcttggataaaacgctcgtcacgtttgtgctgactttgtgttcggcacaagcaacctgtccaggttatgtgtaaagaactgtttacttgtttttttcataataacaaacgttgcagctgtttttgcactctgtttctttccttttcgtgatataatta

SEQ ID NO: 17133 - DNA, 3983 bp, Zea Mays
aatgccatggtttcttgttgctttggggagggagaggtgctttggttcctggatgagctgtgaaggaactgggagcaagaagaattgatgtttactccgcagggcaaaggatggaccggctggtcgacgccaactccggccaaccagcggagcggtggtggggctcctgctgcgtcggcgccccttggaaagggcaaaggaagggtcgccgagctcgagcaggagttgcatgaatatcagtacaatatggggcttcttttgattgaaaagaaagaatgggcagcaaaatttgaagaaatcagtgaagtgctgacacagaaagaggagatactgaagagggagcaggcggcacatctgaatgctatatcagagtatgaaaggcgggaggagaacatgcggaaagcactaggtgttgagaagcaatgtgtcgctgatcttgaaaaagccttgcgtgatatacgagcagagatagctgaggttaaatttacatctgagaaaaagataacagatgctcagtctcttgaggctagtttggaggaaaaatccttggagatcgagggaaaacttcatgctgcagatgccaaacttgcagaggcaaaccgcaagaagtctcaagctgaccgtgatttagaagaggcggaagctcgtcaacgtagactggagaaggagaaactgtattttgagacagagcggaaggcccgagaaaagcaacttaaggagcaggaggaatcactgcaggaatgggagaaaaagctgaaggaaagtcagaatagacttaatgagttgcagagatctataaatgagcgagaggagagagcaaataagaatgatcaacttttcaagataaaacaggacgaactggaggaggcacgaaggacagtggaggccgctaaagttactctgaaagtcaaagaggatgatattaacaaaagactaaatgaattacatttacaggaaaaggatgctgactcaaagcgcagtgcattggaagagcaggggaaaaaattggatgagagagaggcaaaggtcactaatagagaaaaggaggggctccagaagcttcttgaggatcatcaggtggagcttgaatccaaaagacgggattttgaattagaattagagagggaaaggaaatcttttgatcaaaatatgacacagaagcaagcggatttattgaaaagggagaaagatgttaaatctttggaggctaaactttctaaaagtgagcaggcattgaatgataagaagaaatcaatggaaaacttgcagaatgatcttgatgccaaatctaaggctctgaagagttgggatgaatcattgaaaaatgacgagaaaaggttactgaaagaaaagcagcaaatggatcatgaaagagaacaattggagacatacaaattggagcttgaaaagatcaaatcagcattagaagctgagaaggaaaaaatatcagaagagcagaataatctgaaactcacagcgcaagagaggcaggagcatagcttgttgatagcaaaacttaagaaggagattgaggaatacagaatgcgaagcaactccctatctgaggaaatggaggatttaaggaagcaacggcagaaatttgaagaagagtgggaacaactagacgaaaagagagccctccttgtagaggaggacaaaaggttgaacattgagaggatgaatttagaacggtggcgtgacaacgaagaaaaaaggttaaatgatatgaaactcaaaatggatgaagaatacaagcagcagctggagagtcttgagcgcaaggaaaaggctttgagtgatgatatgaagcacaagcaaatggaaaatgatgaatttctgaagggagaacgtgctgatgttcaacgtaaattgcaactcaaacggcatgaattggagatggagatggagcaaaaacaagccacgaaggagaaggaactggaagaaaaggaaaatgagttaaataagaaaatagattttgtggaaaataaactccgacatgcaattgagttgaatgagtccaagattgagaagttattattggagaaaagggaggtgcagatggaaagagaattactgctggaggaaagaaagaaaacggagactgacaaggcagatattagaagggatattgagagtctgcactcattgagcaagagtttgaaggaacgtcgagaggcatataacagggacaggagcagactcatcgaactatttgaaaagtacaaggcgtgcaaaaactgtgggatttctatttttgagggattggattctctgctgcttaaagacagtgctgaaattgagcatccaagtttggctgttgagggagatgatcatgccttgaccaccgatacatcaggtccagatacaggaacccttgttaattcaggtggtcgtttttctttgttacagaagtgttcaaggcttttcaagttctcccctagaaaaaagggtgagcagtcatcagaacaaccatcagagaggaatatatcttttggtgcaagactcgaggaagcaacacagagcgatggagattatgtgccaactcctgtctatgagatagcccacgattctttcaatgcagaggatgagctcccttctgacggtgaaaccagggagaatgaagagtctgaaaggcatgacatagctgataatgcccagatggagtcttctgttggtgtagcagataacagtatagatattctcggtactaagtcatttgatggtgctaacgacatggcagttgaagcaactattgtctctgttgatcaaaatggcgaggactctgtagttcctgctgaagcaggtgtagagcctgaaacatcagagcaaggtcggcgccagcaaaaccagagaggcagaagaaaaggtggtatgaaaagaacacggtctgttaatgctgtagttgaagatgctaagatgatacttggcgaggtttttgaggagaagactgatgatcagggagatacagtcaaggtgggtgctacacgaaagcggcggtttgctggagctacaataagtgaacaagatgaagaagggagcgaagcacattcagaaagtgtttcacttggagggcagcgccgtaagaggcggcaaactgctggggcagtgacagatgccccaggagaaagacgttacaatttgagacacagtagagctgcaaatgctggcgctgcaacagcccaagcagacaaaaaaaaatcttcaaaagcaagaaataaacatacagtagaagcttctgctgatgacaccgaaggaacatcaaaggttgttgaggaacctgcccctgagagcaagagggtatctgaatctgcagactacgatgcatcccagttgcatgagttttcccaggttgaagttggtgatgcccatgctgtagacggtgagggtgctggtgaggaagatggtgatattttggatggccaagatgcactgcctgatgtgccaatgacaccttctggaagcgagtttggagcggaacaggaagatgaggacgatgatgattcagagaggcgaaaccaatcaatcagcaagaagctatggtcattcttcactacatgacttgctgaagaggtcgtcatgtaggttatttctagcttttgtggtttcgattcatgataccccattcttggaactgtaggtcgtgtgcttttggtgattatgtactagatctcccacttgattgtgcttctctcccgtgtaattgaaatatatttgtagtggacatagtttgatggcactcacagaagtagctgatgagatgtacaatggcgatgatggtatgccctgtaaggctgtaacaccagtagcttggtttgtaattgttcttttcccccggttcgtgttacttcgttgaccttattccggggaaatattttagtgctgtgatgatggtctaaatgtttgttcgcctattgaaactaaatacaatgaattagaataccacagtccacaggagcttcggagacttccatcgtcaagattcc

SEQ ID NO: 17134 - DNA, 1173 bp, Zea Mays
cggaatcggatgtgccggtttcatttcggctctggaagaggtcgagaaaaatatgtcatccttgagattgttgatctttggtgatggagaagtcgaaccaaatgaagagcaggtcctgcaaataacccttgagatttgcaaggaggacgtcatttccctgatcgtccaggatctgccttccttgggctggggagtaagaaaagatctggctatctgctggtgcatcttgcttaggcagaaggtcgatgaaacttattgctgtgtgcagtatcttgaaaatcatctggagcttttagatttccttgttggttgctacaagaacttggatattgcattgaactgtggaaatatgttaagagaatgcataaagtaccctacacttgcaaaatacatattggaatctggtagctttgagctgttctttgagtatgttgagcttccaaactttgatattgcttcagatgctctgaacaccttcaagattgttgcaggatctgcttaccaagcacgaagttgtagtcgcagagttcttgagttcccactacgagcagttttttgaactctactcaaggctcttgtcatcaactaattatgtaacaagaaggcaggcaatcaagttcctttcagagttcctgctagagactcataactctcaaataatgaagagatacattgtggaagttcgttttttaaatattatgatcaatctactaaaggattcaagcaaaaatatcagaatatgtgccttccatgtttttaaggtatttgttgccaatccgaacaagcctcgatgtatcgttgtagctttgctagacaatcgtagagaagttctgaagctactccacaatcttccttcaagtaaaggcgacgatgaactcgatgaggagaaagacctaatcattcaggaaatccagaagttggcataacacaaaagcatcaagttatcgtttagcaatgcaagactctccttatagaggacatattgccaaggccagaaccatgtatatcacattgcacatgtagccttcaagagttgtatttttggaggttttttcttttcttttggtctcagaaaaccatagcaaagtattctctttttgaaggaattatatacatgattttggtgaccaaggaccaaaaaaaatcaaactgaaataaagaaaatatgaaaaa

SEQ ID NO: 17135 - DNA, 1629 bp, Zea Mays
aaatgtacaaactctaggaagttacgtaacttcctacgactttactctaggaagttattttttattttaaacctcccctcgaccttatctcttctctcacctttctcaaccccatctctctctcgcgtctatctcctcccttagtgccgcccgccatcatcgcccccgccgcacccgcccacgccgcgcccgctcccggcctcggccccgtccgccgtggaggcccccgccgcgcccgcccccggcactagccccgtccgccatggaagcccccgccgtacccacccctggccccgtccgccatggacgcccgtgcccgcccccggcctcgtccgccatggacgcccccgcactggccgcatccgccatggaagccctcgccgcgcccgcccctggccccgaccccgtccgccgtggagtggatttggaatttgaccccgctgtcgtgctcgcacgtacatgatgcctctaaaccagagccatctgctgcagggggaaatgaacgaaccgatcaacaaccctcatttgattagtacttcattcaatctattattactgttactgagttcaggactcaggtagcagtcgatgccacattgttagattgcgatctgcaaaaacgctactgattcataaataaaatcgacccagcatgtacacacgcacagcttcaggctggtccaagcaaaaactgcattcatgtttttgcttgtacactgcaccgtactcatattggttttagcagtaagagcgtgcttatgggtgcaaaatgtcatagtgaaagatgttttattgcattgcatttagttaataacatgtcattcaaagttttgtggtaaaatttcttctgacctggatatggcgcggaaaatttgaacggtcctatgggagaattataccagaaaagagaagggtatgcgttactagtagcttcccccaaactgctggcgctatgatcaaaatgtgctttcccaatttagccactgcatgttgcctcataatttctagtttttcgatatctgacaatgccctgaccgccgcggaatgtcacgccaccggacaccgacatctactccattccgagggttcttgccccgatgccgtagaagtacgcgaggtgcacgaagaaaaactttggccgttaccacgtgagcgagccaccagttgagcatttgcgcgattcactgtacaagacagagagggatgtcatgaaggtgattagtccagctatgtttggtagtgaagggcgatgtccagagagtaagaatgaggcgacacagtatggactcgatatgactgagcaataatatcttgagcattcgattccatggatagctgccaatgatgttgtacatttatattagacccctccagctaccttgtcgatgcatgaacaagaagacaggttagactttgttgaaaccctcttcactagtggaggtatcgaccatcactcgtcattgtaacccgatggtgatcgacgaccatgagcttccatgttattgcgttctgatacttgagacttttattatgactatgtataagatattttctcttattagtactggatgatgagatgtgtcttattatgactatggatgagacttttgtgatgtaattgatgagact

SEQ ID NO: 17136 - DNA, 220 bp, Zea Mays
cttgttctcttgggatgtggaaatgaaaacgcgtttcttcttcttcttcttcttcttgtttttaaatttaaaaactgtataaaatttgtttttcactttgtcttgttgaaaataatacatcggcccattttgcctgatttctctaaagttttatagcgctgttaatagctagtgatttaagtgctctattatagtggaaatcgtgtgtgcctggttttaa

SEQ ID NO: 17137 - DNA, 2246 bp, Zea Mays
cttgatatttaggctctggattgcctattaaatcattgatggatctaccccaaatgcgtgctggaaagagatataccgcagaataaaggaaaaacagtgcactgaattggaaagaaacgtatgccaaagttctggttcctacatgtttggcttttcaaatccgcagataagacaacttattcaggaactgcccaatgcaaggtcatgtttgaaatattttgagaatggtggggacactatcctgggttatagagcggttcaggttaattggaaagatctggactattgcaatgtttgtgatatggatgaggagtatgaagacaacttattcttgcaatgtgacaagtgtcgtatgatggttcatgctagatgttatggtgaacttaaacaattggatggaggactttggctttgcaacttgtgtcgaccaggtgcacctcgtgtgtctccaaaatgctgtctatgtccagtcacaggtggtgcaatgaaacctacaacagatggccgttgggctcatctcgcatgtgctatatggatccctgaaacatgcttaaaggatgtaaagagaatggaacctattgatggactgagcagaatcaacaaggaccgttggaaacttgtatgcagcatttgcggagtttcatatggagtttgtatacagtgttctcatcctacctgtcgtgttgcgtatcaccctctttgtgcacgtgctgctgacctttgcattgagcttgaaaatgatgacaaaatccatcacatgtatcttgatgaagacgaggatccttgtattcgtttactctcgtactgcaaaaagcatagacagccttctgctgctgaacgtccatctttagaaagtgatcctcctgaacccattcaggtagttcagacagatatggcttcatcatctggttgtgcaaggaccgaaccctataatttacacaggagaaggggccaaaagcagccacaagttgtcgctactgcttctctgaaacgtttatatgtggagaatagacctcatattgtcagtggctactgccaaaacagagtaggcaatacatgcggagaatcaattcaaccgtttggtttgtcagatgctgtgcagcaagaagctattggcaatgtgtcttctatggttgaaaaatatacaatcgtgaaggctacatttaggaagagactaacttttggaaaatcaaaaattcatggatatggtgtctttgccaaggttgcacacaaggccggagatatgatggttgaatacataggggagattgttagaccaccgatatcagacactagagagcggcgaatttacaactcactagtgggtgctgggacatatatgttcaggatagatgatgaacgtgttatagatgccactcgggttggaagtatagcccgtctgatcaatcactcatgcgagcctaattgctattcacgtgccataactattcttggagatgaacacatcatcatttttgcgaaacgggacatagatccatgggaagagctgacatatgattataggtttttttcaagtgatcaacgacttccatgtttttgtggattccccaaatgccgtggagtagttaatgatgttgaggcagaggaacagtcggctaaaatcagagttaagagaagtgaattatttgaaaaaagtgaaaagtaaaggtacatcatattggttgggatatgacatgcttgtgtgatatgcttgccagtgcctaaaggcaaattctaaaaaatggttgagtttcattcttgaatcctgataattcttctcattatttgagtggaagacgaatctaattgtataggtacccaatataggatcggcaatccaatttggggacataagttgaatcaattgtcgtgtaccattgaaatgttagttgttacacatatttcggccatttatcttgttgaacctaccctattttcaaccgttggagctgggaatcggaggggtggtttggttaaatgatttgagatggcctgccatgtgtaatgtaatcgaagtacatggttgcacttttcggtgttgcccatatattatccataacaatatgtagtttcagctgttctgcatttacgaaaatgcattggaagagaaacgtccacttcaactgaatgtattctacgaaatctttatttatgggtatccgtctgttgtgcattctaacctttgtgaatatagagcgtgtatcttatactccttaagtttcaatttacaatttgtttgacttgac

SEQ ID NO: 17138 - DNA, 1323 bp, Zea Mays
atccccttagttggtttagggtgcgatctgcatctttttatctgtccaaggagcaagaggagatgaaaaaggttactgttcaaactgtcagggatgctttgatctcaaagaaagttgaatcaagggagcaagataatgctccattatctgatgattttcctgaagacgagaatgaagaggattttgataacaggatgcgcgcacaaatccttaaaaaacgtagagagcttggtgatgtttgccctcatgaaacctctaaagcagataaacctcatcataaggataaggaattatcagaccgcaggtccaatattgaacataggagggacactgaggacgatgatcaggagcatgagctacaaaaagctaaaaaactatccttgaagaaaaaaggtgctggctcagaagcgagtgctgagaggatgtccaaagcagatgctaatttgcagctactaaatccagctgaacaagagagacatttgcaaaaacagaaaaaacgtcggctccaaggccgtgaagatgagactctagcgaagttacagaagttcaagtcttctttcctcagtaagaatcttgctaccaatcatgtcgaagagaagaatccttctactgataaggcggaaaaggaagatgaagaggaggatgactacaaagggtggcacacaaacctactgtctttcttacccagttcttccaaggatggaatgactaggaaagatgatccagatgactatgtagtggtagacccacttctggagaaaggaaaagaaaaattcaacaagatgcaagcaaagcttaagcggagagagcgcgaatgggcaggcagatctctcacctgattggaaagcttaactcaaattatgtcaatgctccttacgtccttacctaccctggacggttggaaacactggaaatgatgcagttttggcatggtcttgggactgcgcgcagatgattggtagtgaccgtttgtggactagtgttttcctttttggcatgtgtcatgattgcttacactgtaaatgcaattgtacaatagattggttataagctcactgtgaaagcagctctctgtatcactagctatttaatatccgtttcttcaaggagccgattggctgaagttgacactatagcttttgtctcaatttccttatttttattaagaagcggaatagacagtaattggccttcctagtttgttaggtagtgtttggttctggagctaatttggatggagtcgctatgtccgagagattttgaggagtcccgagagattttgaggagccggatggtttattatttgagtataattttttaagt

SEQ ID NO: 17139 - DNA, 2608 bp, Zea Mays
agagcgcacggcccagttgggcccaatactcgacacgactcattgaccggcccattacggctgaagggagtcgctcgccgccgcgttcgaggcgttccctcgtcgcgctcgcgccgtcgaccttcaccgctcgctgtcaggtctgcccgccacgacctcgccggccacactcgcagctcgccctcgctcctacgcctcgccggcgaggccttctgccttttcgcgccctctatctgctgcgatctttggagcatcgttctcttctctcacttgagatccagacccctaaaccctagagctcgccgcttccgctcgctcgctccgcgctggcggcgacaatggaggacgaggagatggagaagaaggtgcagcagtacttgcagcgcaagggtttccgcctcactgagcttgcgctccaggaggagcgcaaccgcctctccacctccgccatctccgacgttgcgcttgcacggtctgacaatgatccagcgagatactacgatggatatagcagattaagaacatgggcatacagttctcttgatcaatataagcacgaattacttcgcgtcctttatccagttttcatccatagcttcatggatctagtggcagaaggacatatgcaggaagctcggtcatttttccatacatttcgggaagatcatgaggtgatgcattcaagggatcttcagaagctggaaggcgtcctgtctccttcacacttggaggaaatggaattggcccggtcttttaggaaaaataaatttaaaattaaattatgtgagtattcgtatgaattgcttctccagtatctccagaaaacacaagcccttgtggtgcttggagtaatcaatgagcacataacttttgaagtatctcctggtcagccctcattaatctctgatgacgctgatgttgttgctctgattgggacaagtaaggacttggcaaaacagataaatcagaaggaagtacattgggggttgcttgaagattctgttgaagagcgaatggagaaggcactagcagaatctgataaaatagaagctgaaagcaaggatgctgatgcagaagataacaagaaaagaaatgcagaaggtggaaagcaaggtgcttctcttaagaaagccaaaaaggacaagcttgttggtgcgactggaaaaagcgtcagaactgaaacaagcatggtttctgtggcacctcgagtgaaaccggagctaactcttccagcaacgcctgttgaagttgaacaatcaattcttgaggacctacgaaaccgtgcacaactgaatagtgtggcattgccatctgttagcttctacacattccttaatacacataatggattaaactgttcctcaatatcacatgatggatcactggttgttggtgggttttctgattcgtcagtgaaggtctgggatatgtcaaagatgggccagccagcaaaaatatcaagatcacagggtgagaatgggccttcccagggtgagcgcatatcaacattagatgaggggaaacgaacctatacactatttcaaggccattctggaccagtttattctgcggcctttagcccgtttggggatttcctcttgtcatcatcttcagactcgacaattagactatggagcaccaagctgaatgctaatcttgtctgttacaaaggacacaactacccggtttgggatgtccaattcagtccagttggccattactttgctagtgcttcgcacgacaggactgctagaatttggtcaatggataaaatccagcctttgcgaataatggctgggcatctttctgatgttgattgtgtccagtggcatgtaaactgtaactacattgccactggctctagcgacaaaactgtaaggctatgggatgttcagacgggtgaatgcatacggatgtttattggtcataggagtatggttttatcactggcaatgtcacctgatggacgatacatggcctccggagatgaagatggaacaatcatgatatgggatctctcgactggccgttgtgtttcaccactactaggacacagctcttgtgtgtggacacttgctttcagctgtgaaggagcattgcttgcatcgggatcggctgactgtactgtaaagctctgggatgtcgcttctagcacaaaaaccctgaagacagaggataccaaaggcagctcagctaaccgactgagactgcttaaagctctccctacaaaatcaactcctgtttatagcctgcggttttctcggaggaaccttctatttgcctctggtgctctctcgctaagctcgtcgtaagctgtgttttttttttgcagaaaactagaactggtcctgttttgacattgagtagtgaagctggcatttcagagactgcctattgtacagctaatattttcattagcaattccaacgaactcagcatgtactgccgaattgagcaccgcagattcgttgtagcgggttgtgatattgtaacaatattattaggttgtgaccttatgaacgcaactaaatgtacaagtgctgacaggcgatagcgtgaatgcaatggtctatcaggtctggagtttggtttagtgaccaggtaattc

SEQ ID NO: 17140 - DNA, 1981 bp, Zea Mays
aaagacgcaaaacgtccgtctgcccctctctggttataattttgggcattaattgcacgtctcctccccacctctccttccctccacccgtgccgtcgcctcgcctatccgatctgccacctcctcccgtctcgcacgttccttcccaactccgcagcgtagcctctccgcggcgcgatccagatccaggtttttcagcatgggcctggtgaaggaaggcatcgacatggaggagggaacccttgagatcggcatggagtacaggactgtatctggtgttgctgggcctctggtcatattggataaagtaaagggcccaaagtaccaagaaattgtaaacatccgacttggagatggcaccaatcgccgtggtcaagtcctggaagttgatggcgaaaaagctgttgtgcaggtctttgaaggaacttctggaatagacaacaaatacacaaccgtgcagtttacaggcgaggttttgaaaactcctgtctcacttgatatgcttgggcgcatttttaatggttctggaaaacctattgacaatggccccccgatattgcccgaagcctacttggatatctctggaagttctattaaccccagtgagagaacctatccagaggagatgatccaaactgggatatccaccattgatgtcatgaattccattgctcgtggacaaaagattccactgttttctgctgctgggctccctcacaatgaaattgctgctcagatttgtcgtcaggctggtcttgtgaagacattggagaaaggaaagcatgctgagggtggtgaagatgacaactttgctattgtgtttgctgctatgggagtgaacatggaaacagctcaattcttcaaacgtgattttgaagagaatggttccatggagcgggtcaccctttttctgaatctggctaacgaccccaccattgaacgtattatcacccctcggattgctctaacaacagcggaatatttggcatatgaatgtgggaagcatgtacttgttatcttgacagatatgagctcttatgcagatgcacttcgtgaggtttctgcagcccgagaagaggtgccaggtaggcgtggttatcctggatatatgtatactgatttggcaacaatatatgagcgtgctgggcgtattgaaggaagaacaggctccattacccagattcctattctaacaatgcctaacgatgatatcacacacccaactcctgaccttactggatacattactgagggacagatatacattgataggcagctccataacagacagatttatccacctattaatgtcctgccatctctttcacgattgatgaagagtgctattggtgagggcatgacacgtcgagaccattcggatgtatctaatcagctttatgccaactatgctattggaaaggatgttcaggccatgaaggctgtcgttggagaggaggcactctcgtctgaggatctgctttacttagagttccttgacaagtttgagaggaagtttgtgacacaaggagcatatgacacacggaacatcttccagtcactcgatcttgcatggacattgcttcggatcttccctcgcgaacttctccaccgtattccagcaaagaccttggaccagtactatagcagagatgcttcccactgaatcactgatcgttgatcagtgttccaatattttggcaagtgcagctttgaataaattgaacagattggcctcgtggccattttcctgtatttatctgtagtcaggtccaattcttttctgttgctgccagaactgttagcaagagtattctggagctggaagctcgaacgcaactggttgtatctatatccgtgaatgccgaataaaggaggggcaataaactgcagcgaaatatgtgctgtcagacattgttgaaaattttctcgattttgctgttttgagatgtgagaaatcttttcactgaaccaaaggtgttag

SEQ ID NO: 17141 - DNA, 1697 bp, Zea Mays
agttcgcccggtaacgactgggggttcaaacaagtcgtctagtccagcctcacagagcagcggctccccagtagacagtggcggaatgtcttcaggtgcaaaggcaggcattggtgcagtcgttgccattcttgtgcttattagcttcgttggagctgcattttggtacaggaagaaacggaggagagttcatggataccatgctggcttcttaatgccttcgcctgcctcgactactacacaagtgctagctaaaacgaatttcagtgctgggagtcctgaatcaaaagattcaatgccagagttcagcatgggcaattgtcggttcttcacttatgaagaattgtatcaggtcacaaatggtttctctgcacagaacctgcttggggaaggtgggttcgggtcagtgtataagggttgcttggctgatggagagtttgcggttaagaaactgaaagatggtggtgggcagggggaacgcgagttccatgctgaggtggatattatcagtcgtgtgcatcatcgccatctagtatctcttgtagggtattgcatttcagatgagcagagattgcttgtctatgattttgtgcccaacaacacgcttcactaccatcttcatggacttggagtaccagtcttggaatggccatctagggttaaaattgcggctggttcagcacgcggaatagcctatcttcatgaagattgtcaccccagaataatccacagagatataaagtcctctaatattttgctggataataacttcgaagcactgctatggatgcttgcactcatgtaactacacgagtgatgggaacttttgggtaccttgctccggagtatgcctcaagtggcaagctgaccgagagatctgatgtattctcatttggtgttgttctcttggagcttattactggtagaaagcctgtcgacgcgtcgaagccattgggcgatgagagccttgttgagtgggctaggccattgctcacgcaagcgctcgagaccggcaatgctggggagctggtggatgcccggcttaataggaactacaatgaagtcgaaatgttccgtatgatcgaagctgctgcagcctgtattcgacattcagcatccaggaggcctcggatgagccaggttgtgcgggtgcttgatagtctcgccgacgtcgatctgactaacggcgttcagccgggcaagagcgagatgttcaatgtcgcgaacacggccgagatcaggatgtttcagcggatggcgttcggcagccaggatttcaggaccgatttcagccagtccagctggagcagccagagcagaggccttgacgcatctggttccaggccattgtaaccctcgtcgtcgtagattcctacatctaactagctagggtgtttcgtgatgggttttgtacgtcatgtaattctttttgattggatcaatcgtgtgattattcttttgccatccctgtcttgtacgactgacatagatcatgtgctgcgctgaggccctgcttgcctgtgcgaagacctgctaactgatgaagagagactgctgcgtttagtcccaattagtgaattgctgtatcgaatttcctgtaattagcagtgcttttgaaatcagcggtttttttacaaggaacgctcagttcgagctgaacttttggggaaagattactcagatgtgtgccttttaga

SEQ ID NO: 17142 - DNA, 1002 bp, Zea Mays
gcggtgtcatggacagggttgtttcccagttacttgtggagatcgatgggttgagtgacaacagccaggaccttttcattattggggctaccaataggcctgaccttcttgattctgcccttcttcgccctggtcggtttgacaagcttctttatgtcggtgtaaatactgaggcatcatacagggaaaggatccttaaagcacagacgcgcaagtataagctgcacaagaacgtttctctcttgtcagttgcgcagcgttgtccaccaaacttcactggtgctgatatttacgcgctgtgtgcggatgcatggtttcatgcagcaaagcgatcagttgaaacattcgaaaccgatccttcaagaagtaatgacgccagtgccgaagaagtcattgtcgagatcgacgattttatcacatgccagcagcgatgcctccttgttcgtgctcggcaagtcggccggtgtgagcaaaatccgtacgtcatcgtctccagtggtgccattctccgtggctctgcacacggtcggggactcggcggccttgctggatcatttgtgccgccaaacgggtttacctgctccgcctccgcccagccagcgccgccgccgctgccgctagcgctcccctcagattctagaaatcgtcgtgtcctgatcctggatctaattgttttatcggaaatgattgcttcaggtaaggaaggaggcaggcgaggatgtcgcaccgtaaattcgagcacccgaggcacggttcccttggcttcctccccaggaagcgatcctctcccgccaccgcggaaaggtgaagtccttcccgagggatgacccaaagaagccctgtcacctcaccgccttccttggctacaaggctggaatgacacacattgtggtgaggtcgagaagcctggctccaagctccacaagaaggaaacttgtgaggctgtgactatcattgagactcctccccttgtcattgtcggacttgtggaatgtgaagacc

SEQ ID NO: 17143 - DNA, 851 bp, Zea Mays
accaagacggccactcccatccaacactgttccagacttccagtccagcgcccggctaatagccaagcagagcttctccctagcctttgcttgctcttccacagcgcaaagctccgagatgatgatcaggcgcggcagcagcaagatctcctcacccctcgccctcctctgcctcctcctcctcctcctcctcctcgtcatcgtctgctcctcctccaactgcgcggcagctgctcgcctcctgcctggcgccggtcctctccctcctctccgtgccgccgcccccagtggcggcgacgagcattccgcggcctccgagacgacgaagggagcggcggaggcgtgcgaggaggggaacgagaacgacgagtgcgtcggaggcgtgcgaggaggggaacgacaaggacgagtgcgtgcagaggcggctgctcgtcgacgcgcacctcgactacatctacacgcagcacaagggcaagccgtgaccgtcagcgacgaggacggtgcatgccgcggctgcagaaaatgaggagcggaagaggagtgaaaaaatgatggaccatcctcaaaccaaatatcctataaattcacgcacaaggggaaggggatagtaatctcatctgctgctgctagctactagtacatgcatcgatcgaccttctgcgtgtgctgtatatttctgccacgctgcctatatattagcatgcatcatcatctaggtctaggactgtctgatggtttcccgtatttgtaaacactgatgaacagtacctctctctctctctgcttcctgtaaccaccaagcttacttggtccaagagaacgtaacaacgcacatttgtttacttggcccg

SEQ ID NO: 17144 - DNA, 2722 bp, Zea Mays
agagatgaagatgctttattgaaaaccaaatgtccgaagcatgtggagctgagatggcagactgaagttagttccagcatttatgcaactcctttgatcgctgatatcaacagtgatggaaaattggaagtagtggtgccatcatttgttcattacttagaagttcttgaaggcactgatggagacaaactgccaggatggcctgcatttcatcagtcaaatgttcattcaagtcctcttctgtatgacattgacaaggatggtgtacgggaaatagctttggctacttacaacggtgttgtaaatttctttagggtgtcaggttatatgatgatggacaagcttgaggtacctcgtagaaaagtacgtaaagattggtatgttgggctaaatccagatccagttgaccgctcccatccagatgttaatgacagttcaattgccaaagtggctacttctaatgaaactcccctaatagatcagaataaatcaggaagtatgaagggaggtgaggccctgaaaaattcatccgagcaacactcagctgaaacaaaacttaattctacgcaagtgcaagagaatgtacagttgccaaacaatgtaaacgacactcattctgagagcatctctagtgtcactactaaagcagagaatacatcgcaaacacatactcagagacgcttgcttgaaacagccgacaagagtgatgatcaaacaggaagctcagaaactcatgaaagtgattcgggggcaaaagcagcagccactgttgaaaatagtgaacccctagacgaagatgcagatgcatcatttgacttgtttcgggacccagaagatcttcctgatgagtacaattatgattatgatgactatgttgatgatcgcttgtggggagatgaggattggaaagagcaagaacatgagaaagaggaagattatgtgagcatagatgcccacatcttgtccaccccagtaattgcagatattgacaaagatggtgtacaagaaatggtgattgctgtatcatacttctttgatcatgaatattatcgtgattcagatcatgcgaaagaactagaaggaattgacatgggaaaatatgtcgcgagcagtatagttgtttttaaccttgacacccggcaagttaaatgggctgcagatcttgatttgagcacggatgctgtaaatttccgtgctcatgtgttttcctctccaactgtggttgatttggatggtgatggatatttggacatccttattgggactgcttatggcttgttttatgttattgatcatcgtggtaaggttaggaacaaattcccccttgagatggctgagattcacgcaccagtcattgctgcggacatcaatgatgatggcaaaatcgagatggttaccactgattcccatggaaatgtagcagcatggactgcagagggagaagaaatctgggaagtgcatctaaagagtctgattccacaggaaacatctatgttcttagtggaaaggatgggtcaaaaatccaacctttcccatatagaacacatggaagaatcatgagtcctgttctacttctcgacatgagcaaacatggagacaatgcaaaagggctaactcttgcaacaacgtcctttgatggttatttatatttgattgagggatcgagtggctgtgcagatgttgttgacattggagagacctcgtacactatggttttggctgataacgtggatggtggagatgaccttgatcttattgttaccactatgaatggcaacgtcttctgcttctccactcaatcaccacaccatccgcttaaggaatggaggtcatcaaaccaaggaaggaataatgctgcatatcagtacaaccgtgaaggtatctatgttaagcatggttccaggaccttccgtgacgaagagggcaagaatttctggatagagtttgaaatcgttgacaagtacagggtgccctatgggaagcaagctccttataacgtgacggtaactttacttgttccggggaattatcaaggagataggcgcattgttgtcagtggtgtgtatcatcaaccagggaagcaacggatgatgcttcccactgttcctgttagaactactggaactgtggtcgtggagatgatcgataaaaatgggctgtacttctccgacgagttctcactcaccttccacatgcattactataagctgctgaaatggcttctgctactgccaatgcttggaatgtttggtgttctcgtcatcttgaggccccaagaaggtgcgccgctgccatcgttttcacggaatatcgactagtggtgaaatgccggtgacccattgaagctgacgaagtgactccccaacatctccatgacctaaatgtcttgttcagtgtagtatcccaacagttaaccatttcatggattatagttatattttttacaatgtacccatttagttctgcagaacaattttgtacacagccattttcaatattggctcacccaaagaacaagcatattgtcaccattgagagtttacagtaggccttggaaacggtaattgtcagattctaagagaagcgacactcggagaggagaagcaaaactctcggatactgtgtcaaaacgctcttcataactattagtagaaaacaaacctatattaagcctgttttcatgctagcctgtcattcctgggtctgtgcggatgttgttgac

SEQ ID NO: 17145 - DNA, 230 bp, Zea Mays
tttccccaattcccaccacgtgagcagaagctgcacaaccaagagccaacggagcaacgcccaggcacacacgatacgaactagccaaccagctgccgagggaggaatcctagcggaacactgtccaggtgacggcggcgcgctaccggtgacgggggatacggcggcatcgtcccctcctccatccccggcgcggcggcgccagcagccggcctgcaggtacggtctcc

SEQ ID NO: 17146 - DNA, 2799 bp, Zea Mays
ttcttcccaatcctcctctctttcttacgccctccggattcgttgcctcgctcgcgtcgccccttcccaccccgggcctgcgtggttcaaggaattggaggcaacctaatcggcggtcaggaatgcttcaagagttcgtcgacaacgtcatcgccgtcacaaaggaatctgtgaagacatttacatatgagtcactgaacaacattgcaaggttcataaatggaatgtcagcactcctattgacactattacctggaaaaggcaacattttagaagggataaatggctgggaacttaagccagcactccgtgggccgcgtcttcctcgttggatggaaagtggggtatcttcgtttaatgagttcatccatgaactttctgttgattctgatgctgattcaattgctgactctgtcgctggggacgatgatcatgaagagtttgtctgccctccgtctccattgtcccaaagttcacggttatcacatgcaagcagctttggtagacatgatcgtcgactcaggagacatatcagatatgcagtttcttggatactatggccattgagattctttgtttctttaatattcattttgttcaatgccattaaatttcggatggatctgcatctggcaattgagattttcatcgaatcagtctttgacatcgttcacaaagcagcacattatattctttctccttcagaagtgtggcagaacctgttttgctggattcaaggaagtggtcatgatactagttctgtcgttgatgtattgactgctaatgttggcagtgataatcctgttccaacagagaggaagactgtgtatcgtcattctctgaacacagattcccggacatgtgaagatgttattactgagcttgggtatccttttgaggctataaaggttgttacttcagatgggtatgtcgtgttactggagagaattccaaggcgtgattcgcagaaggttgttttgttgcaacatggaatattggactcatctatgggctgggtgtcaaatggtgttgttggctcaccagcatttgcagcttatgatcaaggttatgatgttttccttggaaatcttcgtggcttggtctcaagggagcatatagataaaagtatttcctcctacaaatactggaaatattctgttaatgagcatgggactaaagatatgccagcaattattgaggaaattcacaagatcaaaatatcggaacttggcaaaagtcagcctcaatcagcagaggggacaggagatcaaaatgataagttaaaaagtttggaagtacaggcttcacaggaagacagtatagaagaccaaccctacaagctttgtgctgtatgtcacagcctgggtggtgcagttatgctgatgtatgtggttacttcaaggatcacacaaaagccccacagattgtctagactggtcctgctatctcctgcaggttttcatgaggattccaatgtggtattcagtatggtagagaagctcatcttgtttgttggtccagtgcttgcaccacttattcctggactttacataccaactcggttctttaggatgcttctgaacaaattagcaagggatttccacaattatccagctttgggtggacttgtccagacccttatgggctatgtcgttggcggtgacagttcaaattgggtaggagtgctcggtttgccccactacaacatggatgacatgcctggtgtgtcatttcatgttgcgcttcaccttgcccagataaagagggcaaagaagttccaaatgtatgactacggtagctctgcagcaaatattgaagcgtacggaacaccggaaccattggacttgggagctcattatggtctcattgacattcctgtggacttagtcgctgggcagagggacagagttatctcaccatccatggtaaagaagcactacaagctgatgcggaagtcaggggtggaggtttcatacaatgagtttgagtatgctcatttggatttcacattctcgcatagggaggagcttttgtcctatgttatgtcccgcctacttttagtgactgatccaggtaaaggccgtatcaagcagaccaccgtgcgactcaggaggcagaagaaagttcagtcagagattgaggagagcattgagtgcagagccaaggaggaatctgatgaactagctggacatttggagtgatgtggagcctgcaggttaagagtgtgttgtaagtttgtgaataggatactcgtgtcgtctctcatatgttatacaccatgtggaagatcaggggagaataggtctctgtttctagtatcatgttcatggggatcgctttttttaacccctgtaagtaacagtagaggtatatgcatcgactccgttgagcattaggtgtcctgctcttttaagtatcgagaacgaggagaatggtcaggaaccggatgtttacctggcaaatatccagtgttcttgcgacttcttttgtagaatgtcacagccattcaaaggatgtgatgtcaggcgtgcaagcgatggacagtatgttttctgcatatgttatggacagtatgtttcaactaaaacgtttttggtttggaaccaattgttactgttgcatgagtgttattgagcatggataattagcatagaaatgtaattctagtttcactggaatggaagaaagcttgttcactagaacgtaaaattggatctggacgctcctgaagaccggatcttgtaaaattagggtctgtgatccgttcttttgttttctccagcccccatgaacactgcg

SEQ ID NO: 17147 - DNA, 2817 bp, Zea Mays
tctatccaacacgaccctaccggctaccgcgccggaatcacactgcttgtgccttttcctcctcaacccgacacgctctccgcgccgtcgtcgaccaatcgaatggaggcggagcagcaaaagcagcagccccagcgcccgcgccgaaaggggctgaagcggaagctggaggacgaggcatccgccgccgtcgccgccgccgccacatccgcagcagcatccgccgccgccgcctcgctcggcagcgcgggcgccgacgatgacaacgaggaggaggacggctcggcgggcacccccgagatctgctgccgccactcccacgcggctcttgcccgcgaggtccgcgcgcaggttgatgccctcgtccgctgcgcctcctcgtggcgccacgccgaccgcgccgccgccaagcgcgccacccatgtcctcgccgagctcgccaaaaacgaggaggttgtcaacgtgattgtggagggcggtgccgtggcggccttggtgtgccacctagaagagcctgctgtggcggcgccaacgcaggaggaacaacaactgcggccgtttgagcatgagcctgaacatcaacaacttgtagttgatgctggtgcattacctcctctagtgaaactcttgaaaaggcagaaaaatactacaaattcgagggtggttaatagcgttatcaagagagcagctgatgcaattaccaatcttgcacatgagaatagcaacattaaaactagcgtcagaatggaaggtggaatcccaccacttgttcaattgctagaatcacaggatcttaaggtgcaaagagcagctgctggggccttgcgtactttagcctttaaaaatgatgaaaataaaactcagattgttcaatgcaatgctttgccaactttgatcttaatgctgcgatctgaagatgctgcaattcactatgaagcagttggtgtcattggaaatttggttcattcatcaccaaagatcaagaaggaggttcttaatgcaggggcactgcaacctgtgattggattattaagctcatgttgtacagaaagccaaagagaggctgctttgttgctagggcaatttgcttcggccgactcggattgcaaggtccatattgtgcaaaggggtgcagtctgtccactaattgaaatgctacagtcggctgatgtccaactccgggagatgtctgcttttgcacttggcaggcttgcccaggacacacataaccaagcaggtattgcatataatggtggcttggtgcctttgttaaaacttcttgactcagaaaatggatctctgcaacataatgctgcatttgccctttatggagttgcagataatgaggactatgtatctgacttcattaaagtaggaggtgtccaaaagttacaagatggagaatttattgtccaggcaacaaaggactgtgtggcaaaaacattgaagaggttagaggagaagataaatggacgagtgttgaaacacttgctttatttgatgcgagtaggagagaaatctgtgcaaaggcgtgttgctctagctcttgcacacctttgtgcccctgaagatcaaagttcagtttttattgataataatggtctcgacttgcttcttgatcttcttatttccatgagttcaaaacatcaacaagatggctcagcagcattatacaaattggccaacaaagctgcagcactttctcccatggatgctgcccctccatctccaacacctcaggtttatcttggtgagcaatacgtgaatagttcaacactttcagacgttactttcttggtagaaggaaagcgattttatgcacacagaattgctttgcttgcttcttctgatgcatttcgtgcaatgtttgatggcgggtacagggaaaaggatgcaagggacattgaaattcctaatatcagatgggacgtctttgaactcatgatgagatttatctatacagggtcagttcaggttaccagtgaaattgcacaggatcttcttagagctggtgatcagtatctcttagaaggcctcaaacgcctatgtgaatatactattgcgaaggatgtgaatctagataacgtatctgacatgtatgacttgtccgaagcctttcatgccgtgtctctgagacatacgtgcatcttgtacattctggaacattttaacaagatctgcaccagagccggttctgcacagctgatccagcgtgttattccagagctccgcaatttcctaaccaaggcactgagttcatcaagaagcccaagtacaaccgacgacaggaacttgcagacttgattttgagtcccaattcattgacactgacaccgtcatctgaccaaagttgctggacatcctgtacagtgaagtttctggcgctgcgcatttgatggcatctgttgtggtacatggtggccggctcctcaaaattaacatcagcagcttaacaaacttttgtaagatttagtggaggatatgggtaaagagaacccgcgtcttagtcatgcctcgaccagcttacactgggataggctgtagttgtgaatggtcttggccgtaattcgtcggtctctgctttgtttctgagttgtgtttgtttcaagttcacagttcagtgtatgcctgcatatgtttaaagtatgaagcttgagcaagttagaaattagcccctgtagtgataaagctgtctgtgtagatccaccgattggagttaccgaaacaactatgtaacatcatagatgacattagatgcatgataattgctggtaaagcttggtcaaaatatgaggtagaaccactgatcatcactta

SEQ ID NO: 17148 - DNA, 903 bp, Zea Mays
actatatgctcttttgattcctagatccaaattgcaaagggttggcctatgtggactttttagacaacaagcatcttgaggcagctattaagaaaaacaagcagaagctgcttggaaagaaagtgagtatcgcgcgatcagatccaagcaagggtaagaagagccgtgaagcaggtcaaacaagccaggataatttacctccgagtggtggtgatgatgcaaaagcaacaggatccagtggaccagacaatgaagtacccaagggtgatgcaaaaaccatagggaagaataccctttttgcaccacgagctctggttaaacctcttggatggacaaacaaggatgagaagaaaccagatgttgcaggggagttgaaatcaaatgaggagttccgaaatctgttactaaagaagtgatatcagttggcaggtgtggatctccatgccccaatccagtgccaagatttgtggtgccttcatctctatgttagaatgatggacctgtagtagcagcttgaactggggatctacaaccgttatgtcttaccccgatgtagacatgaatatttctttctgctagggagattatacaagccatgccgaattgcagggtggtgaaggtgaaaacgggacgttgcgttcgagcagaaaaaccctgcccatgtgaaaagaaaacactgaccttataatatgtgctcactttctttttgaaccatacgtacgcattgctggtgaaacatcactgcatctcaaaaatgtgtaatctactctacgcggcttgattggagatgcagatttatttgattgtacgttgggaccttttggaccttgcaactgcatatgttgagaggctaacatcttttcagagcggcagcccaacgacactttgcatacacgttttaaa

SEQ ID NO: 17149 - DNA, 3268 bp, Zea Mays
gttaacaagtgcggaaaacttgaaacttggcttgaagacatgtgggcttgtatgaagcagttcaaagatgcagtctgtggtgtgatgaatgagccaggccctattgcaactaaactacttgctctaaagtttgtggaaacatggattttgtgttgcacacctcaagccaacagtgaccaagtacagccaactgagggaaaaaactggagatttgatacttcacgatcatctcaatttcatcctagccttgatcctgctattttggaagctgatgcacatcgagctctcctcctcctcctggatattctgcgaacagcttatgcccatcgagggtccttcctagttggcaccatcaactcttttgcttgattttgaccctggcttggagactgcaaagggggcacattcagcaagcctgcggtatgctgtaagagcagcttttttggggtttctacggagtccccaccaggcaatgattgagtctaaagacatattggtaaggcggctgcgtgttctcagccctggtgaggcaatggaacaaaatattaggcaggcagagaagatgtctagaaatatagagcgtgcttctcgtgctagcaaggatgagtctacatcatgggagatgccttatggagatataaatcggaagaaacctgctgttcgatcaagtgatacttttactacgtctgatggcatagctaagagagcaagatttgacatgtctgccacttcaaacctgccagttctgggattgtctgattattctgatatgcaggctgacaatgatgccagtgtgggtcattcatccgatccagctatattgaataatgaagtgtctcctgtcgagaagatgattgaaatgattggcgctttgcttgctgaaggagaaagaggagctgaatccttgggtattcttgtctcaacagtagaggcagatgtcatggccgacattgtgatagaaacaatgaaacatctaccggaagcttcatttcatttagcaacaaataacggtgtccagcaactgaattttaaatattcctctggtctcgtaacacaaaaccttccagccaattcagactccacactattcactgcacaatctacacccacagcagatggagtcagcatctcaccatctgatgcctttgttatgactagcgttcatgatgctaagcgtgatccaagaagggaccctcgtcgcctcgatccgcgtcggatagtttcatcttctgctgtaaattcgatacaggtgaagatggaaaccaatagtgtgcatcaaacagataatttgtcgaacacactctactccaattctcggaaggctgaaaactattcagactatcaaggagatttacacaaaaatgaaggtgaacagcagtcagcttctcaacctaatcaaacaattgccaaagacaagttggagcttctggatgttgtcactgaaccggagccaacatttgaagtcgaggcaccagtggatgtcaggattcattcttctgatgttgatgaagatatagtgaaacccatgtcttcagtggttaattcacttgacgaatccgatagcatggatttagaggttgacccctttttaccagctccaaaggcaccaacaccagacgacaccaatgatgacttgccaattattacatctcagttggaattaagtgaaaaagggaaaatctcaattaacaaactagccattggccggatacttgatgattacaagaaaaatagtttcaatgccagattttctttgcttgctcatttgatcgcgcagagtgctgctgatgataacattatggatttgattcagaggcacattatctttcactcacatgatcaggaggggtatgaactggcaatgcatgtgttgtatcagctgcagagtatcagtgttgctaattcaccagaaagctctacctccacctctaaacattacgagaagttctttatatcacttgcgaggtccttgattgattcactgcctgcttcagacaaatcttttagcaaacttttatgcgatgcaccatatctacctgagtctttgtttagattactggaggatctttgcatgtcagaagacaacagccaacaattaaaggatggagatggggaccgtgttacccaaggcctgggaactgtatggagccttatcttgggtcggcctccgcttcgccatgtttgcttggatattgctctgaagtgtgctgcccactctcaagatgaagtcaggggaaaagcagttagattggttgcaaaaaggctctatgatctaacatatgcaacagaaaaaatagagcagtttgccatagagagccttgtgggagttgctaatgagcatactgtggacacagatattaattcgaaatctttgaaagaatcgacagctgagattgaggtaggtagtcagggaacttcagtaagtggctcccagatcccagatactgagttctctgaaaatgggccattcaagacatcatcggtttctacaaaacagtcagcagtatctgtatctgaggcaaagcggcgtacttctttgttctttgcactttgcaccaagagatctagtcttcttcaacatctgttcaatgcttatggaaggtccccaaaagttgtcaagcagtgtatccattggcatatgcccaaccttataagaaatctggggccctcgtgtcctgaattgctgaacattattcataatccacctgaaggcagtgaacatcttattaccttgacactgcaaacattgactgaagattcaaatccctcagctgacctagttgctgctgttaaacaattatataataccaagctgaaggatgcatctattctgattcccttactgccttcatttccaaaggaggaggtattgcctatatttcctaggctagttgatctcccgcttgagagattccaagacgtacttgctcggatattgcagggaactgctcatactggtccagcattgactcctgctgaagttctcattgcaattcatgatattaaccctgaaaaagataaagttgccctaaaaaaggtcacggatgcttgcacggcttgctttgagcaacgcacggtatttactcagcaggttttggagaagtcacttaatcaattggttgacagaataccaattcctcttctttttatgagaacagttattcaagcgcttgatgcttttcctgctttggttgattttgtcatgggaatactctccaggctcatcgataaacagcgaaagaagctataccattcaagtgttctaact

SEQ ID NO: 17150 - DNA, 1594 bp, Zea Mays
ctccaatgagcatcatgcagaaagtgacatctatgatgttgttgaaagtcagagggaaacacaagatgggcagcttccaagaacacattcagttccagataccacatggactaaagcgaaatcaagcatgccaattggtgtgatttttcagtatatatgttggaggacatatatgcaagcttgtttcttgtgaaatgtgatacacttttgaacagagctaatcatcgtcagggagaaaaacaaacaaaaacgacgaaattctgcagtgggatatgcttattctttgtacttatttgtgttatttgggctcctatgttgatttatagtagtggtaaccctacaaatattgccaatcccattgttgatgtaagtgttaagattgatataaaggcacttggtgggagattaaacttgtttaagactactgcttgtgaaaaaataccttggaagtacttgaaggcctatgatgatgttgatcctctagattaccttggggcatacaatgtggatgacattcagctgatttgctgccagcctgatgcatcaacaatgtggttgatacctcctccagtccaaaacagattcatccagtcccttgaggagagagagatgctttttggaaagatggaacttattttaaattgggattttctcagagctagaccaaaagggaaggaattagtgcgatatgaatcccctattgaacactgcccgagtgtagatgatgttaaacgagtgcttaatggaactgcaaacagcttcagtataattgatgcttacccaaggtactttcgagttactggatcaggtgaagtccggcgattagaagcagcgatagattcagtaagtggcgaattgctattaaataatggcactccttggtggtcattctatgatacaaacccatcagatttggcaggctgtcaagggctgaatggtcccatggctatagttgtttctgaggagacacctcagggcattattggcgaaacactcagtaaatttagcatatggagtttatatattacttttgttctagctgttgcgagatttattaggcttcagtgctcagacttgagaatgagaataccatatgagaaccttccgtcatgtgacaggctacttgacatctgtgaaggaatatatgcagcaagagctgaaggagagttagaagtggaagaagttctgtattggacattggtaaacatctatagatcaccacatatgctgcttgaatacacaaagcctgactagggcacccgttctgctaaggaagccattctgcaaaaaaattccatgtaatgtagtaatgtacaagtagaacacttctttcctttgaggtcacaacgaagctaacttaatcctctcccccccttgtgtcaggacaaaaaacgtgcaaataggctttgtagttgtagttcgtttttgctaacatgtatacggttgaccattatttttggagaagtatacatcaaagtttcattgtgaaagttatctcatgctactaaaatgtgttaagaaagttgcgaatgaagatgtaatccatgtcatcctaatcaaaatgtcttcagatatatcttgcattgtcttcagc

SEQ ID NO: 17151 - DNA, 2061 bp, Zea Mays
cagaagggatatgcttattagaaattcgttataaggcatttgatgaggtcgaaggcattgaggtcgcctggaatcaaatcaacatagatgaggtgatgcagtgtccagataatcttgataggctctacacagaagttcatcttctgaagtcactcaagcatgaaaatgttatgaagttttattattcatggattgatgaccagagtaagaaaattaatgtcatcacagagttgttcacgtctggaagcctcaggcattaccgtcagaaacatccacgtgttaacttgaaggcaataaagaattgggcaaggcagattcttcatggattggattacctgcatagccaccaacctccgattatccatagagacttgaagtgtgataatatttttgttaatggaaaccatggagaagttaagattggagatcttggactagctacagtaatgcaaacacctagggtgaggagtgttattggtaccccagaattcatggcacctgaactttatgatgaaaattatgatgagcgtgttgatatttactcatttggaatgtgtttgttggagatctttactcttgaatatccatacagtgaatgtacgaatccagctcagatttttaagaaagtatccacagtaagtgctccttcacttatttgtagaattgcaacactattttatctaaactaccacctaatatctgtagggtgttaaacctgctgcattggctagaatttctgatcttcaagtaaagcagtttattgagaaatgtttagttcctgcttctgagaggtcgtctgccaaagaacttctgcaagacacatttctttgtcctgacaatacacatgaacctgctgtcactaagtttatatctccagcacctaaaaaaacagtagatatctctctggcgtctttgcatatggatgttgacactttggaatctagccatactgattcaggcaaggaaaatggatctgttgctccacatacaccagttttggagttcacaagaaccaacaaaaatacagagctaaagctaaagggcgagaaacttgataacaactccgtgtcactggttttgcgaattgctgatttctctggttggagacctgtaaatgatgcagcagcgaactcgtataggcgatctgaaagtgaacttgcagtcaattcccatcagaacatctcaaagttggtacctgattatgcattaattgatggtgtgatgcgcccaaaagatgtgaatgcatcaactagttgccttgactctgtctcaagtgcaaccaacctaggaggatcacaaggttctgaaggttcagtcatttctgtacagcttgctgagagttccaaaagtgtgagtgactatggggccgaggattatggcactatggactgtggtgggtacaaagacggaatcagcacattagattgcagccatgttttagataatggatcgaggtcgattttccatatagatcaagcatcacctttcttggagttggccagctgtggttcatcaacttcaactgataaccaggatgtgatgaacggggagcttgtttttattgaagctcagtacaagcacttggttgatgagttgacaaggatgcgagaagaggctagggaaggagctcgaaaaaactggttgccagatacatgatgtttttgttcaaatttggcatttcctctaaacatcataaactatgttcgatttcatgtttgaagtgtgagaaatgttaataatctgttttagttaaagcattgatgtagtttgcaagtcacagcaaacttcgtgcccgtccccagatcaggtggtcgttctctcgttgagggcggagcaggaccagattttcccagagcacagaaccaccttaacactccctacaaaaaaaataattgtatgatcgttctcctgggagccattcctccgttcttccctcaattcatgtcgctgtatgaaagcagggtgatgataagacggggtgcagaattgcaggtttgacaaggtagtatgcgtttgggggcggtctgccgtactaggcataacgtcaatcaacgaatacaa

SEQ ID NO: 17152 - DNA, 1320 bp, Zea Mays
  misc_feature (1)..(2): n is a, c, g, or t
nnatcgttgagaagtattccaactccaacattgaaattcatactttcaatcagagccagtatcctcgcattgttaccgaggacttcttgccacttccaagcaaagggaaatctgggaaggatggctggtatcctccaggccatggtgatgtgttcccctctttgaataacagtggaaaactcgacatcttattggctcagggcaaggagtatgtcttcgttgctaactcagacaacttgggtgctatagtcgacatcaatcctgaaccatctgatcaataaccagaatgaatactgcatggaggttactccaaaaacattggctgatgttaaaggcggtactctcatctcttacgaaggaagagttcagcttttggagattgcccaagtacctgatgagcatttcttgcccaacaggtgggtgaaccttaaagctgtcaagagactagtagaggctgaggcacttaagatggaaattattccaaaccccaaggaagttgatggtgtgaaagtccttcaacttgaaactgcagctggtgcagctattcgtttctttgacaaagcgattggaattaatgttccccgctcaagatttctcccggtgaaggctacatctgatttattgcttgtgcagtctgatctttacaccttggttgatggctttgtcatccgcaatccatccagagcgaatccagctaacccttcgattgagcttggacctgagttcaagaaggttgccaatttccttgctcggttcaagtccatccccagcatcgtcgagcttgacagcttgaaggtttctggtgatgtctggtttggttctggaattacgctcaagggcaaggtgacaatcaccgccaagtctggagtgaagttggaggttccagatggagctgtatttgaaaacaaggatgtcaatggccctgaggatctttaagctatgcttgccgtcaccagtttttcccaaggatttgtcaataggagcagccaacccaaatcactcccactgagctctaccttttgtaattctcgtgccattccgctcccgctgtgagggtcctgtgagcccgctagagaatatgactgtaatcttctttggtgcgtctgcccttctgtttttgtgcgccagggacgtatattttgctgaaatgatactaccatagctttgcgtgccggaggtgctatgtggtgtttctgtgcgtttggttgcaatgataggacgggatgagatgagaccctcaaattaggttgtttggttctgggtcaaagattgagacaagaatatcctagtattgtttcatgttgtcctttaaaattggag

SEQ ID NO: 17153 - DNA, 667 bp, Zea Mays
ggtttccttgaagatagctgcctagcaagacagttccgatgagcctgattgtgatcttaccccaagtgattcagacgcgcctggaactttttctgaagagcatggaacaagttgtagcggcgagaacagattggaaattcctccctcggatggcaatggagtggttatggcaccgctcgaatctgggatcaagacgttttccatggaagatgatgataacgatgatggctcgtcagaggatgctgatgaagaagaagatgctgagctcacgaaacaattgaacaagcaaaggagaaaagcaatcgcagctgcccatgggcggagaagaccaacgtcatccaggaacgcctacaaggacaagggtaagggcaccatgaactccaagatgcagaggcaggcgtgcaactggtgatggttgagtgcctcttgcggcagtaaatagattaggcgcagggttttgtgtggttgtataaccgtgggaccctttactagaatcaactccggctttatatttttactaggtgagtaatcgtgcgtcgcaacgagaacacataatattacgagaacttatatataaaatgtcgcaacgaaaacatataatattatgagaacttatatacaaaatgtgtgttatactgttatgaaaaaagatttcataactcatttg

SEQ ID NO: 17154 - DNA, 4225 bp, Zea Mays
accccagcatatcctccgtcggtgctcaggaccgacagtgagcactcactgccaagcgggccctgcacggcccccagttcacccttcttccacctcccgcctcactggcacactctccccgacacaactcggcttaaactaatccgaacccatcccaccagacgcgcgcaaattaactagaatcaaaatcgtctcgctgctgcaataatcttttatcaattcttaatccctcgcgtcgaaagcgacagcggaaccaactcacgttgccgcggcttcctccatcggtgcggtgccctgtccttttctctcctccacctccctagtccctcctcccccccgcatacatagctactactagtagcaccacgctcgcagcgggagatgcggtgctgatccgtgcccctgctcggatctcgggagtggtgccgacttgtgtcggctcggctctgcctaggccagctccttgtcggttctgggcgagctcgcctgccatggagggcgacgcggacggcgtgaagtcggggaggcgcgggggagggcaggtgtgccagatctgcggcgatggcgtgggcactacggcggagggagacgtcttcaccgcctgcgacgtctgcgggttcccggtgtgccgcccctgctacgagtacgagcgcaaggacggcacacaagcgtgcccccagtgcaaaaacaagtacaagcgccacaaggggagtccagcgatccgaggggaggaaggagacgatactgatgccgatgatgctagcgacttcaactaccctgcatctggcaatgacgaccagaagcagaagattgctgacaggatgcgcagctggcgcatgaatgctgggggcagcggggatgttggccgccccaagtatgacagtggtgagatcgggcttaccaagtacgacagtggtgagatccctcggggatacatcccgtcagtcactaacagccagatttcgggagaaatccctggtgcttcccctgaccatcatatgatgtctcctactgggaacattggcaggcgcgccccatttccctatatgaatcattcatcaaatccgtcgagggaattctctggtagcgttgggaatgttgcctggaaagagagggttgatggctggaaaatgaagcaggacaagggaacaattcccatgacgaatggcacaagcattgctccctctgagggccggggtgttggtgatattgatgcatcaactgattacaacatggaagatgccttattaaacgatgaaactcgccagcctctatctaggaaagttccacttccttcctccaggataaatccatacaggatggtcattgtgctacgattgattgttctaagcatcttcttgcactaccggatcacaaatcctgtgcgtaatgcatacccactgtggcttctatctgttatatgtgagatctggtttgctctttcctggatattggatcagtttccaaagtggtttccaatcaaccgcgagacttaccttgatagactcgcattaaggtatgaccgggaaggtgagccatctcagttggctgctgttgacatttttgtcagtactgtcgacccaatgaaggagcctcctcttgtcactgccaataccgtgctatccattctcgctgtggactatcctgtggataaggtctcttgctatgtatctgatgatggagctgctatgctgacatttgatgcactagctgagacttcagagtttgctagaaaatgggtgccatttgttaagaagtacaacattgaacctagagctcctgaatggtacttctcccagaaaattgattacttgaaggacaaagtgcacccttcatttgttaaagaccgccgggccatgaagagagaatatgaagaattcaaaattagggtaaatggccttgttgctaaggcacaaaaagtccctgaggaaggatggatcatgcaagatggcacaccatggccaggaaacaataccagggaccatcctggaatgattcagtggtggtcttgatactgagggtaatgagctaccccgtttggtctatgtttctcgtgaaaaacgtcctggattccagcatcacaagaaagctggtgccatgaatgctcttgtccgcgtctcagctgtgcttaccaatggacaatacatgttgaatcttgattgtgatcactacatcaacaacagtaaggctctcagggaagctatgtgcttccttatggatcctaacctaggaaggagtgtctgctatgttcagtttccccagaggttcgatggtattgataggaatgatcgatatgccaacaggaacaccgtgtttttcgatattaacttgagaggtcttgatggcatccaaggaccagtttatgtgggcactggctgtgttttcaacagaacagctctatatggttatgagcccccaattaagcaaaagaagggtggtttcttgtcatcactatgtggtggcaggaagaagggaagcaaatcaaagaagggctcagacaagaaaaagtcacagaagcatgtggacagttctgtgccagtattcaatcttgaagatatagaggagggagttgaaggcgctggatttgatgatgagaaatcacttcttatgtctcaaatgagcttggagaagagatttggccaatctgcagcttttgttgcgtccactctgatggaatatggtggtgttcctcagtctgcgactccagaatctcttctgaaagaagctatccatgtcataagttgtggctacgaggacaagactgaatggggaactgagattgggtggatctatggttctgtgacggaagatattctcactgggttcaagatgcacgcacgaggctggcggtcgatctactgcatgcctaagcggccggccttcaagggatcggctcccatcaatctctcagaccgtctgaaccaggtgctccggtgggctctcggttcagtggaaatccttttcagccggcattgccccctatggtacggctacggaggacgcctgaagttcttggagagattcgcctacatcaacaccaccatctacccgctcacgtccctcccgctcctcatttactgtatcctgcctgccatctgcctgctcacggggaagttcatcatcccagagatcagcaacttcgctagtatctggttcatctctctcttcatctcgatcttcgccacgggtatcctggagatgaggtggagcggcgtgggcatcgacgagtggtggaggaacgagcagttctgggtcatcggaggcatctccgcccacctcttcgccgtcttccagggcctcctcaaggtgcttgccggcatcgacaccaacttcaccgtcacctccaaggcctcggatgaagacggcgacttcgcggagctgtacatgttcaagtggacgacacttctgatcccgcccaccaccatcctgatcatcaacctggtcggcgttgttgccggcatctcctacgccatcaacagcgggtaccagtcgtggggtccgctcttcggcaagctcttcttcgccttctgggtgatcgttcacctgtacccgttcctcaagggtctcatgggtcggcagaaccgcaccccgaccatcgtggttgtctgggcgatcctgctggcgtcgatcttctccttgctgtgggttcgcatcgatccgttcaccacccgcgtcactggcccggatactcgaacgtgtggcatcaactgctagggaggtggaaggtttgtagaaacagagagataccacgaatgtgccgctgccacaaattgtctgttagtaagttatataggcaggtggcgttatttacagctacgtacacacaaggggatactccgtttatcactggtgtgcattcttttgttgatataagttactatatatacgtattgcttctactttgtggagagtggctgacaggaccagttttgtaatgttatgaacagcaaagaaataagttagtttccattctttcaaatgagcacacacataggacatgtttggttcgacatttttaccaatgattccaatgcataacactattttatgttagtaagttatccagttgcattaccgttcctaaactccttgttgaaacaaacaacaccataatctcattgtaggtgttgatgcaccttgttaaggtagtgtttggtttcggagtatggtgggacggagccgctccgatcctaatttgttgttatttggattggtttcatatagg

SEQ ID NO: 17155 - DNA, 936 bp, Zea Mays
ggccaattccttttttcagccacttattggtacttctacaagctaaagtagatttccagaacagtgctttcccctgtgggccaggcgtactgaacaggcacaattttagtgactttgttaaaccagcatcaagtaaaggaaagtcaattgatgatattcatttgacagaggatgaactggggttgtatttggatcttgccccatttttaaatccttcaccatacatagtgccagaggacatgtcgttggcgaaggtgtacaatctcttccgtcaacttggattgagacatatatttgttgttcctaggccttctcgtgttgtaggattgataaccagaaaagatttattacttgaggaggataacaacaatgtgatgccggagctccaatcgacgagtgtaaggggcttgctgaacggcaaaatgctcgggggtaatatacatctggaacgtcctcttcttgacaacctagttattgaatagacacgtagcagcatgtatgtcaaaataattttgatagctagcagttaaccttgcactgcatgttgggacatggcccatgggtattatacttcacatgaatgatgaagcagcagtgagcggataatgcagcatggttttggattctgccgactgttgcgcatggatgttggcgttgcgcatcattttttgctccgtcagcagtggctagggaggcgattccccggtgccgtgtgtttagattaggtgattgtaacttacaaaggcgtccatacatacacaccatccatgtatcccacggtaaatttcgaagactgtatgtataagtacatatttgttatacgatggtaaagacaaaagctatgtaggatttgcgtgctctcatgaaactatgatacgtggctataattacttccggttcccgctgaaatcgctagaattttccattgactacatt

SEQ ID NO: 17156 - DNA, 213 bp, Zea Mays
gatcgctgtgaaaaaaaatattgtgatcgaaaacgaggtttaatcttttcccttttttcagttttatatttatgtgtgctttttttaatatcggagctgtttgagtggatgtgatggatgcctatatatatgattgtttggcatataaccatccacgctaaatgatgttgctatatgtagattactatatactagtatatatatcgatgcttg

SEQ ID NO: 17157 - DNA, 3540 bp, Zea Mays
gggaggctctggcgggagtgtgttacgggcttacggccgcctcgtgctggtgacaggcgcggcgcgagatccgggctggaagggctggcgggtcccgttggtggcgccgtggcgtcggcgtgatctgagatgagattggacccggctgcgcggtattcgctgcggaggtagacggccatgacgaccaacaccaagcgcgcctacaagctccaggagtttgtggcgcactcgtccaatgttaactgcctcaagattgggaggaagacctcgcgggttcttgtcacaggaggagaggaccataaggtcaatctttgggctattgggaagcccaattcaatactgagcttatcaggtcacacaagtgctgtggagtcggttggttttgattccacggaagtgtttgtggctgcaggagcagccagtggaacaataaagctatgggatttggaggaggcaaagattgtccgcactcttactggacatagatcaaactgcatgtcagttgattttcatccgtttggggaattctttgcctctgggtcactggacactaatctgaagatatgggatataagaaggaagaattgcatccatacatacaaaggtcacacacgaggggtgaacactattagatttacacccgatgggcggtgggttgtgtctggtggcgaagataatatagtaaagctctgggatctgacagctggaaagttattacatgaattcaagtgtcatgagggtcagatccagtgcatagatttccacccccacgagttccttctggcaacaggttcagctgataaaactgtcaaattctgggatttggagacatttgaattgattggatctacaggacctgagacaacaggtgtccgatccatgacattcaatcctgatggaagatctttgttatgtgggctgcacgaaagcttaaaggttttctcttgggagccaataagatgccatgatactgtggacgtgggatggtctagacttgccgatttgaatgtccatgagggaaaacttcttggttgttctttcaatcaaagttgtgttggaatatgggttgttgatctgacgcgtcttgagccatatacaatgggtacttcaacaaaagtaaatggtcattctgaattgaagactgtttctagcggcactttgcctttacaaaatgatagtggttcaagggctaacatagggcgatcatcagtcttgcaaaatacagagaacaaccttaaaactacttcaggaagactgtcggcttcacagaactcagattctgcacccaaagaaactaactcggcaccttcaagcgggttgatcccaagcacaccacatagggctggagttggctcccataatagatctgttggaaattcagcttttcaatctggtggtaccaccttgaagagaagttcgttgaggaataacagtgcctctaatgttcacaatttcagtaaagctgatgtagtgcctgtcattgttcccagaactagctcaggaggggagttggctactgattctagaagcgatgctgctgatgtggcacccgttcttccgaaggtaaccagaagggttgaacctgctaccgattctagaaaagaaagtaatgatgtggaacttgttgttcctagagcaagctcaagaatggaaatagccgatttagcacccatttctagttccaagtcaggcagaaggttggagtctgcccctgattcgaaagaagaaagtgctgatacagcacctgttgttgtttccaatcccagggctaatgtaagaatggaaatagtctctgattctgcgcccgctctttcaaagtcaaacagaaagctagattctggcactaactcaaagaaagaaagtgctgatgcagtcattgtacccagaacaaattctagaatggaaatgatttctgattctaggagagaaccctctgctggaagaatatcaccattcagaatccagtcaagatatgctgagccacggaagctagcccatgccagaactgattcaaacaaagttgatagcagaagtaaaattactgaaacagaagacttcaattgccaaatatttcttccccgtagaaacagtgtttttcaaacaataagttctgaagaacctcgtgaagatgtaaagtgtggtccagttgacagggtgggattttcaaattcatcagaaccaaatgcgagtgtccgcaatgagaattatgttcctagaatgcgcaaaccaggagacaactgctatatcgaagtttcaagagcaggaagagcaaggtcaagtgtctctaattgggaagggagggatcagccccctagtcatgaagaaccaacaacaagcagttctacactggctcctaccggccatccatattcatctagaggaagcaatcaagcttctgaagctccaatcatagctagtgatgaagatgttctatctcttatcatggagcgacatgatctatttttaagctcaactaagtctcggctgatgaaattgcagattattcatcaaatgtgggaaagaaatgacatcaggggtgtgctctctgcgatggacaggatgggtgatcatgctgtctgtgctgatatggctagcgttctcatggagaaaagtgaaacaatcacactagatttatgtacctctatcctgcctgtcgtcaccgatcttctggagagcaaaattgacagacacttagtcgtcgcattggaattgttggtgaagcttgtaaggacttttggtccaatgatacattcaacagtatcgtcaggtccttgtgttggtgtagaccttgaggcagagcaaaggagggagcgctgcaacttatgcttcatcgaattggagaaggccaaaaataagcttccatctctaacaagaagaaaaggggcggttgcaaatgctgcacaagaacttgctcttgtcttccaggaaatcatgagttgactgacgacacactagatatacacaattagatgggacatgcttcggcctctgatggcaacaagattggatatcagctgccatggagggtgctagctattcagtcttagcgacgtcatcaagctccaaggccacagcaccaacaaatgcattttgttgctgctgttcgtgccttttgtacacatgctaacacataatccatgtcatttgtgaagagaagctgccatggacagtgacttcatccacaatattatgtggatggcggcagctggagatgttaggccccgatcgaatggtgatcagcagatgagacttgcttgggcttttctggcactcgtagttctttgctgtctgtaacatctttctcatgtaccgttatcatgtgcatgtgcaacagtcaagtggttgcatttggtagtttatggttgtgctgtgtgttggtcgatttagtggtcgttgatgagtgaagcgagccatgtacatcatttttttttaagatttgatatcttctttttccttgatgactcctctcgttatacttgagtgaaaatgatatcttgtgtacttgccttgacagcttttcggaaattcccttttgtctgg

SEQ ID NO: 17158 - DNA, 1896 bp, Zea Mays
aagacggccaacgtgcatgacgctaccatcgtaacagagcaccctgttgtcaggattggcgttgtcttcagtgggaggcaatcccccggagggcacaatgttatatggggcctctatgatgttgtaaaggctcacaactccaacagcaaaattattggttttcttggaggaaccgatggattatttgcacagaaaactattgaaatcactgatgaagctcttccatcctataaaaatcaaggtggttatgacatgcttggtcgtacaagggatcagatcagaacaactgagcaggtaaaggcaacaataggtacatgtcaagcattgaagttggacgctcttgttataattggaggtgtcacatccaacacggatgctgctcagcttgctgagacatttgctcagttgaaatgtccaacaaaggtagttggtgttcctgtaactctaaatggagatctcaagaaccaatttgttgaaacaacagttggttttgataccatatgcaaggtgaactcgcagttaataagcaatgcatgcatagatgccctttctgctgaaaagtattactactttattcggatgatgggacggaaagcatctcatgtagcattggaatgtgctcttcagtcacatccaaatatggttatcctaggcgaggaggtttctgtgtcaaaacttacaatatttgatattacaaagcagatatgtgatgctgtgcaggcaagagctgaaaaagacaaatatcatggagttgtacttattcctgagggccttgttgagagtattcctgaactgtatgctttgctccaggaaattcatggactgcataataaaggtgtttctgttgagaacatctcttctcatctttcaccttgggcatctgcactatttgaatttttgcctccatttattagaaagcagctgcttctccatcctggatctgacgattcagctcaactgtcccagattgaaattgagaagcttctagcacaattggttgagaccgaaatggacaaacgcctaaaggaaggcacttataatggaaagaagttcaatgctatctgccacttttttggataccaggccaggggtgccctgccttctaaatttgattgcgattatggctacgttcttggacatgtatgttatcacatcgtagcggctggtttgaacggctacatggccactgtgaccaaccttaagagtccagtaaacaaatggaaatgtggtgctgctcccattacatctatgatgactgtgaagagatggtcacgtggtgctgccaccagtcaaatcggtaagcctgctgtccacatggcgagtgttgacttaaaaggaaaagcatatgagttgttgagacaaaattcttctagcttcatgatggaagacatctaccgaaaccctgggccacttcagttcgaagggtcaggtgctgatacaaagcctatttcattgtgcgttgaagatcaggattacatgggaagaatcaagaagttgcaggagtatttggagaaggtgaaaagcattgtgaagcccgggtgctcgcaggatgtccttaaagcagcggtaagcgccatggcttctgtgacggagatgttgaccatcatgtcttccctttcatttagtggacaggcgaccatctgaaggccaagctgaagatgtcatatgctgttgcgctctcatgtcccgaacatatttgtgtttttttgggaaagaaacatacaatttttgttctcattctagtatcgtctacctatgtcaaactacaatatgataggacccttgctaaataattgtttcgtttgctggtatttctcatctttgatgctaggcatgttgaaaagttgattgagatgagttaaaataagagcataatttgaactggttacaattaca

SEQ ID NO: 17159 - DNA, 1388 bp, Zea Mays
aagacacttggttatatacttccagtcttccacatagttttaatgtttttttttttgtaaaattttaaatgtttgaaagtgaagcagattgaattccatctttgcttatgcatcaagttatggagaagtgtctgtttcagctttctgaaggggtagtagtattttgaaactttcaggaaattcacttgcatggtaatgggattgggaatgagggaatacgtgagttgatgtctgcattatctgctcacaaagggaagatcacagttgtggatattggcaacaacaacattagcccggaaggtttacatcctgtagccgagttcctcaaaaggacaaagtccttacagtggttcagtctctacatgaacgatattagtgatgagggagctgaaaaggttgctgaggctctgaaagataacaaaacaatttctaccatagacttgggtggcaataacattcactccaaagctgttagtgcagtagcggaaactttgaaggataatgcagtgctgacaacactggatttgagctacaatccaattggatcagacggagtaaaggctttgtgcgatgtcctcaagttccatgggaagatccaaacccttaagctcggctggtgccaggcatggaaggtgcagagtgtattgccgactgtctcaagtacaacacaacgttatcgacattggatctgcgggcaaacgggcttggaaacgatggtgctatatgcttggcgcgaagtttcaagataatcaacgaatcgttgacgtcccttgacctgggtttcaatgagattcgagacgacggagcattcgcattggcacaggcgctcaaggctaacgaggatctggcggtcacgtcattaaatctcgcaaacaacttcttcacgaaattcggacaggtcgctctttctgaggcgcgggaccatgtgtacgagatgaccgaacgggagatagacatttatttttaggggggtaccggttcccctgtgcacacagttagcacaggacatgaccgatgcttgtttgtcgagtaggttgaagaataaggtcgcgcggtagagcgatggtttatcctttgtataggaaaattttggtgggttagttaaatatttttagttactatgtaggttagccattcgatcaggtgtctatatgcaagttttgctggaaacgtcggtgtcgttttgaaccattcgtattattggttgaaaatggaatggatatgacgggcatcacatgcaaactgattcttttttgtggaggacttcactgatgtggtggtgtgtgttcctcggaagttgaaatgtattctcatgccatccatgtgggatggtgttggtaacctcagacctgtcgtaggctgttgtgaatgtcacacaaagatttcgc

SEQ ID NO: 17160 - DNA, 1328 bp, Zea Mays
ggcgggcccacacctgtgccgttataaagaaacgtaacacgtaggcagacggcgtcccgctggtgtggtggcgtcctttttttccgccgggagataaaccgaccggacccctgactgcgacccgcagctgctcctgcttccgatccgaacttctctcgcccgccggttcttcgcgagcaattcttataaagcatcatcatcaccacttgtgatgggtggaagccagtacgatgatgaatgggtgttgcccagtgccgatatcactcttgttcttgttgggaaacttggctatggaaagagtgcaactggaaatagcatccttggacgggaagcatttgtatcagaatattcacattctggtgttactaatacttgtcagctgggaagcactaccctgatggacggccggaccatcaatgttattgatacaccagggttatttgatatgagcattgcatcagacgatgctggtaaagagattgttaaatgtatgaacatggctaaagatgggatacatgcagttctaatggtttttagtggcacatctcggttttctcgagaggatgcaagtacaattgagactattaaggtcttttttggagaaaagattgttgaccacatggttttagtttttacttatggtgatctagttggtgaatctaagttgaagaacatgctcaatgatgcgccagagtatttgcaggttattttgctgccataatagattgacttctcgcttctcttatatcacttagtaatatggcctttagtcaagttgttaatatatatatggttattgtgaatacagaatgttgttgagctatgccaaaacagagttgtcgtcttcgataacaggaccaaggaccgaaggctccaagcgcagcaacttgacaaattgctctatgtagtggactcggtttgtgcaaacaatggaggaaaaccatttacagatcaaatgttcactcgcatcaaggaggtgcatgatagggaaaaagaggtgcataccttgggatattcagatgagcagatatctgagttgaaggaggagattcatagaactagggatgaacagcttgcacagataaccagcatggtcgaggaaaagctaaaccgcactgtggagaagctgcaacagcagctcatggaggaacagaacgcaaggctggaggccgagaaggtggcgcatgaagctatgcggaaatcagaagcgcagatccaggagctgaaggagagactcgagaaggctcgactggaaaacgaggagttccggaggatggcgcagagcagatgagtaagtaatcggatctctccatggtgttgcgtaattc

SEQ ID NO: 17161 - DNA, 2882 bp, Zea Mays
atcagtttacacaaaacgcaagatcgattatccggtcgcctcccgggccgggggcctttaactcgagtcgctaatccgtttccttgtatcgccccgtctccgacctcgctcgccgccatggatggttcgaaggggagcgtaggtggcggggacgggaccgggcccgaaaagccaagcgccgattcgaaccctagccttgacccgccccaacctaccgcggcggctgtcgaagccacagatgacggtgcggccgcggctgcggccgaggcggccaggcggcccttcacggccctcagccaagaggaagctgacctcgccctcgcccgcgtcctgcaggagcaggagcgggcgtacatgttgcttcggatgaacgggggcggtggcgagggcagcgactacgggagctctgatgaagggagctacgaatatgacgaagagggagaggaggactacgaagaggaactggagcaccgcctccgcgtccaccaccacgagcacccctcgggcgatggtgagggagagggcgggggcgagggcgagggcgccgaggggagcgactacgacgaagagttcgaggaggacgaagaaggggagccggaggtagatcccgcggagtttgaggacgatgaggcttatgcgcgtgcgctgcaggatgctgaggagcgtgaggtcgccgcacggcttatggctctcgctggtctcagcgattggcgaacagtggaggtggagcatgaggaggatcatgcgaatgatccacaggaggcatggcaagaggtcgatccagatgaatactcttatgaggagctagtcgcattgggtgaagtagttggcacagaaaacagaggtctctctgctgatacacttggttctttaccttcagtaacatacaagctgcaacatgttcaggatggcaacacagagcaatgcgtaatttgccgtgtggaattggaggagggtgaatctttgattgcactcccctgcaagcacttataccatcctgaatgcataaaccagtggctgcaaataaataaggtatgatggaccttcttaagcttcattgaatggctagaaacttcatttcattaactacttggtccttaaatactattctgattctgtgaagtatcccagactgtcacacatgcatgtacctgatgggagaatgttttcatcacaactagtctgtttatactatgtttagtaacttctagtcaaaataaaaagcttaagatttttctgtgggctgctaggcaggcatggtttgtcaactgatgttcttattctagttatgcagttgtatttagttcatcatttttctcttaaaaaaactagttgcatataaaacatcgaatgctaatggtattgaggtccgcaataacagggcatcagtctctacattttaagtaagaagattctgttatttgcttgacatagtccctagatttgtaatcgcggtcaagatatcttaggctgttacgttctatcagactgacattgaaccttatagttgtaatggtgcctacgattttctgtcatggtctagtgatgttttggttagcttatgttctgtcatgttgacatgcggaatcatgtaattttcttgtcgcggtaataaaatttgggcacaccatgtggtgggagaaaaggaagattgaaagagcaaatcaataaaccttggaagcaggtatgctgtattcaccaatggacacttggggatatattatctaggttttgcatgatctttatacataaaatacctctaatttttgtacatccacattaatcttgggtagatttggaagttagttaactatatccgtactctctttgaatataagagtcgttcagcaaccttttgttcttaaatcagtccagtatattaaagctttaatgtctattagcgttgtagtattagtagcatcattattgcatgcgactgttttctctttatttaatcagtattgtgatactcttaagttgaccaagaaaacttagtgccttcaaaagtttatcaatggaggctggcaaaaccgctgtaattgctgacacaactgtagtcaggtcaaatgaagtctgatgatggtctgcttgactcctgttatcttaggcagtgtttggttccggagacggctgggatagaatggctccatgccagagagcgtccgtccgggaaattttggggagctggatcattcagcatttgagcataattttccttttttagagccactctgtcctatatggaaccgatccaaacaacaacttactttctgccacagtgactactggctagctataggctatagttgtattcagtattcatattgtcagtccgtttcagcatttctatcatggcagattatgctatatggatccttatcttgcaaagtaataggttttatctgtattattcttagtatatatttcagcatttctgctggcggatcatgccatgtcaacccctaccttgaaaagtatgccctatgtgcagcgcagaagtatcaacctcgggtaacaaggagccatgactgctcctccgatggctatcttgggaacttggtgggaataactagcggcatcactgcagcatctgtattgtcgaaacaaaagcagaaaaaacggtctacatacatgcaaggagatcaggatataatcctcttgtcagtctaaagttctgcccttggttccctgctaactggattgattggccttgccgcttattatctcagttccctatgaacgccttatggctgttgtatgatccataaattatgctaattatattatattgttagtcattctttttactgatcgcatgatcatcttatatatttgcttgtcaactgattttagtttttttcttcttaattctaatcccttcg

SEQ ID NO: 17162 - DNA, 2818 bp, Zea Mays
cgccccccagccgccaccgccagttcttccattcctccgcgctctttgagccttcgtctcccagtctcctcaactcaggtacgttgtccgcccgccgcacaccctcgccactgttcatcgttgcacgctggtgcttccctcatctccacagaacatctgattcggccagttgagttcctctcggacgctggttgtctccttcgacctccgtttccttgtcatttctgtgcctgacagcaacccgcgctcccgccgcatctattcatggcggagccgacccccaagtcgaagcgcaccaagaaagcgaagaagccctcggcccgggaaggtgatggagaggacatggatacgctcaagtctgacgtcgccacattcgcctcctccctcggcctcctccctggcgctggcgactccaacggcggcttcgatgactccgacttccgcaagtccggccccatgtataaatcctcaaaatttccttccaaacaaccccatcaaaaacctgataacacggcaaacccccatctaaaccctagacctaccaagaagccacaccctctcgagctacgtgactcctatgctgccaccaaacctggtgctgtcaacactaattaccccctgatgaaggcggcagcactctcagggcagtggtacactgatgctgatgagctggaggcgagggtcctaggcggtcgtaagcaggtgcctccagctgtggggcttcaggagatgcagggaatagtggagagaaaacgagagctggcagagaagctcatgttgcagtatgcgagggaatacgatgccgtgaggcgagggcatggtgacctgaagctcctggacatatcagcaaagtctggtacatcagctgacaaggtgtcagcatttacatgtcttgtcgaggacaatccaattgcaaacatgaaggcactcgattccctccttggtatgataacatcaaaagttggtaagaggtatgcgttcacaggattcgatgcaattaaggagttatttctcatgaggttattgcctgaccgtaagctgaaaagtcttatccaacgcccgctagacattttacctgaaacaaaagatgggtactcacttctgctcttctggcattgggaggactgcttaaaacagagatacgaaaggtttgttatggcattggaggatgcggtaaaagatatgctgccaaatcttaaggacaaagcaatgaaggtggctcttcaacggcctcctcaatatgcttgcggatgccttttcattctgtcagaagtccttaaggcaaagccaccattatgggggattgtgctccagaatgaatctgttgatgatggtgatgaacactttgaagacattttagagattcccgaggactcttctgttgcctcagcagtgctacataaacataatgaaaaagtagctgcacatgagaaacacaaccttgatgctgctgatggaattgatagtgtaaaacaagtaaatttggtagatgagaacaatgcatcaactgactcgtccagacaacatgcattctatgatccacgacacagagagccttcttactgcaatgcagatcgtgtcagttggtgggagttaacagtattggcttcacatgtgcacccttcagtttctactatggctagaacattgctatctggcaacaatattgtttacagtggtgatccgctgacagacctatcacttcctgctttccttgacaaattcatggaaaagaaaccaaaagggaaccgcatagctgaaggaagatggcatggtggatcacaaattgctccggctaaaaagcttaatctgaatcatcatctcatcggagaggagcttctagaattggcagaaaatgaagtgcctcctgaagatattgttttccaccgtttctatttgaacaagaccggcactgttaagcgtaagacaaagcagaaggactcagttcttgatgaagatgcgggggaactcttagctgataatgacgctgatgaggctagtgacgagagtggagatgagatactggatctgggagatgggttggcagatgatggagaatatgactatgacgaccttgactcaaatgcatttgaagaggaaaaagatttacttagagatgacagtgatgtggaatttgatgacgtttcagatgatactgcatctggggatgaagggtcagaaaatgacgatgacattcctattctcgcgggcgattcagatggcaacttaagtgatgacgagatggttgatgctggtaagggcggtgtctcttacacaaagaaaaggagggcagggaagaagagtgggttgtctccatttgcaagcctggatgattatgagcacctaatggttggggatgctgatgcaacaacagcaaagcggaagcacatggcaacagggagagctggtggtgagaagaaaccaaagttgagaccacgaaagaaaaggtcgcggagttcagaatgagaaacatgccttttacccttaactcttttaaaatgttcaccacaatggtgttcattacatttttgtacttctggaaggcacaggattgggtaacgctattgttgagccgagaatgtattgagattagattatacaggtgctctcatatagtagtccttatcccacacaacgcatttatacgggctaagtttaagaccaactcaaagagttgtttttcttattgagtcaaattttagattttctgagtaagaaattattctccaacaggtattctatctagagttgtagattagctagcaaaggcatatcgtcctttccacttgctaagccagtcctaattttcctgtctcag

SEQ ID NO: 17163 - DNA, 2579 bp, Zea Mays
gtaaatacagaaatgatgatagctcagaaatggacaatctttttaagcggaccatgccatggtttggtgaggaggttggcaagagagatctgagtactcaaaacggtttagttcctggattaagtttggttcagtggatgaatatgcaacacaacccctctcttgccaacacggttatgcaaccggaattgctaaattcgttagctggaaaacctgtacaaactctggctgcggctgatctatctaggcaaattagcttccagccccagttcctgcaacaaaataacatccagttcaacacttcgctgctacctccccaaaaccagcagaccgaacagttagcaaatgtaatagctacaccaaaccaattgggaagtgttatagtaccacaaaaggcagttcaaaattccagttctgaacagaaacagaatctggttacacaaccactgcaagtcagccaaccaatggttagtgtggcacagcctcaacttgtccatactcaactccagcaacctcaagtagttctccaggctcagcctcagcaacctcaagtcattgtccaagctcaactacaacaacagcaacctctggttcaaaatcacaccaccatacaaagtggccttcaacaaatccagcttctgcagcaacagcaagttcagcagtcagtgcaggaacaacagcaaataaagatacagccttttcaggtacctaatgatgccaacatggtaacacagttatctgatcagatgaaaatacaactattgaaggctctacagccacagcagcctctggtcatggaacagcagaaaatgatatttgatttgcagcaacaagcagtaaattctcagtcaactgctcagcagtgctcacaggtagctacccaagtggttggtttgcatagcagtagcactaatcagtacccgacgcagcaaaagactcaacctctcaaaacatttcaagattttcctgggaatgctgtttctattgtaaaaccagaaattgtcacctccgtgggtgctcgctctttgcatgtgcctggtggagtgcagtcaatgaagatggatgaagttccctcttcttcaacatcgccatccacaaacaacaatcctgttattttgcgatcaactccaagtagctccaagaaccaatgtttacctactgcagcaaaggctcctcagtcatctgttgtattgggttctacacttgaacagggtatgaagccttgtgacagtacacaacacccaatggtgattcccaagctggctgaagaaaggccagctactggacaagactacatgaacagcactcagctggattatttggatacgtcatcttcagcgacttcagtttgcctttcacaggctgacggatcgctgcaacaaagttttccaccttcatccttcaatcagcatcaaccgttgagggaagcagttccagatagcgagtttgaggttacagatgcaggaaataactttctatttggggcaaatattgatggccatatggagcctcttaacgaagacgatttgcttggaactgccttcgaagctgacaagtacatggaacagatgccaggaaacggcatctctaactacatttcatcaaaggattctcagcaagagttatcatcttcaatgatctcacatccatttggcgttgctgatatcgcgttcaattccatagattcgtcgatcaatgatatccaattcttaaacagaaattcccgggctccaggtcctgttcaacaacgtatgcgaacatacaccaaggtgcacaagcgtggcgctgttggaagatctatcgacatcaacagatattctggttacgatgaactgaagcatgacgttgcccgtatgtttggaattgaggggcagctcagcgaccaaaacagagttggctggaaactggtttacgaagatcacgagaaggatgtcctattagttggtgatgacccatgggaggacttcgtgaactgcgtgcggtgcatcaggattctttcgccgcaggaagagaggcaaatgaggctggccagcgactacggagacagctttcttggcaaccaagcgtgtagcagctcggacgggggtcgtccgtggagggtcaccggcgactagaaatagcaggctatgcctgagcacaaatgtttgatataatccgtcccacgatagcaagaaaatgatacgcgatttctgagcacaaacttttgcactcagatgatcgtgcaaacagttagcattttaagaaaaatgttgcagttcaatgtaactgcaggaatgtctctgatgtagcctcttcgatgtggcagccttaacaatcgatgtgctacagttactctgcctatgtatttactatactaccttggccttgtatatccttttgatgtaggcgcagctggatgctgaaccccccggaggctgttagggacaattacaaccgttcataatttgccacagatacaaatctgagtggacaaatggattcagtttacgtatgcttcattgtttgtgagcctaccttgatggccttttattttgttcagttccactaaaaaacgccaggtggacgtatgcagatttggg

SEQ ID NO: 17164 - DNA, 787 bp, Zea Mays
gccctagggcgtggaccgtccggccgtcaggcagggaacccgagctcctgcaccaggtcgcggaccgtccggcccttcgcggacaggaggaagaggaagaagaagcggcagcgagcgaggatgccgtgcctgaacgtgtcgaccaacgtgaacctggagggggtggacacctccgccatcctcgccgaagcctccaagtccgtcgccaacatcatcggcaagcccgaggcctacgtgatggttgttctcaagggttcggtgcctatggcatttggaggtacccaggagccagcagcttacggtgagctggtttccatcggaggcctgaaccctgatgtgaacaagaagcttagtgctggcatcgcttctatcctggagtcaaagctgtctgttcccaagtcacgcttctacctcaagttctatgactcgaagcgctcggacttcggttggaacggctccaccttctagacttgaggtctgcagctgaaataaaagaaattcgtggaatcatggtacctaatgcccatggctattgcctattaaggacaatgtcataagatgtgtcttaatcggtgctgaactgagaaacagtaactgttgtcgtggaactggaagtggggtgctggcgtgtcagagtgcttgcttcctacctagcatagcatgcctgtgctatcttgttattggtattggcttgatatcagtctatattatcatttattatggttggaaccaacaaaaaaaaactgattttagtgctggtttttttttttggcaagaagaaaacgtg

SEQ ID NO: 17165 - DNA, 2876 bp, Zea Mays
aggcggcccaatcaggttccgggggatatggaccacaaacaatcgaggagaaacagaagctttatacattattgaggagcctaaatgttaatggtggattagcatctgcatctatatccgagccctatacttcaacaggacagagctttgctggtggtgctcctgtagatggattttattcacctgaacttagaggtgaatttggggctggccttttggatcttcatgcaatggatgacagcgagcttctttctgagaatgctgcatcagaaccatttgagccttcgccttttatgccaaaagaaatggatgatgacgactacgatgtaatagcagaaaaccaacaaggtctagtagacaaccagagtgccttcaccaacgaaaaagaaaacactgtggtcagtgcaagagaaagtaatgtagcaaagattaaagtcgtggtaaggaaaagacctctgaacaaaaaggaggtatctcgaaaagaggaagacatcatagatgtacacaattctcaattcttaactgtccatgagcctaaactaaaggtggatttgacagcttatgtggaaaagcatgatttctgctttgacactgtcttgggcgagaatgtaactaatgatgaggtgtaccgtgagactgtggagcctattataccattaattttccaaaggacaaaagcgacatgctttgcatatggccaaacaggcagtggcaagacctatacaatgcaacccctacctcttagagctgcacatgatatggtttgtcttttacatcaacctatgtatcggaatcaacatttcaagttatggcttagctactttgaaatttatggtggcaaactctttgatcttcttagcgaaaggaggcaactcttaatgagagaagacggaaagaaacaggtctgtattgttggtttacaggagttcgaggtttctgatgtccagattgtcaaagaatacattgagaaaggaaatgctgcaagaagcacaggcacaactggagccaatgaagagtcctcacgatctcatgctattctgcaattgtctgtgaaaaagcatatcccagttactgaaacccggagacagagagaccgagatgctattgaagcaaagaatacaaagcatgtggggaaaatgtcatttattgatcttgctggaagtgagcgtggtgctgatacaacagataatgacaaacaaacaagaattgaaggtgcagagatcaacaagagccttttggctctcaaggaatgtattcgggcactggataacgatcaaatacacattcctttcagaggaagcaagctaacagaggtgcttcgggactcctttgttggaaactcccgtacagtgatgatttcttgcgtttcaccaagttcaggttcatgtgaacacacactgaatacgttaagatatgctgacagggttaaaagtctttcaaaaggtggtaacacaaaaaaggagcagtttgctgtgcagtctgtatcatctggcaaggaatctacctacacatcgtaccctttatcatgtgaagctgaagagactatggagcagactcaagaaattaggcctgttgattcttctaggaaaggtgttgacagtttcacttccaattcttccattgagcctgagaaaaactcctattgtatgattccaagctatccacataaaggaaaagaagaaactagtactagatctggtttgaatgatagggagagaggggacttgaaatataaccaggctggttttaatagtaaaacacattcacttcaggaatcaataaattcacaagaagaggtgaaagtgacaaaagtctcaccaccccggagaaaagctaacagggatgagaaatcagaaaggcaggtcaactacatgaaaaaagaaagtgggcctgaaattagtcggactggtgttaagcagcaacagcaacttaaacagctgcaaaggccatcatcaacctcatcgtcgcaggttttatccaagcaatctgagaaggaagatatggaaataaacacaatacttgaggaagaggcgctgatagcagctcacagaaaggaaattgaaagtacaatggagatagtacgagaagagatgaatctattagcagaggtcgatcagccaggtagtcttattgacaactacgtggcacagctaagctttctgttgtcgcggaaggcttctggtttggtaagccttcaggcacgcttggcacggtttcagcagcgcctcaaggaacaggagattcttagccgtcaaaaaccattgagatagtttaaaccgcccaaaatggaaacctttcggtttgtcgttgatcgcgagaagcctcggatactggaaactgccatcgattgcgacagcctcggatcatggcctccaacatcgccttttagggatctaagggtgaaaggatgggagatggaaatgtgggctgatgaagtgcgcattcattattgattttgaggttttatgaaccagtttactaatttttcttttactgaaaagggtgcttgagtgtattttctatcgatgtcatgggtttgtcaacgtttgccattttcttttgtacgagtatagttgtaactgttgttcgaataccggtagtgaagtgctgcgagtgaggaaataaccttgccttgccgttatggtgttgtatcttttgttgatatttatttcgcatcaacaaaagaaaagcagcgttcgataaatgtctacaggatttgctttgtaccttgggggtgccctgtttattgtgactacaagtctgtgatatgcattttttatacctttattttttgtacctttttctgattgaatccgaaatccacacaacacccgaagccaaatgtcagacaaaaatagtgctcaggcaaaaaaaaa

SEQ ID NO: 17166 - DNA, 3281 bp, Zea Mays
gaaaagctacttgagcctgagcgctgcgcagaattccgtccggcacgaggtggacgagaggagggataaggaacagaagccttcgagctcacgctgatccgcctcccgcattgccttgaagcctctcgattcgggcggacccgagctgccccgcgcggagggctcgatctgggcccagatcggccagcatttcactcccgtgcttgcaagtgcgcgtgcgcggtgaggcactgaggcatggggaaggtggaagacgagtacgagtcccatgcagccaaccggcggggtgaggtgatagattggctcgctgagttgctgccggagttcgacttgccgctggattcctcagacgaggagctgcgggagtacctcattgatggcacggcactatgttacattgcagagaaactaatgcccggcattcaggaggaaatgtggggtggtaatgcatgggatcagaggtcgaacgtgaagaagttcctctattttgttgcggagatggggctgccaggcttcagtgtcaaggatctggaggaggggtctgtgtcttctgtggtggagtgtctcttggctctaaaggataatgtgactacaggattgggtcaaaacgttacaaacaatgctgctaaaacaccccttagaaggaaacttgaacttgaatctgatgggcctataatttcagttatgacaccagggagaagacctggggaggaaagatggaaaggccactgggatcctaagtctcaacaaagaagtattcttcattctggacaaaaggtccatgatgctttccaacttaagcgaggttcctacactgatcttcctgctgccaaagtttcagagatgatgcatccaagaagtctagataatgcccctactcaatcacttcttagagttgttaatggcattctagatgagagcattgagaggaaaagaggagaaataccacatcgtgctgtttacttgctaaggaatgttgttcaagagattgagcaccgcattgctattcaagcggatcacataagaaatcaaaatagcatcatcaagactcgggaagacaagtatcgttcaaaaattaaagcactcgagacattagtaaatggcacaaatgaagaaaatgagatgacagtagatcgacttgagctagttgaggtagaaaaatcaaaacttgatgagaaaagaaaactaggtgaacaagacatggttcggctgatgcaagaaaaggagaatgcagaaaatactattgcttcccttcagcaagaaatacaggtcttgagtaggatgcatgaacagtaccacgagagaaaggaaacagaagccaggcagatggaggaacacttggctatgagacttaaggaggctgagtttcttttaatgcaatcagaaaagaaagttgaagaaattgaatctgtttcccaactgaaatctcaactttggaccaggaaggcaaacattttccagagttttatggataatcaaaaattgtccattaaggacataaggatatcatctcagtccattaagcaggaaatgtttgcccttcaaatgaaatggatagatgaaatatctagcattggacgtgagttgaaaggcttggtagatgctgctgacaattaccataaggttcttgctgaaaatcagaagctatttaatgaggtacaggaactaaaaggcaatatcagggtttattgtcgtgtcagaccatttcttcctggtcaagatggaaaaacaaccattattgattatattggtgaaaatggtgagattctcatcacaaatcccttcaagcaagggaaggatgtgtgtcgaatgttcaagtttaataaagtgtttaatacacatgcttctcaagctgaggtattctctgatatccaacctctgatcagatcagttcttgatgggtttaatgtgtgcatttttgcctatggtcaaactggatccggaaagacttacacaatgagtgggccaggcacatcaaaagaagattggggtgttaactatcgagctttaaatgacttgttcgacatctctctaagtagaaggaatgctttctcatatgaggtgggagtgcagatggttgagatttataacgagcaagtgcgggatcttctctcaaatgatattgcacaaaaaagacttggaatttggagtacatctcagcctaatggacttgttgtccctgatgcaagtttacatccagtcaaatcaacactagatgtgctacagttgatggaaattggacaaacaaatagagcagttggatcaacagctctgaatgaaaggagcagtcgatctcacagcattctgactgtgcatgttagaggggtggatctgaagaatggatctacttccagaggatgtctacatctaattgatcttgctgggagtgaaagaaaaaatgcccatgttccttatcgaaacagcaagctgactcaagttctacagagctctttaggtgggcaagcaaagacactgatgtttgttcaaattaatccggatactggatcatattcagaaacaataagcactttgaagtttgctgaaagggtttctggagttgagttaggtgctgcaagaagtaacaaagagggtaaagatataaaagagctgctagaacaggtttcatctctgaaagacacaatatcacggaaagatatggaaatcgatcaactcctgaagaacaaagccaaatctccaggttcatcaatagatagaaatgacagtcgccaacagatccggcgactatcagggactggatcaagtgaagccgaatgtgaagataacatgtctgatgatggctgctcagtagcaggaaccgagtattcagtaggtggtgcttcagaggcgacagcagaacggatgcagaaggccccatcaaggatagccaggctattccacacaaagaatggacagcctgcaaactccaaaccaaaaccaagggagtctgctctgaaaccaccaggtcgcacgacatctacaggaggaagccaggcgacaggaggatctttagtgaaaccccctaagaggcggtagagaaataaagattccatcatctaggatttgccatgttgatgggggtatgtgacgatgtcactgtaacgggttcacttgtcatcaccatgatgagcagccgactgtaggctggatgttgtatgagctggacgccatgaggttggtttctcagccctgctgaccatcacgttagttatcgactatgttactgaccatcatcaactttttatctatactatacttaaagcaccagtttcaacggtcgtccc

SEQ ID NO: 17167 - DNA, 2453 bp, Zea Mays
caacaaatcgcggagcactcgccgtcgtccgtcaccgggctgtccaacctacgtcgactccggacgcatcgctcgccatacgatcagccctccgttcgctgtacgggctcgcgggttgcgaccctaatagctgactgattctaggcgccatgtcactgcccgtcgacgccgccatcatccagttcacccagatcctattctcccatgcgccagccggccccgtgggccgtgagtccgtgatccagcgtcccaggacccaggctcccagtaccagcctcttctatccggcatccagcgagcagcaaatccagagacctcgactcctcctaaccctagccgccaggctccagtgctccaccgctccagcagatcccggacccggaagcagcgaggaaacacagggcgaccaaggcccgtctggactctggatccgccggtccgccactccgcccctcatctccgacctgagcgcgccgccctgccccgccccgcctctccctcgagcgctgtccgcgcctccgcgcctccgcggtccgcgtccggccgtccgcccagggcccaggcagttgctgcctgctggcttgctgccgtccgccaggccgcctaggcacacagcacactacttctacagttctacggccagcgcccagcggtccagtccagcttccaaatggctagtgaggactcgaaagatatgctgaagaacgtggactggaagaccgtgggcggtgctgtgactactgaatctagccagccagttgtcaagaaacgccttccgaagaagatcagacaagtccctgagtgctattttctgcctcggcgatctttgccttctgcactggcaatctatggtgccgtgtgtgctgctggagttggtgcaggaatgctgatcgaggtgtggataaacaaaaagatcaaagaggatagtgctattatctgggagatggataaatgatgtgcagttctgcaccacactttgatatggtggaagcagtttcggcactgcgatatttgctagctctcaagttaagaattttgtttataggattccttcgtccgtttgttttattttgattgaggtattgccaagatggattcaagaacgttcatccgcagttcatttaccagaacacgagtaaaaactctggctgctgaaaatatagctccaccacaactctaaaataacttataatttgaaatcgaggaagtatttctgttatcatgctaaataaaatgttgtatattctagttttttttcacatgactccctcggttccttggaagtgcaacacagcacttgcttgtttcaggtttttctctctcttttgcctctattctccacaaatgagaaccgatgctaagggcatgtacaatccacactgtatcttaagggatatatgagggtgtaaatgaaaaaaagaatgatatatgaggttttaaatgaaaaaaaaagaaacatatcttggttaaggaatgtctatgtcacagttttctaagtctaaggtacggttctacacttctacttatacaattcaaataaatgagttatcttttaagtgattctagtgaataagataaaaaaatttagatacattaggttgtatgaagagtttcttagatgtatctagtgcttggagaactataacatagtaattaagttgtacatgctctaggaacatgtttggctgagctataggataggttgtgctcggtagatcgtttatatggtcattgcactgtatattactctgtttaaaaaaatgaagtttgaaataggtggtgtggtggtaggtgggataggaagtctgctagagatagcctttatgaaaatgttggtgtgcattatggacttttaaaaattgttttgaagtctaagctatgagagaaagttaaaaatgtgtttaattaaacatttgatttttgataaacctgttgtaagtctctcttacgagcggaatccacatctcatccatagtcctcccaacttggggcaggattgagtgctgcagcagggcccattggcaggaccagtgaaaagggatctgggatatgctacacttacagctgcagcaaaggtgccttcgttggtgtttcactggaagggaatgtggtgacaactagaatggaaaccaatctccgcttctacggtgatgcataccagacggcaaccctctactagtcttcctggccgacctaggacaaccaggcgccgttctcgttctcacatgctacttgcggtcgattggttttgtggatgattgtttatcttctagagattagcatcagccagcatgacatttctctgctctgttctgtaatctgttccgctgacccgctccgctagcaggcaagccactgccgccgcaaactactagtacgatacaatagacgccaagcccagtgaagaagcagcgtcgatctgggcggatcgatcaagattgctcggaacaatt

SEQ ID NO: 17168 - DNA, 1197 bp, Zea Mays
cgtggatcggtgggtggacggagcggattaaaccttgagaaggtaatcgaagcagaaaaggaagctgcacggcagttggttcaacagaagaagagagacagagctttgattgctctgaagaagaagaaagctcaggaagagctgttgaaacaagttgacacatggcaaatgaatgttgaacaacagctggcagatattgaactagcaagtaaacaaaaggctgtatttgaaagcctgaaggctggaaatgctgccctgaagtctatacagaatgagataaacattgatgatgtccaaaagctgatggatgacacagccgaggctaaggcttatcaagatgaaataaatgctgttctgggcgagcagctttcagctgaggatgaagaagctgtcatggccgagtttgaaaatttggaagctcagcttgccgttgagtctttgccagacgctcctgctaccgaagtaaggcctgaagagaaaacgaaagctccggctgacacagaagctgctcctgaggacatcgatgacgttattgagcttcctgatgtgcctacgaaagtgccagagaggcctgaagctccagaaaaaaacaaagttttggaggagccgctacctgcataagtggatggagctgagatgaatacggcacacttttagtttgcaggaaattgtaacatacccaccatttcattgtactatctcattctcagaatttcatcgtgtacagcaagaaaaatttgttgtctttgactatcagttgtcaccagtttggatttctcagtgcccgtttattatcctatcctacggggtaaacataatatttttccattgtgtttctttgtaaggcagaaatgctgaagtctgcaagcacataccttgttccgtatgaatatatacgtgtgttttttttgtgccaaagctgtaaaatgtacggcatttgtaggtgccatttgttgcttgaatttaattggtggagcgtgtaagatagaatactcaaatcagagcagtctgtctgtatcgagtacattgaattgcctatataaggtgcctttttttgtttttgcagttctttttctttctccctttgggtcactatatatgcatcctagtgtacaatttcgtttcattataaacaaaaaaaaggaactgttgttttgcaccagatacacaggtcataagcagcaaaaaaaaaaaaga

SEQ ID NO: 17169 - DNA, 4963 bp, Zea Mays
attcaacaccggggaattagagaggtggtttccgcgggggagctgctttgcggggaagtgggaccatggcctcgagcctggttaccacggacaggagatggggtgctactcctgcaaggaaatctagtatgactgttctgggaaaagtcccaaaaccgattaatttaccaagtcagaggttggaaaacaatggtcttgatcccaatctggaactggttccaaagggcacccacacctggggcagcaaagcaccatctacaacaccaaacgcatggagttcctcatcaattctgtcttccaagaacgatggaagttccacttcatctagtcacttcaatgtccggcccacctctggcggaggctcaaggccatcaacagctggaagtgaatcacttggttcacccaatgcttggggtgcaaattctcgcccatcttcagcatcaggcacatttccatcatctcatctaccaatggccacaaatcgtccccaaagtgcggaaacaagacctggaagttcacaaatttctcgatttgcggataatgcttcagataatgtgaaagcatcgataaggactattgatagatcggaatcttcatcacgtgggcctgggttcacattaagtactggtgatttcccaacgcttggctctgaagcaaacagtcaacgagggcatagttcgaaagggcgcccaacttctagtttgggtaaagaggtgtcgcaaggtgaacaagtgaagagcctagcaactggaactggtgaagtaatttcaccatccaataatcaccctgttgatatcatgaagacagagcatcatgcacacactggaggtgctcctgtcccagccacaagtgtgccaaatgaaggcttgcaacaacagccatatccaccaaattttcctatgcctcctctgcagtttgattcatggcgtgcacctcctggtcacccccctgagggaatgtggcatagaggaccagtgccaggtgggccatacagacctgttggcccccctggtagtttccctgtcgaaccctttggttattatggccagttcccacccaactccgaagctgcaggaaggcagggctcagggcatggtggatatcacactaaaaatgatgtgtatcatcctatgcctcataattcctatattatgaatcagcctgttattccagtcagaccagtttatcagggtccagtgctgtatgatgggtattatggccctcaagcaaatttcaataacaccaatgttagagatcctcattttgttggaggtcctggaatactaaatcaattcccaaatcagaatgacaggtttcaccctggacatcctcaaaacagaccaggcaaacatgaaacggtcccaagggagcagctggaatctgataagctacatgtctttcaccaagaacaccctgggagtttgcatgataatccagatcgtctaggaggttcccgtgaatttgaaaggaatgtgcagccagcaccgccacttcttccacatcctgatggaaaacagactgatatgaacatgagggcagatacaagggacacctttagtgagactgaaagaaccgtggtacttacaaaatcggtgcctaaccagagaggttcggttggtatagaccatttgtctgtttatgaaaacacacgatcccatcacagagaaacttgtgatggcactctgcgcaagaagttcaaggaggatagctcagttgtacttgaccagcatcctgtcattaagaagaatgcagctttaatagagaaaattgagagtttgaacaacaaagccagaaatgtctatgcacagaatctcccagaaccagcttcatccaaggaattcaagaagcataaaaaaactactgatgtttcatctaatgatgtcatcagtacgacatgcacatctgatcaggcagtttctgtttcacatatttctgctgtggtgcagagacgaccaaatgtgaccattgagggtacaattcttggaccggcacattcacatttaactgaatttagcaaagctgagaagcttggtgattcaattaacaatcatttacataggagagttgattcttcgagaaacagttaccatggtccttgtaaagataggccagctaataaattcggaagttgtggacgtggagaaagttacataactaattcattaccagtagctgatttggggaatgatatccatcatggccaacaacctcagattgcctcacagctgcaacctgtgattgtacctgatgatatgccagcttcactcgattatgagtctcagcgggcaaaaatgaaggagttggctgcagaacgtgcaaaaaggatgaaagctgaggaagaggaacggataaagaaccaaaaagcaaaagcactcgcaaagttggaagaattgaacaggcgatcatcagtacttcagaagaaatcaaatgatacaaaagtagaaactgatgatgcacatgataagcaacagattggacttgatgtgaatgctaaacttgacacttcaactgaacaacatgatgttgttacgcctgataggcttactgctcttctgcctcctaatgatcccaatcatactatggttcagatacaggcccagtctactgcacaatcaaatgctttagatggtggcaaagcgcatgatgctcataccacctcatctttggtcaagaacacacacagcaacatggagcatgttgtgcagaagagtatctcacagtcgcataatatcagtatggtaaagactaagcaaggctacaggaaaagacaggttgtttcagaggagaaaatttctggcgagaaggcaagtgcttcagtaaccactgattccagtgtgcagaaaaatgttgatgttcccgtcgacacagtaacggctgttgttgcaccacatgatgatcccccaactcagaacaagaagggaacccggcatttgaggactatgaatcaggagcatgttaattcagcagatggaacaaatagtactgaaagtggcctatcaagacctcagcaagcaagaaaatctggaaagcatcagcatgttcttcggcctgttgagaagccacatgggaatgatggtgtcttgtgggcaccagatatgctaccattgcataatgagcagtctgatggagccatgccgactgcagcagtagctgacgtcactcagccagctgggaaagccatcaatgatggagagaatgtgacaagaacaaagagggctgaaatggaaagatatgttcccaagcctatgtccaaagagctgcaacaacataatccaagccatgataaggaagcaattgataagcccggtgctgctaaatcacatcctgcagccgaacccaagaaaactagcaaaggacatgggggcaaatctaatccttcttggcgcaagcgggatccagatcaacctgctatggtggcaccaaattctgttgaccaagcagacaactcttatgaatcaaaggaggttcagaactgcaccgatatgaatcagcctgttgaacttggcaaggaagatacacagttaaaatccaatgtagatgctgctgctgagaatagctcagctccagctcaaactgttccactatctgccggtggtgcaaaagaacatagtgcggctaacaggcaaaggcgacagcattttaaggctcaaagaaatgaagcaagtagctactcaaatgagagcaaagttagagagggcaagaacgactctgtctatcaatcagcatcaccggtgattgattcgaactcatccaatcacaagaatgtgccaagatcagatgtgaaaaacagcggcatagtttcacattctagagcctggaagccgaaaaccaattcccatcctcagaacagctcagacggcaagattgctgttgaagggaaagtggattcccatggtggtaggcttgagctgaacatgcccaaaggatctgatacaattacccatcaagacaccagcagtaaaccgatgaaaaggagtgatggcaccgatgaggcctcacacagcaaacaggagaacctgacacaggaagatggtaaccagaagatcgagactggacaggagcaggctaatcctgcaccgcgtcgccaaggccagcccaatgcaaggtatcacaggggaggtggggcacacaggggaaggggcggttatgacactgggaggccaaaccatggcacaaacgcggagaggtggaagggtggcagccatcttgaataccagccggtcggatcccaaaacaaagctggaggcgacttccagctgagtcagggcatggaagatcgaaccgaggggcctcctgcatctggacaagcgttcggggagcgtggccacagcagggggctacgcccagcaggccgctttgtccggcgaaacactgcctctacgtctaccactaattctcaccaacatgaataatcttccgcggctgccacatccgctgagctgcaggaaaaaactcgccttcgtggtggcgtttcacaacatatttggatgcacttgggtgggcggttggtgtccgtcgtcaacgacgagtctacggtggtgagcattaggatcatgtaacggtattagtctttgccccaaagggcacaccctggcccctcacgtgtcacgtgtgactagattttttccagaggaacatccacccttgtttgggatgcaacgttggaacgtgtgctaacagagttgtgtttgagaactgggtttaaatgttgttagcctgtgttgctgatgggaactgagagtgttggtttttgcccaactttcatggcatgtctttgtttgattgttggctctgttgttcatggcaatcgctttggatcctcgcgaccaaagaaaaaagtagtagctagacatgtagctgacaatttgcgtaagccatgtcagtgctaccatttcatcttctaacgtagcagtggtctacaacatgtaagtgatgggtctttgggtgtcgtggtctccgaaag

SEQ ID NO: 17170 - DNA, 1271 bp, Zea Mays
agatgatctaatccaatacatttgagcgctactgattatagaaccataagcttgctatgcttttatggagttatttttctgtggtgctcactgaccctggttctgttccaccaaattggaatcttgattttgatgcggagaggggagaaactgctcctctcactagctcagagttcagtagccagatgaattcacagcaatctgtggctcttggcaatacggcaaatccaagggctaggtactgtaggaaatgcaaccagttgaagccacctcggtgccaccattgctctgtttgtggaagatgtgttcttaagatggatcatcattgtgtgtgggtggttaattgtgttggggcactgaactacaaatactttcttctgttcctgttttacaccttcctcgagacaactcttgtcacactctctttattgcctcacttcatagccttcttcagtgatatcgagatcccaggaagtcctgcagcacttgcaaccacatttctcacctttgtgttgaatctggccttttccttgagcgtttttggttttatgattatgcatatttcacttgtttcggctaatacgacgacaattgaggcatatgagaagaagacaactccacattggatatatgatcttggccggaagaggaattttgctcaggtttttggaaatgacagaaaatattggttcatccctgcatattcagaagaggatctgagaagaattccagctctacagggtcttgattatcctgtcagtgagaccagattttgatggccaggaattgtaatggggcaattctaacagtgtcctcgtcagatacctcagtgttggacatctactcatacaactgtcagcattgctgattgccctatgcaaggcatctagtgaaatgtgcacaagatgattgtagtaatagtaaccatgagttattcatctgttgcacttcatgtatgtgacgaaggggaagtcctcctacctttgccagaggaagtttgttgtgatgtaaattagttttagcgcctggttagatggaccaaatcttggcgatgcgccaggattttggacttaattctttatccatccacgtgaattgggcaggatttcatccatgcaaactgggcattagtgtggtttgaaacagtcttgtacttcagtttagttatatcatgccatgcaatacatttaccatttgagatatttgtgccgctgttatacactatcaatagtaaatggataagcgctgcgtaattaattcgacattgtaca

SEQ ID NO: 17171 - DNA, 168 bp, Zea Mays
aaaaggtaccccaggatgaggagcatggaggatggctcgatgtgttcgtgagaggtctaggtcttcgtctccctgtcaactttgggttgttggatcattgtcttcatatgatgtaattatttaattattttgtacagaactttgttatataaatgatgtgacattcat

SEQ ID NO: 17172 - DNA, 2187 bp, Zea Mays
gtcactgacttgtgggcccagaggccaaagcgcgcactgcccatcaccgtctcctgaatctcagaaccttatcccctcctttgctccatccctctcctctcttcctcggcgacctccacgccggtctagagccggcagcgctgcggcggagcaccaaccgagctccgatcccaccccgctcccaaccgcgcggccctgtccatggcgcgcgcggtgcggcggcgagcccccatgcattcccgccgccggagcgcggcctgctaagcgacgacaattcctctccctctcctaaatccactcccccacgtgtcttcatgggccctccggcctacaccgcctccccctgcacggggtctgccctcttctccaacacccgagcgccgccgccgccaccgcggcttcttatccgatggggcccggggccgccgtcggccgtggggaggcacggaggccgcgtaactccgtcgcaggagaggcgcggccccgccccgtcgcaggagaggcgccgacccgctccgtctcaggagaggcgccgccccacggagtcttcgtcccagtctcaccagctccaggaacggaagcggcactggaaggcgggggagttcccggggaccgctgccgatggaggaggtggcggcggaaggcgccccgcactagggaaccggcattcgaaggccggggagtttcccgggacggacggcgtccgccccgcccccgcgccgccgcaggggaagcggcactggaaggccggcgagttcccgggcgccgccgccgcccccggttcggggacgccgaggactcccctcaagaacgtcaagaagcggctggacgcccgcgcggacgccaaggcgtgggcgtgcaccgtcaccgaggccctcgcggaccgcgtcagctccaagaactggcaagaggcgctccaggtctttgagatgctcaaggagcagccgttctaccatcccaaagagggcacctacatgaagctcatcgtgctgctgggccggtcagggcagccgacccgtgcacaccaactcttcgacgagatgttgcagcaaggatgccagcccacccccgagctctacaccgccttgatcggggcctactgccgaagcggcctactggacgaggcactccagctcctcaacgacatgaagagctcccctttatgccagcctgacgtctacacctacagcaccatcatcaaggcctgcattgacgctgccaggttcgacctcaccgacgccatgtacaaagacatggcggagcgctccatatcacccaacacggtcacacagaacatcgtcctcagcggctacgggaaggccgggcggttggacgacatggagcgagtgctctccgacatgctcgacagcgtgtcatgcaaaccggacgtttggaccatgaacatcatcctcagcctcttcgggaaccggggcgaggttgaactgatggagagatggtacgagaagttccgaggctacggggtcgagccggagacccgcacgctgaacatcctgattggcgcctacgggaagcggcggatgtatgacaagatgtccgcagtcatggagcacatgcgcaagctcgcgttcccgtggacgaccgcgacgtacaacaacgtgatcgaagcatttgctgaggccggcgacgccgggaacatggagcacgcgttcaaccagatgcgttccgagggcatgaggccggacactaagaccttctgctgcctgatcgacgggttcagcagggcaggccagttccataaggtggtgggcatggtgaagctcgccgagaggctcgacgtgcccgtgaacacgcctttccacaatgctgttcttggcgcgtgcgctagagcggacgatctcgtggagatggagagggtgttcaggcgcatgaagcatacgcagtgcgagcctgatgcttcgacgtactctatcttggtggaggcttatcgcaaggagggaatgaccgacaagatctatgctctgcatcaggagaacccggctctggttccagctgattttgtcatggtttgaatgacccagtgactgagtcacggtcctgaaattttagagcttggttgcattggttgagaatcttcttgctatccaccaaacagagtggcggccattcttcaactccattttttttggaaatcacattcattctaggatttctttgcaagctacagtt

SEQ ID NO: 17173 - DNA, 2354 bp, Zea Mays
gtgtttaccatgcatttttctgcgtttatttctcttaccttgcttggattctactgttccattgagacccaatcccacggcatcggcatctgctctagctagattctactgttccattgggcaacttgatgagagtgctgagacctctctttctctctctacgtcttgtcaaatgtctaggctcctctgtcgtcgtgcaagcggctgcagcaggaggcaaagccactgatgggagagagaggcacacaacacatgtagtactagaggtgtggtgtatcgattggcccgtcaggagttatccccagtcgaccatggccatggacaggcggcatcatcagtgtagtagtactgcatgcatgcctttcactcctttcaggcatgccctttcacccttttaggcatgcaggcgagaggctgcaaggttcatatgtatccggaccatgtatgagcatcgtgtcatatcctatgcaaaacaatagaaaatgcatgctagccccgttcttgttttatgtgcgtgcgtgcgtgttggcgtggagtggagctagctgctagctgatgcagacaaatccagtgcaggctgacgatgcacgtcatgtgtcgtttcttccaaaaagcatgaatgcgtcggagggagctgtaaataaatttactcattccagttgtccagaccgtattcggtcaagaaaatccaattttgtgtcgggactcgggaggtgtatattatgcatgcatgtgtagtccaaccttgttcatttgtctagttcaaggctacattacaaatctctaaaattaatagttagtagctaaaattagttgggaggtttaaaaacatgtcagctagtagatcagctaattattagttatacctcttaaatagctgcttcaacccaactaaaacatgacaataacttattagctgactaacgattaggtttagaacatgacctaagtatatctcagaatatgatgattagtgaatatacctttgacaattgttatatgttttgtgcatatttaatatattttttctcctaattaataggaggggtacaaatatatagagtgataagatttgattattagagatgataggctactggtattaattggttttacctttctgtgaagtataaacacaaagtattgaatcaaccatatgtaaaagtttgttggtgtcttgtcctcttattgatcctcaatgcttgctttcctcaacagcatctacaagacgctggagcgataccgcagctgcagctttgcatccgaagcatcagctccactagaggccgaattaaataattatcaggagtacttgaagttaaagacaagagttgagttcttacaaacaactcagagaaatctacttggtgaggacttgggtccacttagcgtgaaggagttagagcaacttgagaaccaaattgagatctctctcaagcaaatccgatcatcaaagaaccagcagatgctcgaccagctctttgatctcaagcgcaaggaacaacaactgcaagatgctaacaaagatttaagaatgaagatagaagaaactagtgaagaaaatgtgctgcgactgtctagccaggatattgggtgtagtggatctagtgggcatggtgatgaagccaaccaagaacaccttcaacttgctcttgatccttcgctgcatatagggtatcaagcttacatggaccacctgaacaatgattaagttgcttctttgtgcgctgtgtgctctagtggccatggatcttctatatatgttggacgtaatgcttttgataaatcctctatatataaccatatcggtcctagctttatgcatgctactgtatgtactaaactaagaagccctacgacttctgttgaggaagaatgttctgacgatcatgactttcttgctaaataataactactgtatctcattttgaattgatcgtctactgaagagccatgcttttgtgagtacttagcaactaatatgtgataacgctctctgatcatgtgattagtgccttgttacacatttataaggtgtttggtttgagaaataaggtggtccatcatcttctcgtttctcacttttttgtttgatttgtagaatgaaataagttgatttatcatcatctcaattcttatagttagttagttcatttttctttcctcgtgcatttcgcagcttttcttttccttacatttttttttgtgtcgttgattattcacatctgttttcttcgtttgacttgtgtcagcgtttcaagaagacagcctcgcgttgcgtggctgcaaagccatcagcgcggaggttctatgggaggcaagtatataaggccctgtttggatcacttcaataa

SEQ ID NO: 17174 - DNA, 1279 bp, Zea Mays
tccgatagaatcctaccggattcgatttcgatccttctcaactcaatctcacgtggcacgcagtcatcatccagccatccgctccaggctccagctctaggggagtgcctcctcctcctcctcctcctcctcctcctcgtccttcccctaccctccccgcgcgcagatcccgacgcgggacgcctgcattcccttgcgcgggacgcgacaactccacgctacacagttcacacgccaaagatgctagagttcatgaagcagctgcgccagcatgtgacagtgggcgtggttggcggatccgatctggtgaagattaccgagcagctcggcagtacagttattactgattatgattacgtcttctccgaaaacggcctggttgcacacaaaaatggccaactaattggaacccaaagtttgaaatcatttatcggagaagacaagctgaaggaatttattaacttcactcttcattacattgctgacttggatatcccaattaaaaggggtacattcatagagttccgaagtggaatgattaatgtatctcctataggaagaaactgtagccaagaagaacgggatgaatttgagaagtacgataaggtgcataacatccgacctaaaatggtgtcagtgcttcgtgaaaagtttgcacacatgaacttgacattttctatcggagggcagattagttttgatgtatttccccaaggttgggacaaaacttattgcttgagatatcttgaggaatttcaagaaatccatttctttggggataagacctacaagggtggcaatgactatgagatatttgaatctgaaagaacagttggtcatacagttaccagccccagtgacacagctcagcaatgcagatctctctttttgtcgaagtgatctccagcttatttccaacacatatttattaagtcatctttgactgaatgccttttggtatttttttcaatacaatacatgccaccattttttctttgaataattggatctataccattaaaagattgcaactttagatatatactattggctccacatatcattgactcatgtgaaccatacatgtaagtgagataacaatgatatatatttaaagttgtaatcctttaatgatactactgctccgtattcacaaattttcagattacatgtatacaactggcgaaaataaatcagatttacctgtttttactttacgccgtgttaattgagatgcttcttgggacatgggtgatgtagtaaaagatggtaattgtgc

SEQ ID NO: 17175 - DNA, 1679 bp, Zea Mays
cttttgttgacgtggtgacactagaaatagtgtgacgaaactatcatagagaatacccttagcatagaactcaaaaaaacatcttgcatgtattaaattatgtgttggtatgtcaaaagatgttagaaagaaaaaaaatagaaaaaatagatggtatggatttttatttgatgacctatttagaagcccactgattcagcaaccaggttacaccacacctacatgtttctttaccctaacggcctaacctttctgctctagcgaaggtgacggcggcagcgacggcgctcagactcgggcttttagtgacggcatcagcggtttcccctcccgcctcttgccagtcccatcgcgccctcgcctcgggtcctctgcacaccgtccagtgaccttgcgtgatggactggataaagttttgcagcgattttaccgcaagtgatgggaaacagcatgcattgcttgataatcttaatcaggaattgtcccagaagtctgtactattgggtgatggttttaaactgtcagctgctgataatgatgtgtttgcaactgttcatccttttgtgatccgtgttagtgacagcgagttgcagaaatatccacatgtactgcggtggatggactacattcagaacactgttggtgctggtacaactttgcaaaagataaatgtgaccaagtctgactttgatccaccttctcatccaaggaaagctgataaaaaagatgctgaatcaagttcaaagaaagccatttccgtacagaagactgctgacaagtcaaatggaagtgctgactcaaagaaatccacaagagagcctcctgaaaataaggagaatcctactgctgcggggaacagcaaaacctctggggagaaaaagaaagtgcaagagaagtcagcaggaaaaacaacagagaaagctccagagaaaattgcagacaaggaatcagagtgcgatatcagtatcctgaatatacaggttggccttatccgtaaagcatggaagcatccatctgctgacagccttttagttgaggagatagatttgggagatggtaatgtgcgtcaagttgttagtggtcttgcaaagtattgcagcccagatgatcttactaatcggcatgttgtcttgatcacgaatgtgaagcctggaaagctgcgagatgtaatgtctgctggattggtcctttgtgcttcaactgaagatcatgctgctgtggagcctttgattcctccagaaggagccaagattggagaacgcatttcatttgctgggtttgatgggaagcctgaagatgttctaaatccaaagaaaaagcagctggacaagattaccccgcatcttcgtaccgacgagaatggaattgcaatgttcaaaggtgttccctttactacatcagctggcccatgtagatcttcgattcacaacggaaatgttaagtgagcagctcattagacatggttgcatagattgacatcaaacttatgcaggctgtctgtgtaccattttgtcatacatcatgttttgcccatatttagcgttgcaaaatttgaacagagttacactatctgtaagcaattttctactaatggttggcccagagtttgcttttgagaaaaaaaaataaaatagaaccaataccttgcttggttggagaattttgcatggggcagcatc

SEQ ID NO: 17176 - DNA, 1051 bp, Zea Mays
acaacgcacatgcggaagcggagacgctgacgcacctctgagcctggcggcgatttttctatataaccagcgccgctaattccgggtgcttcgctgtagagatgcggtaaaagcgaaagaagaatccgatccgcttctccacgccgaacccggtggtaaagattagattgcaacagcaaaaagggctaagcccagacttgcttagatacaaaggtcccatacactgcgcaagaactatagttcgagaggaaggcctctttggtctttggtctggagcactaccaaccgtcatgcgcaacggcacaaaccaagcggcaatgttctcagccaagaacacgtttgatattgttctgtggaagaagcatgaaggggacgggaaggtgctcctgccgtggcagtcaatggtctctgggttccttgcaggaacagcaggccctgtctgcaccggacccttcgatgtcgtgaagactaggctgatggctcaagggagaactggggacgccaagtacaaaggcatggtccatgcgatacgaacaatatatgccgaagaggggctgcgagccctgtggaaaggcttgcttccccggctcatgaggatcccacctggacaggctataatgtgggctgtagctgatcaggtgatgggcctctatgagcgaactcatctgcagccagttcatatttgaccattctattgcagtgctggtgctgcactgaatttttttttgttggttctcaatcggtggttagacgtggaagtcgtcgattatggatattcgtttgttcattgcttagagttgggtattgatggaagcaatggaagactcttgtactactattttgttgtcaataatcatgaaaccctccaccttttggactggggatatctcggttgtggtgactattatggttgttagactgcagtagcatcaatttgtatgattgaatatactcatgtgttcatctggaaagctgagggtcctttttatgcccggctgggccgtcaaaaagataccatatttacctgggccagaagtgataatgcagccca

SEQ ID NO: 17177 - DNA, 4082 bp, Zea Mays
ctgctccaccgccgcagctgccgagaagacacgcaaaacaaaaccccaagaccacaaggaaacacgagcgctagtggcaggtggcagcgagtgagaaggtgagctcgcctccctcgcgcctcccattcccccctcgcgcagtcctatcgtaggaatgggatgaggccggggcccctccctccttcctcctcggcgcttctcccgtgacaagcctccattctccagataggggaggatggatttgtccaggttcgcctccggcgtcgggcccagccgcgtggccccgcgggcgggcctgcagatcggcgccgccgagaatggcttccgggcctgctccctgcggcgagcacggcaccgcggcggcgggaacgggaacctcacggccgccgcgtccaccctccgcggccgcggcgggctcttctacctggctcccacgcgccggagtcatcccagtctccggctcttctacctgcttcccacgcgcgggagtcatctcagtctccgcgccagatggcggccgcgctgccagggcaacgactcattggcctacgtcgacggccccttggagaccgctaagggctccggcgaggtcgacgacaacgtgcccaccagctcggggtccgacgacgacaggggcctcgccgacgtcgacggcctcagggagatgctgcagaggtccaggaacgagctggaggtggccagggtcaacagcaccatgttcgaggagaaggcgcagcggatatccgagtcggccatcgcgttcaaggaccgcgccgacggcgcccagagggatgtgtgcgcggccgtagccaccgtgcaggagatcatcagcaaggaggcggacgccaaggaggccgtccagaaggctaccatggcgctgtccatggccgaggcgaggctgcagctggccgcggaggcgctggaggccaaccggggctcggtaggcccgacggaggttagcatcgaaggcatggagcaggaggccctcctgtctgcacaggaagagattaaggattgtcgggcagccctgtcgcggtgcgcggaggagctgagtcgtgtccaggacaagaaaatggagctgcagaaggaggttgataggctgacggatctcgctgggaaggcccagatggatgcgtccaacgccgaagaagatgttgccaatataatggtgctggctgagcaggcggtggctcttgagatggaagcctcacagcgtgtcaacgatgcggaaatggtgctgctgaaagcggagaaggccatagcctcgattgataccgtggtggagctaccgtcacctgctgaagagcagagaagcactgaagaagacagcgtttctgaagggtacgagtatagcagcgatgtcactgatgatgtttatgtaagggatgaggtgtcaagtatcgagcgcctaatggtcggtgacttgactgttcagggctttgagcagcttgaaccatcccgtgaaatatatgatgaagaaagcagtaataagatgtctgttgagcctcagaaagaagctgagtctgattcagataagtcgaaacaagggaagaagcaagaaatggaacgaaaggagcacaccaaggaaccactgagtgctccaaaagcactggtgaagagatcatcccgtttcttctcggcatctttcttctcctccaaagttgatggagagtttacacctacatctgtcttccgagggttaatgaaatcagtgcaaaaacaagctccgaagcttgttgttgggatattgcttctcggtgcaggggcattcttcttaaatagggctgagaagagtcaactatttcagcagcaaggcattgccacaagtattggaaaggtaacctccacaacaaagcccatagttcttgagatacggcgaattccacagagagtaaagaagctaatagagctcttacctcatcaagaggtaaatgaggaagaagcttcacttttcgacatactatacttgcttctggccagtgttatttttgtaccattatttcagaaaatccctggaggcagtcctgttcttggatatcttgctgctggtgtcctcattggtccatatgggctgtccatcatccgtaatgtgcatgagacaaaggcaattgcggaatttggagttgtgttcttactatttaacattggacttgagctttctgtggaaagactaagctcgatgaagaagtatgtctttggcttgggatctgctcaggtgctggctactactgctgctgttggtgtgatagctcattgttttgccgcactaccaggaccagcagcaattgttgttgggagtggcttggctctgtcatccacagctgttgtcttgcaagtattgcaagagcgtggtgaaagtacgtcacgtcatggacgtgctacattttctgtgttattgttccaggatttggctgtggtggttctgttgatattaatacctctcatatcacctaattcttcaaaaggaggggttggtttccaagcaatagcagaagccatgggaatggctgcagtcaaagcagtagctgctataactgccataattgctggaggtcgtctgttgctccggcctatttacaaacaaattgctgaaaatcagaatgctgagatattttcagcaaatacactccttgttatttttggcacaagtcttcttacagcccgggctgggttatcgatggcacttggagcttttttagctggtctgttactagcagaaacagagttctcattgcaggttgagtcagatatagctccctatcgtggtcttctgttaggacttttctttatgacggttggaatgtctattgacccaaagctgcttctgtcaaacttcccagcgatctctgtgatattgagtctcttgataattggaaagacattgttagttacatttgtcggcagggtgtttggggtttctgctatagctgccattcgtgttggcctcttgcttgcacctggtggtgagtttgcttttgttgcctttggagaagctgtcaaccagggtcttctatcacctcaattaacatcgttgctatttttagtcgttggcatttcaatggctctgacaccatggttagctgctggagggcagtttctggcatcaaaatttgagcagcatgatgtgaggagtttattgcccgtggaaagtgagactgacgatttgcaagaccatatcattatattaggctttggacgtgttgggcagatcattgcacaactcctgtcagagcggttaattccttttgttgcacttgatgctggaagtgatcgggttgcagctgggcgtgcacttgatcttccagtgtattttggtgattctggaaagcagagaggtactgcacaaaaattggagctgaaagagcttgtgctgctgcaattactttggatactcctggtgcaaactacagagctgtctgggcgttgaacaaatatttcccaaatgtgaagacatttgttagagcacatgatgttgatcatggtgttaatttggagaaagctggtgcaacggcggttgtccctgagaccttggagccaagtcttcagctagctgctgctgtccttgcacaagcaaaactcccaatgtcagagattcaggaaaccatcaacgagttccggaatcgtcatctgtcagagcttacagagttgtgtgctacgtcaggaagttctcttggctatggattttccagagctacgtccaaatcgaagtctttcacctccgacgacgaaaaccaaacagtggatggcacactagcaatctgatgctgatgagataaaatgggatccccttgctagcgctagattggttgcattgttcagtagataatcctgtttcatgtggaaggagggtggaataattattcatataagagctgtcataaaagttggcgtccatttttgtatgttagacacttagtgcttgtttgagagtaatggaagggactgagagggccaaaatcctttatgccccgtttgtttccttttattttgaggacttggaatctaactattggaataggctatttttttaaaatgtgacattccaccacttccaaagttatcatatgagcctatctctaatt

SEQ ID NO: 17178 - DNA, 1496 bp, Zea Mays
ataaatagtaccaataatgcctcatcacaagtttactgactcctctgactggccagtgattgatgctcttccatcttatgggcgcggtagagaactccccggcaaaagacatcaaagtctaatatttggatccaatcttaccgatgtgataataaccggtgccaatggcaccgtcgatggccagggtgcggtttggtgggactggtttcacaaccacacattgaactatactagaccaccgctcgttgagttgatgtactctaccagagttgttatttccaacctgaccttcataaattcgccgttctggaatatccatcctgtgtactgcagccaggttttggtccagcatctcacaatcctagcacctatcagttcaccaaacaccgacggcatcgatccagactcgtccacaaacgtctgcatcgaagactgctacgtcagaaacggcgacgacattatcgtcatcaagagcgggtgggacgagtacggcatctccttcgcccaccccagctccaacatcagcatccgcaacatcacaggacagacgaggaacagcgccgggctcgcctttggaagcgagatgtcaggcggcatatcggacgtccgagcggagggtgtccggatcgtcaactcggtgcacggtatccgcatcaagacggccccagggcgtggagggtacgtgaagaacgtgtatgtagctgacgtcagcttcgacaacgtttccatagccatcaggatcactggaaactatggtgaacaccctgacgatggctacgacaggaacgcgcttcccaccataagcaacataaccatcaaggatgtcgtgggtgtcaacattggtgttgcaggaatgctgcagggcattccgggggatagcttcagtggcatctgcttgtcaaatgtttctctaagtgtcaggtctactgatccatggaattgttcacttgtcgaagggtattcgagctctgtgtcacctgaggtgtgtgagcaactgagagccactcctggtcctgggtccggacagatgtgctatggaggtaactatccggcagctgcggcacaaccgcagccgccgcagaagtcaggtgctagccggctggtaagtcctttcctctcgataagttggtttctacgtaggtaaccttgagcatagtatctacttatcattttccccccctgttcccacttcccagcagcttggtaattgtagtttatggagttcagtaccatgtacacttgttccaaaaactatttgctggggcatgtagctactgattattcttactcagaaatggaatggatttgtttgacttgaacagttctgttgaaacacgtcaggttctgggctggcttgtccttgtaagatacgggtgccggcatataacttggtttctcctcgcaaacgaacttccagggttattcaacaaaggctaaattgcattacaagaccgtgtaaaaataattttgttttctaccgtaagtacctctgctgc

SEQ ID NO: 17179 - DNA, 99 bp, Zea Mays
cgatggcgtagccgctggagatacttcctcgatcttccgtgtgcagcgcctctctggaatgatgccaaatccgccgtcggatcgcgactcggaactacc

SEQ ID NO: 17180 - DNA, 230 bp, Zea Mays
cctatttgtacaaatcacaaaataagtgatttttgcgagtacgctatgggagctgatgactgtgtatagcatacctttgctcgcgggctggtaacagccacagcgcccagaaatatcagaattgaatcatccctcagatgatctgatctctacttctctagtacatctttgtttaacattagcattgaatcatccctcatcatagttggatatataggaaaccagctgcc

SEQ ID NO: 17181 - DNA, 699 bp, Zea Mays
ggaggatagatggctcatggctgccatcgtctaggctcaacatccgaaagacgggccatggtcggtttccttcctcaccccagcggcggacatctatccgaaaataggccgcacctcgtccgctttgctccttgttcatccttcacctgctgatggcggcagcggcgcggccatccaacgatgatttacggatggcagtgaaagaaattatatgtgacagcgagactgggcggcaggagtacgaagaagcagttatagcaattactgtggagcaatcattgaaacgctactgccaaaggataaggaggcctgatttctggggtggagagtcagaattcctggttttgtctagactgtgtcggcagccaataattatttatattccagagcgtgagtaccatggtcggggtaatggtttcattcctatagctgaatatggtttggaattcaccaaaaatacaaagcagtggaagaaaaagacaccagtaagactattatacagtggaaggaaccattatgatttgcttgtgtgacatagttgcagagcaatgtatttttctagtgcccgtcgtcataccatggttgtattattttttgtttttatacctgtgcttgtgccccttttttgagccaccaatggaattgattcagttatccaaatatcagtttcgaaatatatatatttctcgtttgcatgct

SEQ ID NO: 17182 - DNA, 1347 bp, Zea Mays
attacgactacaagagtcatgatatcatagtattcatgtctgaacattgaaaagggtttgggtgatcgaaatggaaatggtacacctagtttaccagtttctgatacttcacataacagcaaccattctgaagatgtagatggaaattctggggacattttaagtgacccaaaccttggctctaattttattcagtgtgttgaacctggggagcaaaatagcttaatgcttaatggaaatatcatatctaatgcaaatgctggagatttttttaataattccagccccagtgatgggttcctagagctgaaggattttgcagatgctgcagatctggatttccctttgggcaatggatcaaccatatggccttcagatggttgggcatggaaaacacctgactcagcggaagctgtaaatggagctaacgatgagattcctccactccctgatgaccagattttccagccagatgaactggaacaactgttgcagtcaatacaagaagattcccatttgggctcaactatcattgaccccatgcattcttccatgacaaattcagttctgcctgaggacgattatttgatgttctatgatgcacccttcgattccactatgtgtgatgggtatggacagaatggaattcttggctccgcagcagccaatctatctggcattggcatgatggaggatggtatggcatactttgatgcaatggatgataattcatttaatgatactctgggctccatacagcagtcagctggtagcagttcccatgcttttaatggcccagtccttacccaagaggtcaacaatactatgtgtacatatagtccaactcaaaaggttttagaacctaattttctagttggtgccccgtcatctgctaggttacctgaagctggtagtcagttaaattgtgttgttttaccagatggtcaggctaagagtagtactattggaaagggatttgtaaagattttggactcaatctccgctcccccagcttttgctggagaattcccagctatccaccgcaaatctttggctcatatttctggggggcgccccaacacactccatgtttctgctgaagtgatccgcgtaggaagtttagctgttccttctggcgcagataagtgggcgctgcataaagatcaagacatggagctggtcttttctgcagattttgagcctgatacccgtcttcactgtgctgcaatagccattaccgcgatgctgcgaggtgaattcaggccttttcttagtttcggcaacaatgctcaaagtgaggtatggggtggggaatgtaacctaagatatgtacaaggccgtctcgga

SEQ ID NO: 17183 - DNA, 6002 bp, Zea Mays
ctgacctgcaaggacaagtcgagacgagacatcatctcttctctctccccatctctcgacccgacctcgctcgccgtctctgttgtgccctgcccctgtcccttttctctctccgcctccgccccacctcggatcgagtccaagccgccgagcccactccgctgacccagagcctggaaacccccaatcgagcccgaccggagcccgtcgattccgccggattcgagctcccgccgggtgaggcggtccgcccgaatcggccgattggactcgaattcgggtggtccggatgcgcgcagagcggaggctcgcggatctagggtttcggagggcctagggttagtgccggtgatctggtgatggtggtgcgacgcggcgccggagctcggcgaggaggagggttcggcggcgacgttggggaagatgcagcgagccggatatgcatgggtggcgcggcgctgaggggtgtgacgtcaggaggcggcgtctcgttcggctcatgtggccagcggcacgcgtagaggcagaagctccaccaccaccggcacaaggaccagctacttctccttctggttcatctgttcccccgtctcggacgacttctcttccgcccgaatcggcggcgcagcaggagtgcatcgatcttcctcgcccagtgtcacccggttcctttgtaaaggacggtcgtgaaattagagtaggggattgtgctctttttcgggctgtcggtgctcctccgttcattggattgatacgttggattgagaaaaaggaagaagcacatcccaaattacgtgttagttggctttatagacctaccgacgtgaagcttaacaaggatatacaactcagcgctgccccaaacgagatcttctactctttccaccaggacgaagcatctgctgtttctctactgcatccttgcaaagttgcctttttacgtaaaggtgttgaactaccagctggaatttcatcatttgtatgttggcgcgtgtacgatatagacaacaagtgcttatggtggcttactgacaaggactatattaataaacggcaggaagaagtaaatcgacttctacacagaacaaggctagaaatgcgtgccgcattgcaatcaggtggacgctctccaaagcgtttaaatggtccatcagcttcccaacaactgaagactgcttcagttggtacgcaaaatggtggtttgtctaaaggaaagaagagagatagaagtgaacagggagttgatccagctaagcgggatcgggatcatctacttaaggttgacgagagtgagcctggaaactttaacttggatgatattaagtctgaaatatcaaagataacagaaaaaggtgggcttccaaatgcagaagcagttgaaaagcttgtacatcttatgcaacttgatcgaactgagcagaagatagaccttagtggtcgggttatacttgctgatgttattgcggctacagagagtcctgattgcctcggcagatttgtgcaatcaaggggccttcccgtgttggacagttggcttcaagaggcccacaaagggaagtctggtgatgggactagtcctaaagaagcagataagcctattgacgaacttctctcggccctgcttcgtgcattagctaaattgcctattaatctcagtgcattgcaaagttgtagcattgggaaatctgtcaatcatcttcgtagccataaaaatctggagattcagaagaaagctaagtgtcttgttgagaactggaagaagcgtgttgatgctgagatgaagtcaaatgatgtgaaacctttagtttcaggtcaatctgtttcctggtcaggaaaagcaggtttccaagaaatttcaaatgctggtaccaaacgaggtggttcaagtgagaacagtccaaaaaatccagtgcccactctttcatcatcaaaaattttgactgataagcctgggggcacagatgctgaagcgaagttgaaccctggggtatctgccttgtcaaattcacaacacgtgcaaccgacaaatgttactaccaatttgaaggatcagccctgcaaatcaactggtggaactggtcctgagctgcctactgtaaaagaggagaaaagcagcagttcaagccaatcaccgaacaacagccagtcaatatctagtgagccatcgaaggatgcaagaagttcaactgctgcttctggtggtgctagcaaaacttctgaaagttcttcacgaagccatcgaaaggcaaacaatggtcttgtttcagggaacctgaaggaagcttctgtaggaagatctgtctcccttgatcgatcattgctacaggacaagtcatctcaaactggaacagcttctgaaaaaggagttgatatgccacctgatcatggaaataatcatagattgattgttcgctttccaaatcctggtcgtagtcctgctaatagtgcaagtgctggatcttttgatggcccatctgtaactggggatagagcttcatctcctgtggttgcagataggcatgatcagactgagcgctgggtgaaagggaagactgaaaattctcggcctcatttagcatctgatgctaacacagagtcttggcacagcaacgacggagctgctggttcagaggaaggtgataaatcgccgtgtgctatattagatgatgacaacagcaggacacccgacgattctgttaaggatgcacatgcatcacgagttgcatgctcgtcacatatgaatgaaaaagatgtcagtgaaactaaggtgggaactctgttcagcccaatgaatgctcttattgaaatcaagtactctgaagctagtcattcacggcaagctggagatgacgcagctatgaatcttcttgctagtgtggcaggggaaatatctaaatctgaattggtttccccagtttcttcacccagaagttcttctgcaaagaaattggcccgtgagagtgacaacattggaaaggttaaagtagaaagtgacatgggcccatcacatccagggcaagcagatgctaagaaaggtgccatggggaaggaagtaaaaaatgatgcttgtttggtttcaatggatgaacaacgccaaactacgccatctcctgagctaccatattcaaaagcagttgtatcttcagctaagattgaaacccatgaagttgaagccaagattgcaaacaaatgcaactctcagcatgcttcaattgattccaaaggtgaacatgatcaaaacttcaatttgcgccactcagctaatactaaagttgtcaatatgtctaatatgtattcatctgcaggtgaaagtcaggatgcctgtactgcccatgggaatgttgaagatggcagtacagacaaggatggtgccatggaatctgcattgggcagccagtgtagcttggttgtttccagtagaaattcaagattggttcatgctggggaatctgcattgtctgctgctgacaaacaggcacagggtttgttaaaatcaactaatcataagcagcttctgagtgtatcggacaacccaggagcctttgatagacgtgacagtatggctggcaaattagatttgatggctgcagaggtgagaaaaactgatgtcctgggcaatagtagcatagtgcagaacgaggctgaaaagaaggaacatgcttcttcctttttgcctgatgttcccaaactagttgtagcagcagcatctccagttggtgtggcaaatgtgaataaggagattaaagaatcaaaagacagttcaagtgaatccaatagccatgtaaaatctgaaggtgtcaattctcatcaaagcgagcaaagtgcaaagcagagttcaaagaaatccagtgatggtgtgagtggaaaagaggacgaaaaagaagaccatgtcttatcagacgaaggttcttctctagccgctaacaccaagtcaaatgctacagccaagcttgatttcgacttgaatgaaggaatacctggagatgatgggcatcagtctgagccaactatctcgcctgttgtatgttcttcagcaatccatttaactgggattttgccattcacttcgcctattacaactgggttgcagccagcttcagttacagtagctgcaccagctaaaggaccctttgttcctccagaaaacctgctaagagcaaagccggagattgggtggaaaggttcagcagctacaagtgcatttcgtcctgccgaaccaaggaagattttggagatgcctgttgctgcacgcgacatttcagtttctcatgctgctggtaagcagtctcgtcccacgcttggttttgatttgaatgttgccgatgatcaagctcttgaggaagatatcccacagagttctgcacaaactacctgttctgaatctggaaatacgagaagtcgagatggctcttcacgaagcgctggtattgaatttgatctgaacagagctgatgaagttgcagataatggccaatttgtgccaagtgcttcgcacagagttgaagtgccattgttgtcaacaagatcgttacatggagttttctctaatgctggcctgaatagctcgagggactttgatcttaatagtggaccaggtcttgatgatgttggcactgaagctgcaccaaagagcctaccttctaaaaatacaagcagtattcaattcctaccacaagttcctgttaggatgaatagtgctgccatgagtaatatatcaccatggcttgcctctgccagcccttgtggtccagtagctatacaatcttttttaccaactagagaacagccatacccaattgaggcagcagctggggcccaaaggatcattgcgcctacagctgatgctggccaattcggaggtgatccctgcaggcctccagttgtttcaacgtctccagcgatggtttatcatccgcctgcatatcagtatccaggattcccttttcctcccagtgttcaccttcaaacaccggcattttcaattggatcagcaacatttaataattctgcatctccaggagttccatactttccaactgtctccccttcttttgttgggccagctggagcgttaactccccaacatttaaggcagtttgctataaaccttgctgagggtagcagcagcagtggacgagacagtaatcgtaaatgggaaagtcagggccttgatcttaactcaggccctggaagtatagatttagaaggaaaggatgaacgggtacctttaccagtcagacaaaatttgatcccacccccacacggctttgtggaggatcaaggaagaatctaccagatgccagttgtaggaacaaagagaaaggaacctgatggcagctgggactcagaaaggtctacatacaagcaattatcatggcaatgatggctctgaagatcattctgcaccggactggtctgcgacgagcatgtacctgcatgtagaacttgggcggtgtgttcttcagtcactgcactatacttgggggattggggattcagcccatgacgatgatgtgggatcgaggaaacgaaaacttgctgtaattgttgtagattttttccctagctgttaggcttttggttctaatttactcaggagggggtatggctgcggaggaggaatctttgtgattctgagctctggggctattgtaattagaccgtccgctctgtgtttgttggtgatatactattgatcacatgctgcagctttacattacataagaatttagatgtgaccttgttccttgctggggaagcgttacgtcagctgaccatatgaacactggtgcaacgaacagctcgagttgctacgccatgtatctttggattgcagtgcagctgtatgtataagaattctagcagatcagcaagctatatttttttgctgtttttttttgtccatctgcatctgatttagtcttgactcttgatgctctttctttaaactatttgtcggaagtgatgaccagcaggtacgaacaggaacaaaataaatgaag

SEQ ID NO: 17184 - DNA, 1171 bp, Zea Mays
gaacggcaccgccgcggtgctcgtggacgccgccccggccggctgctgcacccccgcctcgccggcctcagcgtccatctccgaccaggacgagagcactgcagcacagcagggcggcgggtccgcacacgcgatggcgcgaagacgacggggtttccttccctcctcgagctcgaggtcgaggaccgaccgagaggctcggacggcgcggcgccgtgcgcaggggcagggctcgtcacgggcgcgctggtacttgctcagatggtgccgtgtcagaatacgcgcacaagtcagggggcaatctgcaaaccagacatccgatgctgcgtgagtggacgagagggctccggctcacatctgctgcgcccgccgcagcaagacgcgccggaggaggccaagcaagcagctctagtcttcgtcgcgtggttccacccacccccacacgcatcacccaccgcgcgccgcctcgtgcgtgcctctcaattccgtctcgttctgcagcggctctcgccggtggcctgcagcagcagcagccatgatgatggcgtgtgccctcgccgtcgcccagccagcagcatctctcgcgccgccatccggcaagaggaccctctccggcggccgccccccgcggctgccacctcccaggctttcaggcaagctaataaggagccgcgctgtcgttgccaaggctgcgcaggacgggtcggaatcgtccgggaccgggagcatagtgaaatacgtcacgagctctttcagcaccgcggaagacattttcgccctagctggtataggctttgccgcagtagctgcattatgggcttcggtcaacctcattgagatcatcgacaagctcccggtccttcctcttctctttgaactagtcgggatattggttgcatggcttttcatctacaacaatctcctcttcaagccaaaaaggaaagaatttctagagaacatcaaaagctcaggatctcgaatcctggggcagtaacctttgtaggcgacagttgacagcaaccactctgtcatgggttctctgcaagcatgccgaatgtaattatgcaatgtaactgtatgcgagctatgggtgttaacattttttattgtataagcatcaccaattttctgtacaggttagtgtgattaaaatcgttctcctaaaaaaaaa

SEQ ID NO: 17185 - DNA, 1488 bp, Zea Mays
accaaacaaacccttatcttctttatcgaaacaggttccgtgcgcacccggtttgctgttcctgccccaactctccctctcggtgccttcacgcatcaccccaccgctccctgcaactacaactctgtttcacatcgtccgctcgtcatactcccgaggccccgatccccctttcatttcaactcgcatctcccgcgccgcgccgccccagcccggcagcccaaatggacctgccagtggtagatctcacgccgtatctcggggccgcagccggcggcccggccgcgtcgggcgtggaggagctgcgcgcgctgtgcgccacagtgagcgctagtctgcgggacacgggggcgctgctggtgatggacccgcgctgctccgccgcggacaacgaccgcttcctcgacgtcgtcgagcgctacttcgcccgatccgccgacgcaaagcgcctccaggaacggccccacctccactaccaggttggtgtcacacccgaaggggtggaggtgcctcgcagtttggtcgacaagaacatgcaggagaagatcaggagcatgcctaaggactttaggccagccactcctaaagggccggacccgaaatggcgatacatgtggagagtgggtcctcgccctacaaacacccgttttaaggagctgaactcagaacctgttatccctgagggattacctgagtgggaagagatgatggattcctggggttctaaaatgatttctgcaattgaggttgttgctgagatggctgcaataggctttggcctatcgaaggatgcatttacttctttgatgaaagagggaccacatctcctcgcaccaactggaagtgacctgcagcgtcatggttctgagggcaccgtttttgctggattccactatgatcttaatttcttgacgatacatggccgaagtagattcccaggccttaacatctggttaaggaatggtaaaaagatggaggtgaaagtccctgttggttgccttctaattcagtctggaaaacagctggaatggcttactggtggcgattgtttggctggaatgcatgaggtagtggtaactaagaggacactagaggccatagcgctagcgaaagaacagaatagaagcttgtggagggtttcatcaacactgttcgcgcacattgcttcggatgcaattcttaagccgctcggccactttgctgaaacacctgatgctcattcctatccacctatatgcgctggggattatgtcgagcaggagctttcagtgattaacctgaagggaaaggattaagtatagactctatgcagctggtgcatctggatatcttatgaattgacagatatcaggatgcaacactaaatcaccccaactgacaattgggtatccgtttccaaatgctgctgtactgaagttttatcccttccgtaccgggcaacgcgcttgaattcccgtcccctgctcacggcggcgcttatctacccgt

SEQ ID NO: 17186 - DNA, 1527 bp, Zea Mays
gtgaaaatttgatctacttaatgtgtgcagcttcttttggggtatttgccaactgatcgttccttatggacttatgagttagaaaagaagcggagtcaatatagtgcatacagagaagagtttcttctaaatccttcagaaaaactacgaatgattgaggaaacaaagctgtcaagaaagaaagacacaagtattgagaggattggctttctttcgagattcgaagttactaatgaagagcatcctttaagctctggtaaatctagcctgtggaaccaatattttcaggattcagagttactagaacagatagaccgagatgtaaagcgaacacatcctgatatttcatttttctcatcaaagtctaaccaggaatccttgaggagaattttaattatattttcaaaattgaaccccagtataagatatgtgcaagggatgaatgaagttttggcacctttattttatgtattcaagaatgaccctgacccaagcaactcagcgtcagctgaagcagacgcatacttttgctttgtcgaattgttgagtggctttagagacaactattgcaagcatcttgacaatagcagcgtgggtattcgatctacactttcaaaattatcacaactcttgaagcgacatgatgaggaactatggcgtcacatggaggtcaccacaaaggtttacccacaatattatgcctttagatggatcacactgttgttgacgatggagttcagctttaacgtgtgtatacatatctgggatgctatcttgggtgatccagaaggcccatcggacacattgatgaggatatgctgtgccatgctcatcctagtccgaaagcgtctcttagctggagacttcaccgccaatgtccagctgctgcaacattacccagccaccaacatcgatcacctcctccacatcgccaaccggttgagaggaactgtacccggctagtgttttgttgcctttcctgcatacctgtacttcagttttgcccatgtgaccttcgtctggttaagtcgctaaatgcaatgttggtagcttgaaatatcactctgctccttgtgttctgttttgcctgtttcggtgtggccggagccggacgatgaatatcggagacacttcatgtgtcacagctctgagtagcgcttctgttttcattcacatggaaacacactattggagctccttccagcttgtagtacctgggaaagggaagaatggatgcattcctgaattgtgaaaactgaatatgggttctgctggatacgctcctctgtaccaaaagtcatatcctttgtagtgtactcttttaatgctttatgaattagagtatgtagaatgacttttgcaagaactgaaaataggaattgctgtgcaaagttattttgtcttgatgacatttgttgtgaaactggtgccaaatttcttgtcataaaaatatctagtgagagttggggtggttgttttaaagagtaaaatgcaatagtgatccccaaatttgcacttgtatgttgt

SEQ ID NO: 17187 - DNA, 292 bp, Zea Mays
aaccactatcataaaaaaactcgacatgcgggggtaagacagcctccgggcattgtattaagaagaatacattctcaaacagaccgagaacacccccgaacccctactccacccatacacagcggcatcgaagcccacgtgagaacgaccaagaccggggctgagccttaggcctgtgctttggcgtgggatagacaaggggattttttaaccacagcctgaaatttgctcacacggggagttgaacttaggacctgaggagtgctactcagacacctaaccaactcagcta

SEQ ID NO: 17188 - DNA, 4068 bp, Zea Mays
tcctgccagatggtgggtctgcaaaaagggcaagattgctacctgaccagagtgacgaaaatattcatttgtcagaagacattattgctagtcggaaggaggacatctgttttgaagagttatgtgatggagcatcgtctgttgataatgattctgtgaatcccagagcaggaaatgcaagctggggtctactaaatgaccatctgttagcaagaatctttcattttatgagggcagatttgaaatcacttatttcttctgcagctacctgtaagagctggaatgctgctgcgaagtattacagaaacatgtgtagattcattgatctgtcttctgttggtcctctttgcactgattcagtgttttgtgatattatggctggctttgagaagcaaaatattaggactcttattttagctggttgttcgaaccttagttcacatgcccttggcagagtacttgaacaccttccacaaatatcttatgttcatattcaaggttgcagtcatctaggggatctgaaaaataaatttcagcatgtaaaatggatcaggagctcattgaatccagaggggtcatatcggaaaatgaaaaccttgaagcagataggtgatgggaacaactatgcatccaaagttgcaaggaacttcgaccagctagatgattctgatgagcttgatggttattttgctgatatttcaaaaatcgagggtgctagccttttttcatttggacaaggtttctataaacgatcgaaattgcttgatgctagaaagtcctccgcggttttgtcgagggatgcagaaatgaggcgtttgatgcagagacaggcagagaacagttacaggaagatggaagagtttgtcataaacaggctgagagaaattatgaggtgtaacagatttgattttttcattccaaaggtttccaagatcgaaggtaggttgaaaaatgggtattatgctcgccatggttttcgtaccatcaagcatgacatccgtaccatgtgccaagatgcattgagatataaagatggcaatgatttggatgatgtaaagcaaattgttgtctccttcatacaactagcaaagagactagggaacccaaggtacatttctgagagaaacggagcagcagcccaggacagcctggacattagtcaatattcattcgatactaaactcaaaaagaagcaaaacaaaacaagagcaaatttggtggctgctggagcagataattcatctcgcgcatttgaccttgaaatcaaaagaagcctgtctaaattaaagaaaaaggatgtctgctctggtagtgaaacatctgatgatgatggctactctgaaggtgatgaaactgagagtgaaactactgtttctgatactgagagtgactttgatgtaaattctggagcctgggatttaaaaggaaattgcctaaagttaactgaacatggggagtctgtgatcgatgatcgtatattaggtgcccgcatgacaaaggccagccttgttcctccagttactaggaagtatgaagttattgaggagtaccttattgtagcagatgtggaggaagtacaacgaaaaatgagagtttctttacctgatgactattctgagaagttgctttcacagaagaatggcaccgaaaatttggagcttccagaggttaaggattatcaaccccgaaaagtagcaggggatgaaattcttgagcaagaagtatatggcatagatccatatacacacaatctactgagtgacattatgccttctgatcttgagttgtcacctactgacaagcatatctttattgaggagttgcttctgaatgcattgaataagcaagttaggcatttcactggtttgggaaatacccctatgacttacaacattaggcctgtcattgaagaaattcaaaggtctgcggaggatagtggtgacagacgaactttgaagatgtgcttggggatgctaaagtccatgagaaatcgctctgatcagaactttgttgcttatagaaagggtcttggtgttgtttgcaacaaaaaaggtggatttggtgtagatgactttgttgttgaattctttggggaggtctacccttcttggagatggtatgaaaagcaagatggtattaaacatatacaaaataacagtgaagatcaagctcctgagttttacaacattatgttagaaaggccaaagggagaccgacatggatatgacttggtttttgttgatgcgatgcacaaggccaactacgcgagtagaatctgccactcctgcaaccctaactgcgaagcaaaagtgacagcagtggatggtaaataccagattggagtttacacacttcgaccaattgcagaaggcgaggaaatcacttttgattacaattctgtaactgagagcaaagaagaacatgaagcatcagtctgcctctgtggaagtcaagtatgccgcggcagctatttgaatttttctggtgaaggagcctttgagaaggtattaatggaatttcatggtgtgctcgataggcatagcctactgctacaggcttgtgaaacagactctgtctcccagcaagacttgattgacttgggtagagctggtcttggtacctgtttgcttgctggtttgcctgtatggcttgttgcttacacagctcacctggtacggtttatataccttgagaggcagaagctccctgatgagatcttaaggcacaatgtggatgagaagcgacagttccttatagaaataaacatggattctgagaagaatgatgctgaggttcaggcagagggagtactaaattcaagattacagcaaatagtgcatacacttgacaaggtgagatatgttatgagatgcatatttggagacccaaagaatgctcctcctcctatggtaaggttgtctgggaaaagtttggtctctgccatctggaaaggggacagttcgatagttgctgaacttcttcagtcgatggaacctcatgttgaagaagaggtacttagtgatctgaaggccaaaatctgtgctcatgacccatcagattctgaagatattgagggaggcatccgtaattctctcttgtggctgcgtgatgaattacgaactcttccatgcacttacaagtgccgtcatgatgctgctgcagatttgatccatttgtatgcttatacaaagtgctttttccgagtccgggattacaagacagtaaaatctccaccagttcatatcagtccgcttgacttaggccccaaatatgccgataaactgggaccaggctttcaggagtactgcaagacatacccagaaaattactgcttagcccagcttatctattggtatagccagaattcagaacctgaatctagattgacaagagctagaaaaggttgcatgtcattgcccgatgtctcgtccttctatgtgaagtctctaaaaccattgcaagagcgagtttatgggaacagaactgtgagattcatgttatcacgcatggaaaaacaggcacagagaccatggccaaaggataggatatgggtgttcaagagtgatccgagatactttggcagtccaatgatggatgccgtgttgaataattccccccttgacaaggagatggtgcattggctcaagacgagaccaaacgttttcctaggctagaaaaaaaatgattgtaggcagataagatggtatttggttgtttctcccttttggagattttagtctgcaggattttttttttccaggctcacaccttggctacctgatcacagggagtttagcttatagatagcagggtaacagtcaccaccccccatctgtacattccccagtccctacataccttgcggagatgtatctggttagtaaatgatagatttgtcattgatttaatgtagtgaattttcccataggaatgcccccccccctcttttgtttcatgtaaatgcagaacaatttcaatcttgaattcagtaatgtgttacaggcattttgcatttctatggttcagttgggttgtttcagtcaataaaatggttttaagggctcaata

SEQ ID NO: 17189 - DNA, 3002 bp, Zea Mays
cccgtctatttattggtccctctcccgtcccagagaaaccctccctccctcctccattggactgcttgctccctgttgaccattggggtatgcttgctgccttgctctcctgttcatctccgtgctaaacctctgtcctctgggtgggtttttgctgggattttgagctaatctgctggtcccggtagaaaagatcatgtcccctgacgagctcaagcgctcgccttagccgcgtccttgccccccgccattttttgcggtttcggtgtgttcccgtgactcgccggtattctgaaccatcgagccatggctgccaagctgactcgcctccacagtcttcgcgaacgccttggtgccaccttctcctcccatcccaatgaactgatagcactcttttccaggtatgttcaccagggcaagggaatgcttcagcgccatcagctgcttgcggagtttgatgccctgtttgatagtgacaaggagaagtatgcaccctttgaagacattcttcgtgctgctcaggaagcaattgtgctccccccatgggttgcacttgctatcaggccaaggcctggtgtctgggattacattcgggtgaatgtaagtgagctggctgtggaggagctgagtgtttctgagtacttggcattcaaggaacagctggtggatggacaatccaacagcaactttgtgcttgagcttgattttgagcccttcaatgcctcctttcctcgtccttccatgtcgaagtccatcggaaatggagtgcaattccttaaccgacacctgtcgtccaagttgttccaggacaaggagagtttgtaccccttgctgaacttcctcaaggctcataactacaagggcacgacgatgatgttgaatgacagaatccaaagccttcgtggtctccaatcatccctgagaaaggcagaggagtatctactgagtgttcctcaagacactccctactcggagttcaaccataggttccaagagcttggcttggagaagggttggggtgacactgcgaagcgtgtactcgacacactccacttgcttctcgaccttctggaggcccctgatcctgccaacttggagaagttccttggaactataccaatgatgttcaacgttgttatcctgtctcctcatggctacttcgcccagtccaatgtgcttggataccctgacactggcggtcaggttgtgtacattctggatcaggtccgtgctttggagaatgagatgcttctgaggattaagcagcaaggccttgatatcactccgaagatcctcattgttaccaggctgttgcctgatgctgctgggactacgtgcggtcagcggctggagaaggtcattggtactgagcacacagacatcattcgcgttcccttcagaaatgagaatggcatcctccgcaagtggatctctcgttttgatgtctggccatacctggagacatacactgaggatgtttccagtgaaataatgaaagaaatgcaggccaagcctgaccttatcattggcaactacagcgatggcaacctagtcgccactctgctcgcgcacaagttgggagtcactcagtgtaccatcgctcatgccttggagaaaaccaaataccccaactcggacatatacttggacaaattcgacagccagtaccacttctcttgccagttcacagctgaccttattgccatgaaccacaccgatttcatcatcaccagcacattccaagaaatcgcgggaagcaaggacaccgtggggcagtacgagtcccacatcgcgttcactcttcctgggctctaccgtgtcgtccatggcatcgatgttttcgatcccaagttcaacattgtctcccctggagcagacatgagtgtttactacccgtatacggaaaccgacaagagactcactgccttccatcctgaaatcgaggagctcatctacagcgacgtcgagaactccgagcacaagttcgtgctgaaggacaagaagaagccgatcatcttctcgatggcgcgtctcgaccgcgtgaagaacatgacaggcctggtcgagatgtacggcaagaacgcgcgcctgagggagctggcgaacctcgtgatcgttgccggtgaccacggcaaggagtccaaggacagggaggagcaggcggagttcaagaagatgtacagcctcatcgacgagtacaagttgaagggccatatccggtggatctcggcgcagatgaaccgcgtccgcaacggggagctgtaccgctacatttgcgatacgaagggcgcattcgtgcagcctgcgttctacgaagcgttcggcctgactgtgatcgagtccatgacgtgcggtctgccaacgatcgcgacctgccatggtggccctgctgagatcatcgtggacggggtatctggcctgcacattgacccttaccacagcgacaaggccgcggatatcctggtcaacttctttgacaaatgcaaggcagatccgagctactgggacaagatctcacagggcggcctgcagagaatctatgagaagtacacctggaagctctactccgagaggctgatgaccctgaccggcgtgtacgggttctggaagtacgtgagcaacctggagaggcgcgagacccgccgctacatcgagatgttctacgccctgaagtaccgtagcctggcaagccaggttccgctgtccttcgattagtacggggaaagaagaagaagaagaagcccaggccggagaaccatcgcctgcatttcgatctgtttcaccgcaattcgcattgttagtcgtgtattggagttatgtgtacttggtttccaagaactttggttccttctcgttttttttccttgtttgagcgtttttgggcagcgctggcctggttcctagtatggtgggaattggctgcaccttttgcttcgaataaaaatgcctgctcgttcaccaaaaaaaaatcataaaataaaacaaaaccagaactcagatgg

SEQ ID NO: 17190 - DNA, 1791 bp, Zea Mays
ttcccagccctccaaaatccagaggtctacaaaacctttccccaagcaaccagaattctaagttcttccagtttgtttcaaagatgagccgaggtgaacttattatagaagataatcaagtaaaagaaggttcagcatcccaatccagtggctgggctgatgaatttcaaacaccgtacattgctaatgcaaactcatgggcagatcagtttgcacatgaagagctttcacaaggggcggataagtgggttagcgagttctctagtcaacctaatcatggtgcactaaatgagaactgggttgatgagttctcgaaattaaatgttactgacgaatgggcagaggaattcagtggaggtggttttggcgaaagctctgctgatccatgggtagatgagttccaagaacacttgtcatctttcaaacaaagtccgggcgcctctcgaggggtttatgttttttctgagaacaacccgtatgttggtcaccctaatccaatgcaggaaggacaggagctcttccgcaagggcctcttaagtgaagctgttcttgctttagaggctgaagttttgaagaatcctgataacacagaaggttggaggttgttaggcgtaacacatgcagaaaatgatgatgaccaacaggccattgcagcaatgatgcgtgcgttggaagctaatccaacaaaccttgaagttcttcttgctcttggtgttagtcacacaaatgaattggagcagggggaagcattaagatatctttataggtggcttcagaatcaaccaaaatatggtggccttgtccctctgcagtcaactgattcaccttatggtcctgatgttgttagattgtttaatgaagctgctcagatgtcacctgaagatgcagatgttcatatagttctgggagtcttatacaacctatcaagagagtatgataaagctatagcttcatttaagacagcactacagctcaaaccacaggactattcactctggaacaagcttggtgcaacccaagcaaacagcatccagagtgctgatgcaatattggcgtatcagcaggctctggacttgaaacccaactacgtgcgtgcatgggcgaatatgggaatcagctatgccaaccagggtttgtatgaggattccattcgatactatgtaagggcagttgcaatgaacccaaaagctgacaatgcctggcagtacctgaggatctctcttagcaatgcttcgcgagcggacatgattgctgcatgcgacgcccgcaaccttgacgctcttcagaaagagtttcctctgtgagccctccggtccaaggcattagagcttccatggaaggaagcagcacactagcaagccgagtgactgcacctgtggtcatggaaatggaattggaaaccagtagcgttttgtatttgcctgttgattcttatatttatttttaggaagtgggggaatgtgtagcaactaggaagcgagggaacaacatccagttgatgtgaagcattcatggcacagtaggcaatagtggcaaaggggtactatacatacacacttacgggacgcacaacataaataaagaatggttgattaataaactatttattttggggacacacccctaggatcaacccctacttgtttcgagtttgaatactgatttgtatcaacaggcaataaataatgcgctttgtaaccttttatatcataatgtaatgcgcacgcccaaatcagttgtgtctaagaaaaaacttgacaaaatgaagtaacaaaaagaggaacttctgtg

SEQ ID NO: 17191 - DNA, 4145 bp, Zea Mays
ctggcaatgagcctgaggccgagctgtgcccattgtggattaagaagttcaatagagaactaatgcgaacactctcattttcggagcatgaaacgtttgaccatcccgtggcatgtcttctagttgtgtcatcaatggacaaagaaccagtcaataaatttgttgatctcttcaacacaaatcagttgccatctcttttgaatgaaggcataatggatccacagattttgaagcattatcttgtacttcatgaccagcaagaggggccacaagacatagctgtgaatgtcttagctgaaatgaggagtacccttggtctgaatgactgtaaattattatgcataaattcgtctacagaagcaggtggtagtaatgctgacaattcatggctaccttataaagctcttgttttgaacaatcatgatggatcctgtattcttagtgtggatgatctgaatgagataaaggacttcatgcaagattttgtttcaaaccatatcatcccctacatggaacaaaagatccgtgtcctcaatcagcaggtagccacaacaagaaagggttttagaaatcagatcaagaacttgtggtggagaaaaagagatgatgtcccagaagctccaaatgggccaatgtatacattcacctccatagaatcacagatcagagtacttggtgatttcgccttcatgttacgggactacgagcttgccttgtcaaactacagactactcgctactgattataagcttgataaggcttggaagcgatttgctggtgtacaggagatgagtggactttgctatttcattttggatcagtcgaggaaggacgcggagtattgcatggaaaatgccttcagtacatatttgagaattggatcttctggccagagaaatgctactagatgtggcctttggtgggctgaaatgcttaaaacaagaggacagtatagggaagcatctaatgtgtatttccgtgtttctaatgaggaaccttctttgcattctgctgtactgcttgagcaagccgcttgttgctatctattatgcaatccacccatgcttcggaaatacggatttcacctaatcttagctgggaatagctacttcgtgtctgatcagaaacaacatgctgttcgggtgtacagaaatgctttgttcgtttacaaacaaaacccttggagttacatcaacaatcatgtacactttaatattggaaggtggtatggagttctcgggatacttgacgtagccatcaagcacttgcttgaggtcattgcttgtagccatcagtcgctgactacacaaaacatgttcctcaatgattttttccattatgttcagagcatggggaagaaatttgatgtgtacaagctccaacttcctgtttttaacatgtcatctctcaaagttctacatgaggatcatcgcacttatgcatcacatgcagatgttggcgttagtgaaagcacgtggcaggagctggaggaagaattgatcccatcatcatcaattgtcaaaactaattggctggatactcagccaatgagaaaatacaaggactcctgtatttgtgtggctggagaagcagtaaaattgagtgttgaacttaaaaatcccctccaaattcctgttgctgtttctggcatctctattatatgccagctttccagcactttggatgcattaagttctgatgttagtggactggacttggatggtggggaagataaggttaacacagagccatctatttcaatgttggagactgatggagataagtttacattgtcaaagcttgacattgtattaggaggaggtgaaagtaaaagagtgcaacttgatgttactccaaaggttgaaggtattttgaagttggttgggataaggtggactctttcagagtcagtagtaggttatcaatactttgaatttaatgcacagaaaaaaatcaagaaagggaaaagaggcccacaccgttcttggaataacagcctggttgtaatcaagggtttaccaaaacttacaggatctattgatcgcatgcctacaaaagcgtttgctggtgatttaaagctgcttacactaaatctgagaaaccattccgaatatgctgtgaagggtataaaaatgaaacttagcaacccaagatttttaattcccggcgattcatcggacattggcctcaagttcccacactgcttaaagaggcacgtgcaatcagaaagcagtgttgtatcagccaaaactatgaaggacaatttcaagagtctgctctttgcatttcctcaggatatagaaattcaagcaggggcagcactctcttggcctatttggtttcatgcggcaactcctggaaatgtttctctttatatatctctgtattacgaaatggggagttccagtgatattaaataccgtacactacgcatgcacttcaatcttgaggttttgccgtcacttgacgtatccttttctgtaagcacgtcctcatcaagattgcaagagtatattgttcgcatggatgtcatgaacaagactccatcagagtcatttgtgcttcatcagttatcatgtgtcggtgataaatgggcagtttcagcattggcggcgtgcagttcaatcaactctgttgaaacagtatcagaaaatcaggctgtgtcgtacttcttcaaaattaaggattgtgaggcggattcttgtaaagaggcagaaagtgattcctgcacaagcgatatggctttgtgtccaggaagtagcactgatctgtttgacattgcacgatctccttttgttgattttcaccatcaagaaagatgcaggcaagtgaagatggcaaaggggccatgcagccttcttgattttgttctaatctcaaaggcagttgataactcttccaagcctactccagacttcgaactactttctcatcacacatgtcattgcagtgctctaagccagaaccctatatggtggcttatggaagggcctcggacaattagtcatgatttctcaaagtcttattgtgaggctaacctccaattggtcattcacaattcagaagctcataagattttggtgagagtggtcacttttgatgtaattccagagaaaaccgtccatcctcatgactcaaccagtgctcagggtggatggtatgatgtatcactggaaagtgacgtaaaggccatctctagttccaagagtacacatcaagagaagcgatcttcgaagagcattccaccatatgtttggtgttcattgagttgtgctcaaatcgagctccaacctgacagttgtgctagagttcctctaaaagtgtgcatatttgcaccgggcacatacaatttttccaattatgagctgcaatggaaagtgcatctatctgagggaccacatgtgggtgaaaatgagaaccggttatctggcggtggtctaggctatcctttctatgtcactgtccttcaaggtgtctaagtaattatcaggattcaagaagtaccttcttgagcgtcaatatagaccagtgcaaaactcaggaactacacccaattgcaacgggctgatgataataggtgccagccagtccagtttgtgcaaagatctgccccggaagttccctgactgaatatacttggatacgctcatggttctgcttcggtaccgatatatttacacgtcattttgaaggatgagttctggtgagtacatgtatacaattgtcgctgggaacaaaaactaacggtaattgctggtggatttttggcagacagaatataccgatagaagttttgcttgtctaattgttgatggtggctagtaggagcatatactattcctgtacatcctgtttaacttgtcgctgctagacgatttcgcaaatgtagtatgtagtggtagatggatccgataaattttctgtaattttgacgaggtaatcaggcaatcgtctcgagattgttgttgtatgggcgacagtattttttcattgtttgtacaatccttttaaaaatcatcgtctggccttgagcctttatgccatatgggtatatgttgattccccttttcagttcctcgtatcgacgtccagctgtccacatcaggtgcaagtgtctgaggggtgctgttatttttgatattttc

SEQ ID NO: 17192 - DNA, 1983 bp, Zea Mays
caggcgtccttccgccgctctgttatgaataatcattttttcgaccaccgcacgtcatggttcatagtttaagggcttgatttggataattagtcatcaacagaagtgataaaaaatggtggttcttgcagcatcaatcgtttcaaagtcgggaaaagcacttgtttcaagacagtttgttgacatgtctcgcataagaattgaaggattacttgctgcgttcccaaaactggttggaactgggaagcagcacacttatgtcgaaactgaaaatgtgcgatatgtttatcaacctattgaaggtttatatcttctacttatcacaaacaagcagagcaatattcttgaagatctggacactttgaggctcctctccaagctcgtgcctgaatactccccttcattggatgaggagggtatttgtaaaacagcatttgagattatatttgctttcgatgaagccatatctcttgggaacaaggaaaatgtaacagtgcaacaagtcaaacaatattgtgagatggagagccatgaagagaaggcacacaagctgatgatgcaaaccaaaatcaatgaaaccaaggatctcatgaagaagagggctaatgagcttgacaaaatgaggatggaaagaggcaaacttgacaaaggaggatactcatcaatatctggtccacgcgtgattgaaaaaactttcagtgacatgagcatcagtggttctggattaggtggactgagcactgacatggactcatttgctagcaagcccaaaggccgtccatctacagcagctactgcacctggtaaaggttttggtatgaaattaggcaagacacagaagacaaatcaattccttgaatctttgaaagccgaaggagaagtcattttggaggatgtacaaccaagtgcagtttctacaagatcatctgctcttccaagtgaccctgtcacagtaactatagaagagaagctcaatgttgttgttaaaagagatggtggtattaataactttgatgttcaaggaacacttgctcttcaggttctcaatgatactgatgggttcatccaattgcagattgaaagccaagatattcctgggcttagcttcaaaacacacccaaatatcaacaaggatttgtttaacagtcagcaaattttgggagcaaaagatccaaacaggccttttccgagtggtcaaaatgaaactcctctggtgaaatggagaatccaggggatggatgagtcatctttacctctgtcagtcaattgctggccgtctgtatctggaaatgaaacctatgtgaacattgaatatgaagcttctgagatgtttgatctgcacaatgttgtcatatctatacctctgcccgcagttcgggaggctccaagtgtcagacagatagatggagagtggaagttggactcaagaaactctgtgttggaatggtctattctccttattgatcagtcaaatcgcagtggttccatggaatttgttgttcccccagctgatccgtcatcatttttccccatctctgttggattttctgcatcgagtactttcagtgatctgaaggttactggaatccttcctctgaaggaaggcaaccctccgaagttttcccagcgggctcgtttgctcacagctaactatcaagttgtttaatggttgtaccgttgtccgagtgttgatccacttaaatatattcgaatagcatatttttgtgacatggcatgctactggcatgaacttttgcaagtcatgggatggaagatcattttgggttttgaaaacctttactatgtgcttctcattgttagcatgttgcacaaatgctctgatgtgttgctaccagagaaataagtaatgttcttgcctttcgtttgcctgcattttgtacccgttctttccccttgaggataatcttgtaaggacgatgttatcgtctgggcttgtgtaatgtgatctgctggtggaagagc

SEQ ID NO: 17193 - DNA, 2504 bp, Zea Mays
gacccatttatgctttgcaaatcatactgtttccaataattatagttggtcactatacacggtttttagcagacatggactcttgcgtattttccaatttacaaaaggaaaaatattaaaaaatagtaataaaaaagggaaaaaaaacaatggagacatcgtcgtcgtctccttcctccctccttcctggtcgcccatggattattccatagatacgacctagctgcgctgctacagcccccgcatttcccttcccccaatcctctcctccacgaacacgccctcccttttgcccgttcccagcctcgaacggcaaatcaaaaggcagatatatgagctcttggtcatcgtctccacgccccattggtagccgcctctgaaattcctataaaaaaagatatatgggtggagccatcacccacgccgccaagatcctgtcttcttgcgcggccagctcgtagctccacgccggatagatagaagaggccaacctttcctccccgcttgctccccttttctttcggcaggattgcacatcttcccccacgtgacacctgagaaagctcctttcctgctgcggaggccgtcgtacggttcttgatccggggagcacacctggggcgcgccaatgcagccggacccgagcgggaacaccaatgcgaaggcgaagctgccgttgatggctccggcgccgtcgtcggggcgcccggcgtccgtgctgccgtacaagacggcgaacgtgcgggaccactatcgcatcggcaagaagctggggcaggggcagttcggcaccacgtaccactgtgtgggcaaggccgacggcgccgagtacgcgtgcaagtccattcccaagcgcaagctgctgtgccgggaggactacgaggacgtgtaccgcgagatccagatcatgcaccacctctccgagcaccccaacgtcgtccgcatccgcggcgcctatgaggacgcgctcttcgtgcacattgtcatggagctatgcgccggcggcgagctcttcgaccgcatcgtcgccaaaggccactacagtgagcgcgcggcagcgaacctcatcaagaccattgtcggggtcgtggagggatgccactcgctcggggtcatgcaccgggacctcaagccggagaactttctctttgccagcaccgctgaggaagccccactcaaggccactgactttgggctgtccatgttctacaagcccggtgataaattctctgatgtcgttggaagcccttattatgttgcaccagaggtacttcagaaatgttatggtccagaagctgatgtgtggagcgcaggggtaattctgtacattttgctttgtggtgtccctccattttgggcagaaactgagtctggaatcttcaggcagattatgcgagccaaacttgattttgaatctgaaccctggcccagtatttctgatagcgctaaggatctggtccgcaatatgcttactcgggatcctaaaaagagatttagtgctcatgaggttctctgccacccatggattgttgatgatgccgtggcgcctgataagcctattgattctgctgttctctcaaggctgaagcatttttcggcaatgaacaagctcaagaagatggcattaagggttattgctgaaagcctgtctgaggaagagattggaggcctcaaggagttgttcaagatgattgatactgacaatagtgggactataacatttgatgagctgaaagatggcttaaaaagggtaggctccgaattaacagagaacgaaatccaggctctaatggaagcagctgatattgataacagcggaaccatcgactatggtgaattcatcgcagctactctgcacatgaataagctggagagggaggagaacttggtttcggcattctcattttttgacaaagacggaagtggctttataaccattgatgaactgtcacaagcatgtcatgaattcggtcttgatgacgtccacctcgaggatatgattaaagatgttgaccagaacaatgatggccaaatcgactacagcgagttcacagcgatgatgaggaagggcaatgctggtgcaacaggaaggagaaccatgaggaacagcttgcacttgaatctcggcgaactcttgaatcccagcaaaacctagcgtgcattggaaggtcttgtcgggtacattcccatggcatatgaagattttggatgcgttgtcgatcggctggcctattctgagatgttgagcggttgtcctgtggtattactaagatgctgaagaattttcctagaagtacaactgccctgcggcatatatgtataactgtcgatgtaatgtagattgaacatggtctaaacattacttccctagaagtacaacttctctgctgtcaagtgtgtgtttagttgatattgaatagcaatttctttctctaatttcattgatgactcttttttacaccttcgctcatttttggtgtggcacgacctatattcttcttaac

SEQ ID NO: 17194 - DNA, 1720 bp, Zea Mays
ccaggaaagtagagggtttggatggcggaattgtcgaggatgggaaggttcagggtggctcattggtgcagaagcttagtcagtctaatgagatcttgagcgtgggcaacacagatattggatccggtagattggatggcaacgcgtcagaggaaagccatcagattcacaaggatggtgaaatcactgcagatcaatcggagagcaagcatgacgggaaaattgatgagaattcaggtatcaatcctgccgaggtccaaatgcacgatcaggagagcaagcatgaagagaaaaacgatgagaattcaggcagcaatcctgtcgaggttcacaaacacgatctggacaaagaacatgtcgaagaagttgaccagaagtcaagcagcaaccatgttgagatcagtgcgcatgatatgtgtgaggacaatgaacatgttgagaaaattgatcacgttgaaagaatcgatcagaattcgagcagggaccctgtcaaagccatcatgcaggaaatgatcaaagtttgtttggtcagtggaagcgtggagaaggtggaggaagaggactcaagcaagaaggacttggagaaagagatagccccaaaagataataaagatatggaggcctctgatggaagcaagctcggcgtcaacggtccaggtatcatcctcagcaagcataatgatgagtgtggtggtggtgcccaagaggctgaatcgatggagaacacgccgacggcacagctgatgatgcatcaagaccaactcttagatgacatggttactgatactgttacagaaactggaggtgctgttgcagacactgaagaagatgatactgttgcagagacagaagatgttgttacagacactgaagatactgttacagacaccgaagatgctcttgcagaaacagaagcagagaaaggtgaaagagcaatcgcggacaagggtgagctcgagcaggacgaaaagaaagatctggtagcactccctgaacttgccagctcaccagcactgtcatcgttggttaagccaacagtagtgaagaaagagctggactttccgagacccaacgaaacggggatgaagacagagcaagattacactaacggtgagctgagggagcacaatgacctggtcagcaaagtgcagggagaaggtggcgtcgcgacgaccatggagtccaggagctctgctctgatgatcattctcgctctgatattcgcgctggccacgggaataacgatcgtcgtgcgcctctactccccttcccgagcaacgaaactccagatggatctgccataagcctgcaatcggtcatcaagtacgatttctgaggctgcaaagttccattgggatttttcgtggcctcgtacgcgcgcgcgcatgaacggcgaagttaggagctgctggagtgtgtgcaagtacaagataggaagagaagtctaccatggtcatgaacgaattcatatggccattgtgcagcacgatctgtctgtgctggagaagttacacgtgtggtgccagctaccaaaagaaagaaccgaggtccgagagcagtagagtaggtttcttccggctgaggagcgcttgtttttcttttttcttcttttaaaagaaatatatattattttgcaagccatgttagtgctgatagtctatggaaatgcctaaaccatgttgaagttcgtgcttggttttgtttgatttgatcgcctgtc

SEQ ID NO: 17195 - DNA, 460 bp, Zea Mays
ggccaataaagcatcgtcttgacggcctccttaaccacaccgccatactctccagcctgctaaacaagctagccgccatcaccaatccacaagctagcaaagatgggttgtgcggaggagatcaatctggccgaactgtggcgggatccttcggcgtgcgtgaccaaaaaaattggagagccaccgagactagtagactggtgggaatcgcatcgaccgtcggggttggccaccgccgtgaggcacccgattgctgcagcctgttctgtctcatcgtccattgaagtgaggtttcgaggatctgaagaatcaccctggtaattggaatctcaagtgtcaggcaagttgtgcccttgaccactttttacccaataatgttctttaatatcatttatccctgcataggttaattttgatgggacccaataggtcaccctagattgtttatctcattaccttg

SEQ ID NO: 17196 - DNA, 1043 bp, Zea Mays
ggcggccagggagggtgatagattgaccgaccgaacgccgggcctccgagtttccccgggactatgatggtgcgtgcctgcagatgcggctgtcgtacagtcccgcagctcatatattcctcttcctggtgcagtggacggactgcagcctcgcaggggctcttggtctgctgagaatcctcatatacaaggtttatgtggatggcacaacaaccatgtcgactcatgagaggaaagccagcatcaaagaattctatgctgtgatatttccttctttgctgcaactgcaaagggggatcactgatgtcgaggacaagaagcagaaggccatatgcatggagaagtacagaaagaaagatgaggatggacgggacaccttatctgatattgatgttgagagggaagaggagtgtgggatttgcatggagatgaacagcaaagttgtgttgcccaactgcacccatgctatgtgtatcagatgttaccaggactggagttcaagatcgcagtcctgcccattctgccgtgacaacctgaagaagacctgtcctggtgacctgtggatctatgttgaggaccaagatgtggttgacatggagacggtgtcgagcgagaacctcagacggctgttcatgtacataagcaagctgcctctgattgtcccagacgtcatcttcagtgtgtatgattcccacatcaaatgacttccgacgcgaccttcctgacgaccttcagccagtgcccagctccagttaatcttatgcccccatgtcctccattttcatgctttgctcaagcttttggaagtgcctgaactgatttggaaccgcaagccttccggtggtgctttagaaacttgtttagtgcctgcatgcatccttaatcatatgcagccactctgtacatatctgacttggctcagttaataggggactgtgcttgccccaaatggaggcagggccgtttgtgtctttctcatgtttccattagcgaagcaacgcaaagttctggggggcattggaaggtttctgctgcaatgttag

SEQ ID NO: 17197 - DNA, 175 bp, Zea Mays
taggtcaagaacatgtaccacaggatgaggcgcatggaggatgctgcgatgtgttcatgagagatctagaccgtcgtctcccagtcaactttgggttgctggatcgttgtctccttacgatgtaattatttatttattttatacagaactcctattatataataaagttgtgaca

SEQ ID NO: 17198 - DNA, 3941 bp, Zea Mays
cgcccactacctcccaatcccaagtcccaactcgctccccattcgcctccctcccacccggctcctgtcctcttcccctccccaaccagcctccctcaaattcgccgatccccaaatcccgctcccctacaccacggtagctgagaagacggccggcgaagatgatgttcacggagggcctcgacgagtcggcgatcagctggatcaagcagggcatggactccccagcctcagccccagcccccgcacccccacggtccccgctgtcggagcgcccgccgctgggacaggtggcggcggcgccgaggagccccgcgctgcacgccaggccgtgcggggccggcgcaggcgtcggtttcttctcccccaagggcctcccgcaagtgcgggtgaacgggacgcaccactcgggcctgctcggccgccactccgtgctcctctcggtcgcggactccgatgagtgggaggacgagagcgtcgcatcgtggggcatgcccgaggactgctacggcggcggcaacttctccgagaccggcgacgaggcgtgctccagcgactccagactcatgcggagggccatggaccgctgcggcggagggtgggatgaggaggtcacgtcgcagctgagcaggaagggcggcggcggcgggatcgtgcgggggcagtccaaggagttcctgcgggtggaagtgcgaggtgcgggagcgttcgatgccgggaagtgctccggttccggggcacaacatccagtggactccatctcgcagggacgctactttgaggagcaggtattggggactcctagtgcccctccaattgcaggggtcgaggaggatgttatgtttcatgcagttgggctgaaatggatggagggcttgagaggaatggagtatcatcagtagcagatatactggcccaagatgttcatgagcttcatacgagctcaattgttcatgaagatggcgttgagaataacttattagctcagataccgagcttcactattaagttatgtctgaatgcatgggcaagaaactgcatggaagctccagacttccttcgggatgagtgcatggtactgcgaagtgcctttggaatacagaacttcttgcttcatccaaaacacaatagtcaagttgatggtaaacaaatgtatgataaggatggaaattgtactataaagggaaggaaacttgttaaacagattgagattgaagtaaaaaagatacgggttgtacctcaaagaccaaagcttcgagcaacatcatcctttagaaatctctacatgcaagctggcagtgagtatgtcagacagatttctaagattctgaagagccaggttacgatgttgacatccacatcatctacatctttgccggaagaaatgttcacatgcactctagaactgcaaagttcttgcaaaggtcataagagagattcaatttctccacaatatttgaagccagggactggtgaatctcaactcttttatctagagagccagggggatgttattcttgttgaagtacaagacaacaatagggttgtcataggccgtgcaaaaattcaagtttcatcattgactgatactcaacaggatgaaatcatcaggtggtggcctctatatcttgatgatcaagattgtgtcggaaaagttcagcttggtatgaatttatccatgtcttccaataactatgggtccgaaaagatgctgcaaggtggccctgcagtggataccatcatatatgacatggttctggaagcggcaatgagggctcaaaatttcaacagcaaaatgcttcatatcaatggtccatggatttggctgttggacgagttttctgattactatggaatatctgatgcatatagaaaattgaggtacttgtcttacatcatgaacgtggcaataccaaccaaggattgtttggaacttatatatgaacttatcgttccagtcacaaaagcacgagaagatagaactttaacaagacaagagcgaagtattttgatagactgtgaagatcggattaagagtctccttgcagctctgtttgaaaattacaaatcactggatgaatattctccaactggcttgtcagatttatttggccccataacagattctgctgcaccagctttggcacctgctgttcagatattcagtgtactgcatgacattctctccaaagaagcacaagacatacttaggaactatttgcagattgctgctgcgaaaaggtgcaggaggcatatgatcgagacagatgaattcttatcaagcaataacgacagtcttcttacggaccctatgactatatctgctgcatatcttaaaatgaagacattgtgcattaacatgagtcgtgaaattcaagctgacattaagattcacaaccagaatatacttccaagttccatagatctgccaaacatagcagcatccctatatagtaccgaactctgcaagcggctgaaaggttttctttcttcaagtcccccatcaagaccagtacaacatgttgctgaactgataaccgcaacttctgagtttgagagagatcttgaatcttggcaagtgagacctgttcatggcggcgtaatttcgagacagctctttcatgactacatcatggtgtggattgaagacactcgattgcagttacttgataattgcaaagctgagaagatatcatgccctgccgtgtcaacagtctcgccatttgttgagcaaatgtatgagcaaataaaagagagcataaatgagtatggagtggttatcaatagatggcctcaatatctgatgagtttagagagtgctgttgctgatgttgagagagaaattatgaaggcactggagaagcaatacatggatattctaatgcccctaagagatggcataccagaaaaaattgagaagcaggtccagagattaacaagaagacaatctatagctccctatgttgtgccaaatcagttaggagcattcatgaacacagtaaaaaggatgctagatgtgttacactgccgagtcgaagacattctcaagtcatgggcagcgtaccttactatatcatgtgggaacactgtttttggagagcaaatgaactccatcacagtcatgctgaagaagaagtacaagaaatacctgcaagcgatagtggacaagcttgtcagcaacacacaagctaatcggaatacgagactcaagcgaattcttgaagaaacaagagaggctgatggtgaaagtgatatacgagataggatgcaggctgtccgcctccagctctcggattcaattcacaatctgcatgaggtcttctccagcagaatatttgttgctatttgccgaggtttctgggatcggttaggccagattgtgttgagatttcttgagagcagaaaggagaacaggatttggtaccgaggatctgactatgctctagggatccttgacgatgtctttgcatcggagatgcaaaagctgctgggcagcgctctgcaggacaaggacctggatccaccgcagtcagtgattgacgcccgctccatcctctgctagggcgtgtggcaacagttttctctacagattgcttcagcaaaaggccggcgttggtttagtttttgttttatatatattccttggtgtgcagaatatgtacagatggagacaaccgattattcctgttcatagtgttttgctgaattgttcaaataaatagtggttaaaaaaactgtagcccgtaaacaggttagagaacacaatctgtacttgattgtgtactttctacctcagttcttgccttccccatctaattccatccaaatattgtaccctgaattgagtgaaccttgatacaactgattcttgttggctcatatgtgttcaagcctgcaatttggagaacatcttttccccaatttacctcacctgtgccatg

SEQ ID NO: 17199 - DNA, 1518 bp, Zea Mays
tccaaaaataaaatccaatcgaggggaaaaataatccttttcccgttcttctgaagctgtcctcttcttcccgtcgcttcgccgtcccgcaccagggaggagaggaggcttcaccgcgaagctcgccatgatctcgccggagaggagttcgtcacagagcccgcggtcgcaggcggtggcgggggcgccattcctgtggatatctgtcatggatcccgtcagatgggcaccggcgtgcaggcctacatctcctaccgcgtcatcaccaagaccaacctccctgaatttgagggaccagagaaaattgttattcgacgctatagtgattttgaatggttgcatgatcggcttgctgagaggtacaaaggcgtttttatacctccccttccggagaagaatgctgttgagaaattccggtttagcaaggagttcattgaattgcgtcgtcaagctttggatttatttgttaacaggatagcttcacaccctgaactcaagcaaagtgatgtcttgaggacatttttgcaggcagatgaagagataatggatagggcaagatcttatgagaccggtatttttaagaaaccatcagattttttacagatgtttaaggacgtacagtcaaaagtcagtgatgttgttctgggaaaagaaaagcccgtggaggaatctactcctgaatatgagaagcttaaaagttacatatttgagctagaaattcatttagcagaggcccaaaaacaagcataccgtcttgtgaaaagacacagagaacttggacaatctttggcggacttcggaaaggcgattaagcttttgggctcttgtgaaggagatttgatggaaaaggtgttttctgaagttggttcaaagtcagagatgttgtcaataaagctacaaagagaggcagacaaccttctctttaactttgaagaacccttgaaagattatgtgcgtgctctacaatctataaaagccactatgctggatcgagctaatgctttcaggcagcactttgatttggatcaggagaggaagtataaagagcttaatcttgaaaaattgaagttcatgaaccctgagaagtatgccgaagcagaatctgagtttagagggttgaaagcagacagtgaggaggctacgaagaagtttgaacacataggtcaggctaagctagctaaggacattgcggatgcatggcgcagcgtcctcccaaagctcgaagcttgttccacatcataaagtgtgatccgtgtttcctcatgatgtttgggaaggggttggtagctggtgaggtttaggctgttttttttttccagcctgttttgacacggattcctgtatacttgaactgcgggttggaaatgtaccagctgttagattcagttgacataatttcttgctgtttgagcctgtaaccatcatctcttcttagatcaattgacacaactgctggaatcgcgtaataatggtaatcaataatgaagaaatgctgtaccacggtgctggttcctgtaa

SEQ ID NO: 17200 - DNA, 485 bp, Zea Mays
aaagcaaaataaaaatgagaaacagcaaagaaaaacacaagacctcctattcaccatgccgaccgaagagggttccgacggcggtggcggcgccggagccggagccggggagaagaagagctcgcaggcgcccgcaaagcctggagcgtgcggcgccgcaaagttcctcgcggggttgccgtcgcgcggcaacttctcttccggctccgccccctccaatctgggagggttcagggtttacgtctgcgagcacagcacagatcccccagaaggacaagttataaagacggattcaacgaatattttaatcaggcatctccagttgaacaagcagaagactgagggcaaagatgtggattccagaactgtcggcgaaaacaacagagggaaaagatctgctgccagaagtttggatgtcaacaattcagcaaagaaggctaacttgggtacttcatctggatcatcagcctatgaggtactttaat

SEQ ID NO: 17201 - DNA, 1504 bp, Zea Mays
caatgtattttacaatgctatttctcttgacaatcttgagtcctggcctgggtcttcgctgccagcacgcttgtggccaagaaacgttgggggcagtttggacctcggagcagcagcatccatggcgggagaggaggccgggaggaggggcgttccctctctgctgaacccgccgtccgcttccagcgaggggcagcaggagcacatcgcctctgatgtcacacagctcatcggatggacacctctggtcgagctcaagcgaatcgccgccaaggaaggggtatgcgcgcgcatcgtcggcaaggtggaggcgtaccagcctctgtgctccgtcaaggatcgcagcgctctgagaatgatcgaagacgcagaggagagggggctgatctcgcccggcaccacgacgctcgtggagccgacgagcggcaacctggggctgggcctggtcctcgtcgccctccgcaagggctacaggttcgtcgcggtcatgccaggccagtactcgctcgacaagcagatcctgctgacatacatgggcgcagagctgtacgtaacagatccatccctggggttcccgggcataaccgccaaggtcgaggagctcaagaaggagctgcccaacgtgcacgtcctcgaccagttctccaacagagcgaatcctgaagcgcatgttagatggactgggcctgagatctggaaggacaccgccggtaaggtggacatattcgtggccggttcaggctcgggaggcacggtgtctggcgtcggcaagtacctcaagacgcagaaccccagcgtcaaggtcatctgcgttgagcctgccgagagcccagttgtttcaggcggggaaccaggcagccacaagatccagggaatagggccgggattcataccggaagtgctggacacctcggtcatcgacgaggccgtcacggtgaccaccgaggaggcgatggcgggcgcccggaggctggccagggaggagggcctgctcgtcggcatctcttccggggccaacctggcggcctgcttgaaggtcgcggcgcgagaagagagcaaggggaagatgattgtcaccgtgtttccgagcgggggcgagaggtacatgacctccgacctgttcgccgccgccagagaggagtgtattgccatgacgttttgatctttttttaccccctccccccagaaaaaaggggaaaacaaatacgcgtgtatctttatcttcacatggtattggtttaccatgcatgtacatttaaaaatatttttccccgaaacggaatagaacagctgcgtgcttgtttacacatcaagtcgatctctcctgaaccgatggtgaaaacagtggcggagcccggatccggaaaagttctaactactacaacaaaaaaaccggtagtatattatcaccgaggtctaatctaatttaggaaccccattttcttaaggtatctccatttttctaagagaaattagctaattttttccttagaaaaaataagaa

SEQ ID NO: 17202 - DNA, 2990 bp, Zea Mays
atggccacggccgcgccggcgtccgtcgaggggtttaactgcaccaccaaccgcacgtacccatgccaggtgtacacgctctaccgcgccggcttcgcaggcgtgccgctcaatctcgcggccatcggtgacctcttcgccgtcagtcgcttcatggtcgcgcacgccaacaacctctccacgacggccgcgctggccaacgggcagccactgctcgtgccgctccagtgcggctgcccctcccgatggttaagatgcaaaaagttcagacgcgggcacggacatggacaccttcgtttcactctaaagcccctgcaaagggtaatctccccactcgctccgtgcgggttcgggtctccgcgctgggactccgatcacccccgccgcctgcccgcccgccttccctccctcaccgcgtctctcttggatctccgctcgccgaccgctcgccgctctcatggcctggctcgtcgccatctccaaggccgcacggcttcgatcggcaaatgccgtttgcagccagctggtggtttcttctcctttcagggcacctagaagcgacaatgctgcaggtggcatgcttagaaatttgcaggtgaggtaccgctcaagctacactggtagctttccacactggatacgggaactggactccccaagagaagcttctctgcttaaacagatctataaaagcgatccagaaagagttgtacaaatctttgaaaggcacccttcattgcattccaactctgctgctctttctgagtacataaaagctcttgccagtcttgacaggctggaggatagccccttgctcaaaacattgcagagaggatttgctacttcagcagctgaggaagaaagaagtactggtcttgctgctttcgggagtgtgggtcggcggacgaaagatggagctcttggtacagcgaatgcacctattcacatggttactgctggaaccggtcaatttaaggagcaactttggaagaccttccgaagcgttgcacttactttccttgtgatctccggcattggagctctccttgaagacaggggaattagtaaagggcttggattgaacgaagaggttcggcccaacatggattcgaagacaaagttcagtgatgtcaagggagttgacgaagctaaagctgaacttgaggaaattgttcactacctacgagatcctaagcgttttacatgccttggtggaaagcttcctaaaggtgttttgctggtgggaccacctggaactggaaaaactatgctggcaagggctatagctggggaagctggtgttcctttcttctcatgcagcggtagtgaatttgaggagatgtttgtgggtgtcggggctaaaagagtgagggacctgttcaatgcagcaaaaaaatgttctccttgtataatattcattgatgagattgacgcgattggtgggagcagaaatcccaaggatcaacaatacatgaagatgaccttgaatcagttgcttgttgaactagatggctttaagcagaatggcggggtcattgtcattgctgccactaacttccctcagtcacttgacaaggcgcttgttaggcctgggcgcttcgaccgtcatattgtggttcctaatccagatgttgagggccggcggcagatcctggaggctcatatgtcaaaggttttaagagctgatgatgtggatctgatgatcattgcaaggggaactcctggtttctcaggtgcagatcttgcgaacttggtgaatgtagctgctctgaaggccgctatggatgaagcaaaagctgttacgatgcaggaccttgaatatgcgaaggacaggatcatgatgggcagtgagcgcaaatcagcagttatatctgatgaatccaggaagattactgcgtatcacgagggagggcatgcccttgttgcgatccacacagagggcgctcaccctgttcacaaggctacaattgttccgaggggagtttctcttggtatggttatacagctcccagagaaggaccagcatagcgtttcaagaaagcagatgctggcgaggctggatgtgtgcatgggaggaagagtggctgaggagcttatatttggggaaagcgaggtaaccaccggttcctcgtctgacctaaactacgcgactaggctggcaagagccatggtgaccaagtatggtatgagtaagcgtgtgggtcttgtttcctacagtgagaatagtgttagcggccaaacaagtgtgattgataaggaggtgaaggaaattctggagaaggcgtacaataacgcaaaggcaattctgacaactcacgataaggagcttcatatgctagcgaacgcccttcttgagcatgagacactgtctggagcgcagatcaagaaattactgccacaggtggacaatagtaacaataagcagaagaaggctgccaaggtgccgcagaagacaccggcagccagagccaagggagttgcacaagaggcggcagggaaagccaagggagttgcaggtacagcagcggtgccacaagaagcggcaacgtcggtggcagcgaaagccaagggagttgccggtacagcggcggcggcacaagaagcggcaacagcaaacaccgagggaggtgcaggtacagcagcggcgccacaagaagcggcaacgtcggtggcagcgaaagccaagggagttgccggtacagcggcggtggcacaagaagcggcaacagcaaacaccgagggagttgcaggtgttggctcatagtggcattggggagaagcacaagtcagcgttttgtgcagccccaactagatgagcaccaagtgtgattagggcaacaatgtgtttggtttccaaccctagatgatcgcggaattgtactggaatggaacactaagcatcgagaatactaatcctttcgtccatgtttcacatgatatattctctgaaacaacgtttggaaactctcacagtgagtaggcagagtagc

SEQ ID NO: 17203 - DNA, 3490 bp, Zea Mays
acaaaccctgatggtatctgctacatagagacagcaaatcttgatggggaaacaaatctgaaaataaggaaggctttggagaaaacttgggactatgtaattcctgaaaaggcttctgagttcaaaggtgaagtgcagtgtgaacagccaaacaattccctttatacttttactggcaatcttatcatggacaagcaaactatacccctctcaccgaaccagttactcctaaggggatgcagtcttcgtaatacagaatacattgttggcgttgtcatattcactgggcacgagacaaaagttatgatgaattccatgaatgttccctcaaaaagaagtacattggaaaaaaagctagacaagcttatccttgctctttttgcaaccctctttacaatgtgtgttattggcgccattggaagtggcatatttattaatgaaaaatacttttatcttggattgcgtgggcatgtggaggatcagttcaatcctaaaaacagatttgtggtgaccattttaaccatgtttactctgataactctatactcaacgatcatccccatttccctttacgtgtccattgagatgatcaaattcatacagtgcacacaattcattaataacgatcttcatatgtaccatgctgagagtaacacccctgctttggcacggacttctaatcttaatgaggagcttggacaggttgaatatatattttctgacaaaactggcacacttacaagaaatctgatggaattctttaaatgctcaattggtggagaaatgtatggaactggcatcacagagattgagaaaggaggagcagaacgggctggaattagaatcgatgatgatgagggcaaaagatctgctaacgcggtccatgaaaaaggattcaattttgatgacgctagaatcatgcgcggtgcatggagaaacgaacctaatcctgaggcttgcaaggaattctttagatgccttgcaatctgtcatacagttcttccagagggtgaggagactccggaaaagataagttaccaggctgcctcacctgatgaggctgcacttgtgtctgctgctaaaaattttggtttcttcttttataggcgtacacccacaactgttatggttcgtgagtcacatgttgaaaggatggggagtatacaagatgttccatatgaaattctgaatgttctagaattcaacagtacaagaaagcgacaatcggtggtttgccggttcacaaatggaagactagttctctattgcaagggtgctgataatgttgtatatgaacgattggctgatggaaatcatgatatgaaaaagatcagtagagagcatctagagcaatttggttctgctggcttacgtacactttgtcttgcctatcgggatcttagtagggagcaatacgaaagctggaacgagaagtttgtacaagcaaagtcatctttacgagatcgtgataagaagcttgatgaggtggctgaattgattgaaaaagaccttatattagttgggtgcacagctatagaggacaaactgcaagaaggggtgccaacctgcattgaaactctctctgcagcgggcataaaaatttgggtgttaactggagataagatggaaacagcgattaacattgcatatgcatgtagcttggtaaacaatgacaccaaacagttcatcattagttcagagacaggcgctattagggaggctgaagaccggggtgaccctgtggaaattgcacgtgttattaaagattcagtaaaacagaatctgaaaagatttcacgaggaagcccggcattctttaattagcacccctgaaaggaagttggctctcattattgatggtagatgcctaatgtacgcactggacccaactcttcgtgttgatcttcttggattgagtctaagttgccactctgttatatgctgccgagtttctccgctgcagaaggcacaggttacaagcttagttaggaagggtgctgagaaaataactctcagcattggtgacggtgctaatgatgtgagtatgattcaagctgctcatgttgggattggcatcagtggccaagaaggaatgcaagctgttatggctagtgactttgccattgcacagtttcgttttcttactgatttgcttcttgtacatggacgatggtcttacttgagactgtgcaaggttatcacatacttcttctacaagaatctgacatttacactaactcagttctggttcacttttcaaactggtttttctggccagcggttttatgatgactggtttcagtctctatataacgttatttttactgcgctacctgtaattatagttggattgtttgataaggatgttagcgcgtcactgtcaaaaaaatacccacagctttacaaggaaggcatcaggaattcattcttcaagtggagagtgattgcagtgtggggtttctttgccttctatcagtcaatagtgttcttctacttcactgcagctgcaagtcggcatggtcagggttcatctggcaagattcttggcctatgggatgttagcaccatggcatttacttgtgtcgtggtgactgtgaatctccgccttctcatggcatgcaactctataacgaggtggcattacataagtgtggcgggcagtatagtggcctggtttatgtttattttcatatactctgcaataatgacgtcatttgacagacaggaaaatgtgtattttgtgatttatgttctgatgagcacctttttcttctatctgacaatcgtacttgttccgatcatcgccctgtttggggatttcctatatctatcgatccaaaggtggctcttcccctacgactaccaaataatacaggagcaacacaaggatgagccacacgagtacagcagggtgccactaccagagaccagccacctaagcccagaggaagcgagaagctacatgatctcgatgctcccacgggagtcatcaaagcacactggctttgccttcgactccccaggatacgagtcgttcttcgcctcgcagcaaggcatcggcgtgccacacaagccgtgggatgtagcccggagagcgagcatgaaaccgcaacgagcaggaaaatcctagtcgggcgaacacctctccgctgtgtaaagtcttgtatatctggtttcttgaccacaggagtttttgtataggtagcagtactgtagcccttttttcgtgtttgtcacccatatgttgttttgggatgaaaagtaggcaacggtccgtttggctgttaaacaatcatgtagggatacttggtagataaaaccaaaggggtattggacatgcagttaggaattttagtttctggcgttcattgcgtgatgtagtcgagttgattggtcggcccgccatgcaacttaaatcatgttactattattggaggcctgtgcattgatcatatcccattttatttcaatataagaacacatcctactcc

SEQ ID NO: 17204 - DNA, 175 bp, Zea Mays
aatgcctccttcagccagcgggacacagcgcccgcctcgtccttgacggcagtgagcgccggaatctcaccaccggcgctgagatcgctacccctcgccctaggcatcacagcagccgtcgcggtcgccaccgcaggcggaacaacaacaagttgcccttcgcccgaccctgcaa

SEQ ID NO: 17205 - DNA, 1293 bp, Zea Mays
acgattccgggtgcaatccgacagaaacgaacaagcccttaggcttgcgacctgggcgaactcggcgtctgcgagaccgggcaggaagggcacgacgtagagggagccgactactagcaaagcccgagcatgggggcgagctcgcggggaaacacggttgagctgtcgacgagcagagaaagcgctggcaagcgcccgacgacacttacgcaaggaggcacagcgacatggcgcaactgatggcgagtatgagcgctggcgcagggagcgacgatgagaagatgcgtgacaccagaagctaggggttcggcaccaggagcgaccgacgtcgaggatgagacccgacgattaccgcggagccggggcatccacgaattgagcacggaaatttgagcggtggcggagaacatcaccgacatggggaggagcagaagatgaccggcaaacagacggcgctggggaaaaactcgccagcagggtccagagccggccacagcgttggggcagtgacaagcggcggctgggcagagggtgggcaggattcgacggctcgacggcgcccgcggccgagcacacaaggcgaccagcgcacgcgtcgaggagaccaccggtgaagggacatggccggcaaatcacgcgcatcagcaaagcctagcagcagtggccaactaccacagcaaggaaaggagacggcaagctgaagcaagattcaatctgggccaatcgcgagctgaaggacttgcgagcaggccccgagctcgacgcagcagacaacacagtcggagttgagggagatcgagcacagagataggacgtcggcgctcatggctggagctcggggtcagtacgcgaccccaccgcttgctgcagtttcggggcagcggcagactctggctctgccgtttggccgcgtaccgcaccgaagtggaccgcacgaacgcgcccaggccaccggacgagcgtgggacagggagcaggcgcggctgggaaaacaagggacacgccaggggcttcacagcgcgtggctggtgaagatggagcagagggcacgacggggaagaagacgtgcgcagggaggacttcgacagggcgctgctgggagatggagggagagaagcaaggggcagctgggctcttggccgaacggagttggaggaggaagccgcagtccaaacgccggcgagccaggcaccaggggagctgcgtgggtctggcggaatccgagcagggagggaaaggatctggcgcgcgcacaagggcgccatccatggaggggctcagcagcctgttgac

SEQ ID NO: 17206 - DNA, 995 bp, Zea Mays
actcaatcggcgaaatcctgggcgtgcctgccaatgagcaagaagaggaagcatctggatccagcgaactcgttgaaagacagcgaacaagtagtcgcctcagatttcataagaggagacgatcttgatgacctattatcgaagcttatcaggagtgtggagattgccaaggcttcaaggggacgcttaccagaaaagatatggatgaagcaacaatttgctatcggcgtcaatgatgtcacaagggttcttgagcgaatgccgcattctgtcactgctcatcctgctcaaatgtctagtgaagcaccaactgtctcaggccaacgtcaagctcctttggtaccattgcaggctgtccttgtagctgccgactgcaatcccaaatggttaacaaaacacataccaacactagcgtttacaaggcaggtaccggtattgtgcatgaaggacaacaagggaggctcagtaaggttaggccatgtggtgaatgtcagaacagcgcttgccattggtgtaaaggccaaagatagcgttgtcaacaagactattgatgagttcctgaaagacagtaaactggttgccaatgaaccataaagtaacccaagtctagtgacacgtttgtactaaaaagcctgtacttctgggcatgcaacatcccaggatcatctcataaatgggtttaagtttgagaaggggatcaagtatcttgagcagattgtggcaatatcaatttggtgggacttcttcagagaacggtcatgggaaataggacagactatttgtttggtccgtgcaatattgtttgactggtgaactagttatccattgtgatctagaacttgtatcaaactccaatgtaacgagatgttagaatccttgtttattgggtacagttttttctttttctcgaggctcgacaccggtacattaatttttcttgttttctatattctatagtatatataataatgcgaaaaggcttacattgtgatgtt

SEQ ID NO: 17207 - DNA, 875 bp, Zea Mays
tgaaagtgattaactcgctcctaaagccaaacaataaatatgaacgatttcccagaaactttaggctgctagaagaactagaacgtggtgagaagggcattggtgatggaactgtgagctatgggatggatgatgctgatgacatatatatgcggtcctggacaggaactatcattggtcctcccaatactgttcacgagggacgaatctaccaattaaagctgttttgtgatacggattatccagataaaccaccgacagtccgattccagactcggatcaatatgacatgcgtgaaccaagaaactggattggttgaaccaagtctatttcctatgcttggcaagtgggaaagggaacatacaatggaggacatcctgagcagcttaaaaagggagatgtcaactcctcagaaccgcaggctgtaccaacctcatgaaggtaatgaagatcaaagagtagagcagaaagggctgtcccttagatgtgccgtcatgtaataatgtacatttgaattgagcagcgagatgccgagcttgagcgaaccctctcagggcatgtttaggaacaatcccgttcaattgccttgcttccaaacaagccctgtattaaatcctcctgtagctcaccttattcatgccgccatcgcaataaagtgtcgatgaaactgttaaattgactgcacaccatgtaacatgcaaccgattcgatttctgtgaaggacaacgtgttcagtgtcggctgttccacatgttacactgtgtagtctgttctgtctaggcggctaggcctgttattctttcttcaggaacaccgtatgatatcacagctgctgtcattggttgctgacatttcgcgcggaatgtaagtagaga

SEQ ID NO: 17208 - DNA, 2009 bp, Zea Mays
caccacttctcccttcacaaccccaacctcgaaaacgaaggcgccaaaccattccccaaacgctctcgcgtccgcccgacagctcgcctgcctgcctctccgtcgtcgccgagtccctcgccggctctaccaggcggtggcgaaggcacttcggcggggacgctcaaccgccccgcgggcggcgtcgacggtcggttcccggcggcctcgcggaggttgcatcccgtgtcgaatcgaggcaggatcctacgccaaatgcctctctttgataagaaacctttctccttgctggagccccctaaggacttggattcaaaggagaaggtgttccaaattcgattcacgaaggagatattccgagattatgaagaatacctgaagaggctaaacctttatcgtcaaagagtttggacatgtaatatatctggaaaatctaatttaacttttgaagaagctttggtatctgagcacaaagcgatggagaaggctcaaaatttgccaactgagctaatggctcaagttcttcggatgactcaatacagccctcttggtttatatgaacttgttgataagatatatgctagtctgctggaagaagtatttgagggaatagaattacatgctaataaggatggtaatgtggcaccttgcaagattttgaagattttagattctggtggcacaaagatgtgtgaagttggttggattcggaagggtaaggctataaccaacacatcagtaatcaaagctgcagatctgttttaccggagggcacctgttagcaggaatacgctgaagttttttattagagatgctacgtcacaaagtaatccatgggttatccatgagaatcttgccaaaaaatttggcataaccatcgagccccctgatagtgtaatgaagaaagggagaaaaagacaagagaatgaaactgttgaagatggaaggaaaaagctcaagacagatgaagaacatgcttatgtgctgattaagtatccaatagatgatctgctagtaaggcccaatgcagatgatccgtctttatttaagagacctcttctggctacagattttagagtaccaagatgttctgtgggagatctccttatggtatgggacttctgctcgtcttttgggagggctctgaatctgtccccatttccgctaacagatctggagaatgcaatttgccacaaagaaagcaatgttcttcttgtggaaatacatgcagctttgtttcacttgcttatgaaggatgaaggtgactatttcactgttccgcagaacaagaaacagaagttaaaggtaagttcagtaacatgggctgagtatctatgtgacttcttggaaatgacaaaaaatgaagaactatccactaacattgcaacagtaagaaggggatattatggtcttattgacactaatataaagcttaagatccttcgggaactagtggaagaagctattgaaacctctgccataagggagatactaagtgatcgtgtggaccagaaacaagtccttaatgcaacaaaaagagagaacaccagaaaggacaaaaaagagcaaaatctgaacactgaaattgccatgaaaaatgaggagaatcagacagatgctgtgcaaggtggccatgaaggtgtagatgagctggttaggagaaaagaagaaaatgacaagagtaatatttctcggggtaggacagaagtgaaacgacacatggtacagcaccttgagacggagatcgagaaattatccatccgttccagccctcttggtaaagacagacagtacagtaggtactggtttttcaagcgtgaaggaagactttttgttgaaactgcagattccagagaatggggttactacagcactaaggaagagcttgatgcgctcatggactcattgaatgtcaaaggtataagggagagagctttgaaacggcaactagagaagttctatagtaagataagtgtacttgtacttggaggcttacaaggtgtttggtt

SEQ ID NO: 17209 - DNA, 1597 bp, Zea Mays
atagaattaggcctaccctccgagagtcagatctgaggcgcgccacccgcgaccaccgcaccgcgtcgtcctcctcctcgctctagcgacgccttctggaagctttgggaggccgcgctacgctacgcgacgctacgctccggcgggcggtcgggatggggctgttcgaccggctgcccccgatggaccacatgcggtccgagaagatgtgcttcgtgcagctcatcatgcccgccgagagctcgcgcctcgccgtcacctacctcggcgagctcggcctactccagttcaaggacttgaatgaggataagagtcctttccagcgtatatttgtcaaccaggtaaagcgatgtgcagaaatgtcacgcaaactaaaatttttcagtgatcagatcaacagggcaggtttaagatcttctgttcgacctgcacttgaaccggatattgatctggaggagctagaggcaagattgggtgaacatgagcatgaactgcttgagatgaatacaaatagtgacaagctaaaacagacatacaatgagcttcttgaattcaagctggtcttgtcaaaggtcacatccttgcttcttctcacagccatgcagcttcagctgagcatgagctagatgaaaacatatatgacaatggaatacatgagggaaatgcctatctgctcgaacaggtagagaaagctgtttttgtagttttcttttctggggaacaagcaaaagcaaagatactaaagatttgtgattcatttggagcaagttgctaccctgttcctgaggagatggtcaagcagagacaaattttcaatgaggtatcggctcgtctctctgacctggaagttactttggatgctggaatccagcacagaaacaaagctcttgagtcaataggatcacaattgtggaggtggacaatcatggttaaaaaggagaaagctgtatatgacacgctcaacatgttgaactttgatgtgacaaagaagtgccttgttggagaaggatggtgtcctatatttgctaaatctcagatcaaggattgtttgcagcgttccacaattcacagcaattcacaagttggtacaatatttcatgagatggacactattgaatcaccacctacatatttccgaactgataagtttaccaatgctttccaggaaattgttgatgcatatggcgttgcccgatatcaagaagctaatccggctgtatattctgttgtgacgttcccatttctttttgctgttatgtttggagattggggtcatggaatatgtctattactaggagctttggttcttatacttcgcgagaagagattttcctctcagaagcttggtagctttatggagttggcattcggcggacgatatgttattcttctgatggcaatattctcaatatactgtggccttatatacaatgagttcttctcagttccattccatatatttggcaaatctgcatatgaatgccgggacaaaagctgcagcgatgcacatacttttggtctcatcaaagtccgtgaaccctatccttttggggtggacccaagctggcgtggaagtcggtctgagctaccctttcta

SEQ ID NO: 17210 - DNA, 206 bp, Zea Mays
tggatgtgctgctactttccactccccttgatgagcaacaagtacctagggtttccccaagaaaatctgcaagagatgggggtagaacatctcctcgatcctctcttcctcttcaatccatcttgctcctcctcttctcgatccttgctgcatgtggggagatctagagggaggaggaagcagtggagggcggctgcaaaggggaa

SEQ ID NO: 17211 - DNA, 165 bp, Zea Mays
gctcggcataccagatgagatataatttgttctgtgtcatcaaatacaacaacatttttgcagtccatgcatggacaatatatgtgctttgtctttgttttccaagcatggttcgtagcgacaacaataaacctatggacctcagatatgtatgatggatctagc

SEQ ID NO: 17212 - DNA, 3337 bp, Zea Mays
cttcctctaaggctgctggtttcaacagctgtgctgcagctaatgcgcagtagctgattcttgaagaagctgcttcgttgggaagaaaaagaaaccacatgctaccgtgtcggcctggttttgttcacgtgtttcttctgcctttagttttggttcatcgcgtccgtccttcctcctccttcgccgcctcttgcgcctcccctcccctccccactcctctcctctctccccgaaccaaaccaaacccctcccactccaactcctcgattctcagagtgctgtacaagtgtctcgccctaccgcggccgtcaaaaatccgatctttccgccgtttccggaggccacacggctgcaagactgaccaatcccccgcggatcgagccgcagacgccagcagttcctgctcgcggaccgcaggcggggcccggacggagcatggggtcccgatccgccggcgcggcgctgcggctgtggctgctggcgctcctgctgggctgctgccaggggaggttcgtggtggagaagaacagcctcaaggtgacggcgcccgacggcctcaagggcacctacgagtgcgccattggcaacttcggggtgccccagtacggcggcaccatggtcggcttcgtcgcctaccccaaggccaacaggaaggcctgcaagagcttcgacgacttcgacatctcctacaaggccaagccgggggcgttccccaccttcctgctcgtcgacaggggagattgttacttcgcaaagaaggcatggaatgcacagaaagcaggagcagcggcaatccttgttgctgatgacaaagacgaacctctaattacaatggacaaccctgaggagggtggcaacacggattatttagagaacatcactattccttcggcgttaataaccaagagctttggggacaggctcaagaaagcaatcgacagcggtgacatggttaatgtgaatttggattggagggaggccctgccccatcctgacgagcgtgtcgagtatgaattctggaccaacagcaatgatgaatgtggcccaaagtgcgatagccagattgacttcgtcaagagcttcaaaggagcagcacaggtacttgagaagaagggctatacggagttcactcctcattacattacctggtactgcccagaggccttcattctgagcaagcagtgcaagtcccagtgcatcaatcatgggaggtactgtgcacctgacccagaacaggattttagcaaaggatatgacggcaaggatgtggtggtccagaacttgcgccaagtttgtgtctttaaggttgctaaggagcacaagaagccttggttatggtgggactacgttactgattttgcgattcggtgcccgatgaaggaaaagaagtacacaaaggagtgtgccgatggagttatcaagtcacttggccttgatcataaagcaatagataagtgtattggtgatccagatgcagatgaggaaaaccatgttctgaaagctgaacaggatgcacagattggcaagggttctcgtggtgatgttaccatcttaccaactctggtaatcaacaatagacaatacagagggaagcttgacaaaggagcagttcttaaagcactttgtgctggctttagggaaaccaccgagccagccgtttgcttgagtgatgatatacaaacaaacgagtgcctagagaacaatggtggctgttggcaagataaggctgccaacatcactgcatgcaaggatacattccgtggaagagtttgcgagtgtccagttgtgaaaggcgtcaaatttgttggcgatggctatactcactgtgaagcttccggatctggtcggtgtgaaattaacaacggagggtgctggaaagataccaagaatggtcggacatactctgcctgtactgatgatggctgcagatgccctgacggattcaagggtgatggcaagcacaaatgtgaagatgttgatgaatgtaaggaaaggactgtgtgccagtgcgaagaatgcagatgcaaaaacacgtggggaagctacgagtgcggctgcagcgggggcctgctttacatgaaggagcatgacacatgcataagcaaaaacggagcatcagaagccggctggggcttcctgtgggtcgtcgtcttcggcctcgtcgcagcaggaattgcagggtacgcggtgtacaagtacaggatccggaggtacatggactcggagatccgcgccatcatggcccagtacatgcctctggacagccaaggagatgtccagagccacgcgcaccatattgagatgtgaggatgcatgcagacttgatgagaggagacggaggcttggtctagcttatataatacaccagaattagatgtgcatattcgtaacaatcttgtgtctagcacgcaaagtccttgaacatttggtgtctgtgttaggttgtaccatgacatggtcttgtttagcaataattgccgtcttttatttcggtgccaataaaggagatggcaaacggggctctgtgttgctcaaaaaaaaaaatagcattcttccattaattggacaaagctatctatggaaaatattaacagtttatgcatctgtcaacaggttactgggcaagctatcagacaagactttgggcgctaggatggagatccagatgtccgttctcttcccccttcactacatcaactacataataccaggtcattttacaaaacattgccaccacaaccttgccatcaccatccctggtaccagcatggcttgccagtgaacatatccacaattggccatcgtccctccctcctttagtattgtcacgcatctcctgcctgcaattgcctcctctctatctccagtgagatggccctgccccaccctcaccagaccagatccacgtttgccgcccattcccttgctaaccattttgatggtacatcaccacaccatacagccccacccaatcggtggtcttccaccattgctactgtgctagtcacctccacaccccctttgaataaaaagcagtctccaccttcactgtcactcattcaacagatatatatgcaaaaatggtagacctagtgccggcggctcctgcatgagtggggcctaaagaaaggataaactgaggcaagccgcaagccttccccacaaatgcagaaagtctgcttcgaaccggcaacctagtgattcaatgagacagctctcagcctctcactgcaccagggatgcccttctttcattcaaccgatatataaagggtagacctagtgtcggaggctcccacatgagtggggtctagaaaaggaataatagcgtttttttc

SEQ ID NO: 17213 - DNA, 367 bp, Zea Mays
ggaagagaaaaagaaagaaacatgcttgctacttgctagcgttgggttatctgtttgaggtattgggccaaaatgtaagagtagaaacaaccccagccgccgccaaccccaaccccgttctccggcccgccgctctctctctcctagtccccttctatcgtggcaacgacgagcgacagtcgctgccgccctacggcaggtgcccaggtcttcttcggtcccttcgccgtcgacgagcactaccagttttctttcgttattaacaaaagagcaacgatttgggaacgtggtgtccaggggcttaatagttctcaaatatgtggactaagtgtgtgaactcttaggttgtacacatattgtaatttat

SEQ ID NO: 17214 - DNA, 225 bp, Zea Mays
ttcgtctctttcttatacttctctctgtgaaaatccatgattttgcatacaggtgggtctgatttcctatcgacctggacaagataacaatgagcatgaagttaatttatctattactacttattaagaagctaacaagtgcgtccacaccttgcccccgcccccgccgtacccccgcctctgttctctcccacacccgcacatggaacctgcccccgccacaga

SEQ ID NO: 17215 - DNA, 1095 bp, Zea Mays
ggaggcgtgcccataatgtcgtatatcacatttaatatgtacttcaatcaaatcttaaaggttgtgcttgaagtattagatgactctgattcatccatgagggagcttgctttatctttgattactgagatgctcaactaccagaaagatgcaattgaagactctatggagattgtttttgaaaaactcctgcatgtgaccaaagatgctgtggccaagatttcaaatgaggcaaaccaatgcttaaatgttctattggcaaaatacaaccctttcacatgtcttgctattactgtacctttattggtcagtgatgatgagaagatgcttgttgtgtgtatcaactgcttgacaaagctttgatttagtgcagagagcatcatgtgattgtgtatcagtcttgattctaaatttgagcttgttggacgcctttctcaagaggaattgattgttcaattgcctacatttctgccagcattatttgatgcttttaacaaccaaagtccagatgtccgaaagactgttgtgttctgtctggtggatatctacatcatgcttgggaaagcatttgctccatacttggaagggcttagcagcacgcagctccgcctagtaaccatctacgctaaccggatttcacaggcgaggtccggcaagccaatcgattctaaccaatgaggttgtaacattgttattatttgtggtctatatgagcatttctccggtagggtggttttcttgtcatttgtttgtgtatgtgtatagtataaacaagcgcctcccatctgttaagagctcctggtttttgccctgtgtgattatgcattccctctttacgccttttcctctcttttccccctttggtagcttgtggagagtgctaatgagtgtggcttcatttgtactacttggtacatactctgtacaaagaaaggaaagtgtagtttcgtggagaacagttatgcaagtgatttttttgacgccattttccttggcgggatgacagtttgccggcctgtttgtggtgaaatatggcaaaactgttatgtattctcttcttcagctcgatcacttctcttcgtattacgtctgtta

SEQ ID NO: 17216 - DNA, 727 bp, Zea Mays
attgcgtggcggtctgcctcgtccccttcctcccgtttcttcccttgcctccccctccccgtcgcgctgttcaacgttcaaacccttgcagctccctctcccttggtcgcgcagtcgccattcacgaccccgaccccgacccccgtccccctcccttaaatcccacctctccccgtctacgcctcattcgctccagctcgcatcccacagccaagccagttagcccgggagatctccaagaaaccatcttggaatccgagaacgcccagcattcttggtcggccaaggattcgaattccgacgaacggcttctacggccgaaaaaagtccgataatttccgcggggagctcaggaggtgtctcggtctcgggaaccggaggaggaggccgtgggggattgacgagggggcaagatggtgaggctgccgtacacaacggcgctgaccacgctgttcagctacggcctgctcttcgccttcggccagctcagggatttcttccgcaagttcgtcgactggttcaaggccaagaacgtcaaggggtacgcgccgatctgcctgggcctggaggatttctatgtgcgacgcctgtacttgcggatccaggattgctttggtaggccgatcgcaagtgcgccagattcatggtttgatgttgttgagcggacctcaaaggacaataacaagacactacactgttgctaacacacattattgattcattattg

SEQ ID NO: 17217 - DNA, 144 bp, Zea Mays
gtagtggtataggaggatatgcgcgagagagaggttgcgagttcgaatctcatcgtttacaaaacatataagtttgattcaaaataatagtgaaaaatgatagggcaacgggtaaggtaatagtgtagggttgtagagttgttc

SEQ ID NO: 17218 - DNA, 243 bp, Zea Mays
ttacttgtgaggaggaagtgtgaaatctagtccgccaccaaaaccgcgccctgaaccaccccatggagcggttccataacctgaatgaaaacttttattcatgcctcgaccagcagcaggcctccagtcacctctaccacgaccagagaaagggcctgaaggtccagcagggcggaactgaccaggaccaccaggtaccccacctgctgaagcaacaggagcgccagggcgtacatactgcaa

SEQ ID NO: 17219 - DNA, 360 bp, Zea Mays
cgccataatgttacaggctcttaatttttgagatacaattagttcattgcacccaacatattttgtttttaagacagaaatcttcatttgatgcttaacatgaacttttcaatcttcctattgcagattgcaagcattgtagcttctggtattcaacctctccataacctcacattgttgaggttcattgaccagaaggttggtgcaggggagagtgtgttgtggactcaacaacaaatcgagagaggtttcacagctattgagaacctgatacaactaaaaggatgcgccgggaagtatgcaacaggagatgaagtccaattgcttcaaaatcaagtccgacttccaagaagagcaagg

SEQ ID NO: 17220 - DNA, 1116 bp, Zea Mays
ggcggcggggcgctggcgcgctgcggcgcggcgtggcgctgcacagcggtgccggtgcgccacagaatcgggccggaacagcgaatccgggcggctacagcagtacgcggccacccccaatcaccaatcgaagtatgaatgagataattgacaagtacaacacgcattctaaaaacctggggaaaacagaacagccttcgctggacttgaacttagagcatagcaaatatgcaaatttgaatgagcaacttgcggaagcaagccttcgactcaggcagatgagaggtgaagagcttgagggattgaatgttgaagaactccagcaattggagaagaacctggaatctggtctgcatagggtgcttcaaacaaaggatcaacaattcttggaacagatcaatgacctcgaacgtaagagtacgcagctggcagaggagaacatgcaactgaggaatcaagtatcccagatacccccagctggcaagcaagcagttgctgatactgaaaatgttattgctgaagaagggcaatcctctgaatcagtgatgactgcgttgcactctgggagttcacaggataatgatgatggttcggatgtatctctaaagttagggctgccttgcgttgcatggaagtaaacaggaaatgaggctccttgtcgattctgggtgtggatgtgggtggagctgcggcctcagcggataggcacttgtgtatggttttatggacgaccggcccccgactacgtactgcaataatcttgcattggaagcgagatcggttaacctgatttgtcatccttgtggcttcatgatgcgatgttccgcttgtaccgtttgctagcatgttaactgaatttttagaatcgcatatactttttgttcttatatatcactgtcgtactgctcgtaagatgtatctactttattctatccaatgttgtaacctatcacctgccaacttccctactgttttggcgcgccgcaagctgtgctcaagcatgcttcatgttatattcggaagttgtggtctgctctctgcatacatcctgaatgggcaccgttcaattttcagcaccgcatctttctctgaactttattctgagaaaaaataaca

SEQ ID NO: 17221 - DNA, 143 bp, Zea Mays
ggccagggcagcacgttcacgttgaccgccagagctcaaacacaacagccatcagccataaatcatcaggaggtgctgacagaaataaaaatatcgatccatccatcccatcggtcggccaatcatgattctgggcttgggaa

SEQ ID NO: 17222 - DNA, 936 bp, Zea Mays
gtgacgaaaaaaatctgccgtgcaaaatcttttagattgggcttggcctgacaggctttggaatattcttctcatttctgggaattgttttcttctttgacaaggggctcatcgcaatgggcaatattcttttcctgtcaggtttgggtttgacaattggtctgaaatcaactatgcagttcttcaccaagccaaagaattacaagggtactatctcatttggtgctggtttttttctggttctcattgggtggccgttttttggcatgctcttagaggcatatggctttattgtactcttcagtgggttctggccaacactttctgtgttcttgcagaggattcctatcatcggctggattttccaacaaccatttgtgacatcgttccttgaccgctacagaggaaaacgtgttccggtctagcaaccttttgcgcaatatatgcttgcggtgtagcaactagcagcctgtatttttttaactacagtagcaaactgattataccgatgtctgatccctcatgtttatatgttttctttaggattgctctttgtaaattacagccccaaactggccaaatcaaaggtccattcctttgagaccaggatgcaggttcacccatgaaatggatctgttgaagaaactcttaagcttgtatggaagtaaaagctaatatgttcctttatatgataatataagttatatattattgtgtggaccgagtttctgaacacaattgcggttcatgtaatcatgtatgtggctcgacccaggattactagaccttccaaatttttaaggggttatctaaatgattcacaatataactaggaaaaccttgaaaaaacacacatgagtggcacatgagaatcaacattttttgtgagggaggataaacaagttgtagtctccgtgtttggaaaaaatcagaaga

SEQ ID NO: 17223 - DNA, 2452 bp, Zea Mays
ctcatcaaatcacgattcacataaaaaaggtgtgggagcccgatccgatcgccagatccgccggcctgtgcgccgactcgggcgtccttccacagatcctcttccttctatcgtaggctcgccctcgccgctcgctggagcggaggctctatggataagcaggagccagtagccaatggtgaacaaacgataggtcttgctgagaagccgaaggagctgcctgttgccagtaaggatgagaaagcaactgtgcccccgattttagttgattcaaatgctttcaatctaccaagtgaaggccaaacccaagctggcacatctaacatggatgggggccataatggtgcacacaacttttatgcttctcaggcacaaccattctattaccaaggctccggttctgaaaaccctacacaagcatgggatacatatcctccctacatgagtgttgaaggattggaagtgggtccaccagttgtatacaatgaggacccctcattgatgttccatggtggctatggttacgacccatattattctcctattgcaacacctgtaccaaatgctgttagtggaggtggtcagctctactcccctcagcagttcttctcggctccttactaccagcagtcagtaccacctgacatgcaatatttaagctctcctactccaatatcacagggtgatacaataatgccgattgacccaacacaaggagcttttatcgctgataccctgagtccaaacagcttcctgtttggcccaagacctgaatggttcagatcttcagaaggaactgggtcatttccatcacctgcagcttcacctcaaccttctaggggtgttccagggtcctatgaccaaaacaactttccaatggcttcaagaatgtcatcacctcaccagaagcccttctatggtttgagatccacaactgactcctatggaaggggtttttctcatggtggaatgttcccacaggccagtaattatgggggatccgtcaccagctttggccttaatggtagaagtttgatctcaaccgagaaagggcgcaggaggggaaggggcaatgcacttatttgcagctgcaatggtcctcttgactttcttaatgagcaaagtcggggtccacgtgcaactaagcctaagaagcaaccagaggttgacagtaaggatgaggtgcctactacaggagttggtcgtgagttatacaacaagcctgactttgttatggagtacacgaatgcgaggtttttcatcataaaatcgtacagcgaagataatgtgcacaagagtgtcaaatatggtgtttgggctagcaccacaaatggaaacaagaaactggactcagcctatcgcgaagctaaggagaaaggagagcactgtcccattttcctgttattttcggtgaatgccagtgcacaattctgtggtgttgctgagatgattggaccagtggactttgagaaaagtgtggattactggcagcaagataagtggactggtcaattccctgtgaagtggcacatagtgaaggatgttcccaataatcttttccgacatataattcttgaaaacaacgacaataaacctgtaacaaacagcagagatacacaggaggtgaaactagagcaaggaatggagatgctgaagatctttaagaaccatgatgatgatgcatcaatccttgacgactttgagttttacgaggagcgtgagaaagcgctgcaggaaaataaggcacgcctgcatcagcaacatctacccagttctattgttattgagcccaagaaacccttgactgcacccagtgacctcgtgggccatatcaccaagagttttgctgaggctgtgcggcttggtgaggccaagactgtaagccatttgactgagaaggtttctgggggtgatccgtctattcctgtgaagcatgttgaagttaagcagagtggtttatcttaggaactcttgatcgatgtgaatgaactgtaccaaaaattcacccatacgcttcctgatcaaaatgtcgggaatgcatatgcagatggatgatgatgaaacccaagacatcggcaaaagcatgcatgcacactagggtaggtctttgccaaccttggaagcatagtttcttgaatagtttctctctttttttcttctttcttcctagtattttctccccttctcttcgcatcatatgatgattccttagtgtctagcctcaaggagagttgctgtttttgtgtaagcctctgtaagtttcctgttccatcacatatgagtaaggcctttttgtttctttttatttaagtaaaagatccatcttttatgtactgtcgtggcagttttattatactatgtctgaacaaggcctattcactatgtaagcaaaacataaacgctatccaggtgacctggttgtgatgactacagtaataagtaactgaataat

SEQ ID NO: 17224 - DNA, 715 bp, Zea Mays
gggattggatcaaaccagatgctgcgcgcacggtgcacagaatgatttgttcattgaatttggaaatgacggtggacctgcagcgaagaccttgaagccaaagttcaatttgttcgtcaagctagtgtccaagaatactggattgggggtgccgcatattgatataaaaactgtcattgcagctaccatgtttcttaaaggctttggtggtcttctgttcatagtcagcagctcatttggagcattcctcctgctcatttacttggcgtttataacccctattgtgtatgacttctacaaccatgaaatggagtcaacactgtttgtcgatctttttttcaagttcatacagaacttggcgtttatgggtgccctgcttttcttccttgggatgaagaactcaattccaaaacgtcgctccaagggaaggacaacaaaaaccaagacaaactgatgtcagtggttgtaggaggggaagcaattgggctcattatgtttgcatactatacaggaatagatgtcccacttttgttcttggtgcgccaattgaattgtgaattgggacttacagaacttagcatgtaggatatttaagttatcttgcgcaattttattttcttatgttgcgatgtgttcttatgtcacatttcattttgctacaagaactgctttgacagtaaaaaaatattaagtcgcatagtctattttctgtgca

SEQ ID NO: 17225 - DNA, 286 bp, Zea Mays
ttgtgcgattttagacgaatggctgtcgacggagaacaatggagtggacgaactgattagacgccatcttggagggggattgacgcttcaaggtccccaagacgatgataataggcccgctaattcagcagagacggacatttttattcatgctgtggaacgtgtcttgcctaatttgccaaaaagttgcatagacaaaatcaagagactaatgggctgagctagcaagtacgtgatagcgacctgcaatggcacctatggacccgaagggaatctacaatgacca

SEQ ID NO: 17226 - DNA, 128 bp, Zea Mays
gtattgttgggcttctcacaaatgagaggaccctccaaaaataagcgtatgctgcttattgcagcgggcacacggtattctttagtaaaaggcgaaagaatagttcgctttgtgcccactgcgcagct

SEQ ID NO: 17227 - DNA, 2368 bp, Zea Mays
cctgtagtgatgtaagcattttgtaacaactcacataataaatttaagatttattttttatattttttataaatttactactaaaaataaaaatataaatttacgaagcagattatatatcctatttttcacaagaaaataaaaaaactaaaaaataatatataactatcagagtattagttttcatcttaccgacatgtgggccaccacatgaaccttatccccgccgcgcctccgctcccttaaaccccgcgacgggtcactggacggccaccagtccgtgctcccaaaatggcggcctccccagcggccgccgctaccttccttcaccatcacctcccctttcccagtcgccccaagacacttctcagaccacgcctccaccgcctcgccgcgtccatcaacccctcgtccaccgacgagacccccgccgcggacccaccggtcatcccctcgatcagcatcaagaacactgagcccgaggaggtcgcccgccgccgcagttgggtggagcacggatgggctccgtgggaggaaatcatgacgccggaggtcgcctttgcgcgccacagcctcaacgagggcgaggaggtgccgcttcagtcgccggagtccctcgaggctttccggatgctcacgccttcctaccggaagaaggtggaggctgagccaggatacctggagcgcctcttcgcgacgcgcgacacgcccgagcctctcgagacgacgtgggccggccggctcccgctgcggctcgtgccgccgcgggactggccgccgcctggctgggaggtggacccggacgagctggagttcataagggaggcgcacagggcggcctctgagaggctggacatggaggcggcggctgcggcaggggtgaccaacgtggagaagctggaggatgcgccacaggatctggcgctagagaggtacaaaatgttcctgaagcagtacaaggaatgggtggaggcaaaccgagataggttggagcaggagtcctaccagtttgatcaggattacttccctggcagacgaaaaagaggtaaggactacagtgaggatatgcgtgaacttccattctactatcccggacagatatgttacgggcaagtaacgactgttcacctctaccagggagcctttgtgaacattggttgtgtccatgaggggtgggtaccgataaaaggaaatgactggtactggatccgacatcacatcaagcctggcatgaaagtctacgtggagattctggccaaacgagacccttaccgcttccgcttcccacttgagatgcgatttgtatatcctaacattgatcacctaatatttaatagattcgacttcccaccaatatttcaccgtaaggaggatactaacctagagcagttgtggcgtgaagccggacggccacccattcctaggaaaaaacctttaaaagatatggaaaaggaacctttggtatcagaccatccttttgttgacacgctttgggaatggcataatgcagagcagatgattttagactacgaggaacaaaatccagataaattcaagaatacaacatatgagtccacagttgatgcaccctcaatcgatgaagaaaaaagagttgaatacaccgaaggatatttcaaagaaacactgctaaaaaagaaagttgtgaatattagcatcaaagaacttgatctggatgctgcccgtgctgaacgccagctgataaaaaggctgaaaaaggaagccgaggagagaggggaggaatacaaggttaggaagctccgacgaaacaaagaaatggatgagtatgatctgatgcaatggcgtcgttcatttgaagagagggaagcgcttatcagagacatctgctgccggaaagcgcttgatcttcctatcgaagagcccgggcgatacgacgtggacgagacagaggtgtacgggaaggattactatgacccagagaagccaatgtaccggtacgactactggggcgagcccaagaacacggagaagacgaagctggagcgggacgtggagcgccacaaccagcaggtggtcggcgacgcgaagaagtggtgcgagatgtcgtacgacgactacgtccgcaagaagctgcggttggaagcggctgaggcgagggaaaggcggaggaaggcggccgaggcgcaagaggacgagcaggagtacgatgacggcatggacctggacctgaagaagatgaccgatccacgcgccccgcacaaccggttttacatcacgaaatgaaagatggtagctgctgaagtctgaacaactacaaatccctgtctagcctgtgcgtgacgtcttgtgcaagtactatgaacgctgcgtgacgggacggcaaatattc

SEQ ID NO: 17228 - DNA, 237 bp, Zea Mays
aagaaggacctaacggaggttacccacaaggtctacttcgatgtcgagattgacggcaagcccgtaggtcggattgtcatggggctttttgggaagactgttcctaagacagcagagaacttccgagctctttgcacaggtatgttttatgctattattacccttgttatagttttccaatgactaaactcatggtaggtttaaggtttggcagtcttaaattgagattgttttgtc

SEQ ID NO: 17229 - DNA, 3557 bp, Zea Mays
ccgagacctggatttagttaggctagctaaccgcggaagaagaaaagcctccgattccttccctcctctcctcgccgaaagggagaaggatggacagctcagggctgcgggctccggcgccggttcacatggtcgggggatgctgcgaggactgaagactttggatgggtgttgcgtgtgctcatcccaccgagcgagagggagagacgagtcagaaaggcccgcccgtgaagctccatcccgttcttgcccagtgttcatcaggtgcagcttgcgcggatccccctcatgaactgagcaatcgatagaagaaacaaaaagggccatttccgctacagaaaataaatcatcaggaatgggaaaacgaggccacaggcggtctgcatcacaagacgacgacaatgtgggctgtgtgtggggcctcatgcgcatgctttacttccgccgagaccccaaacttttgctggatgcgaagcagttgagtgggaggcatgcgttccgggaggtcagcgggagggggcattcagcaaagaggccaaatgattttgacgggatagaagaagatggtaacatagaagatcgcactttgcagaaaccgacagtaaaaaaccttatggaggatgaattggaaaaattaatgctgctgaagaaatttccaaatgatgaggttcagagaagaaaagccgacctgggaattgatgtctctcttgatacgatttcagagcatacaaataaatcaacagataactcatatcaccaggtgaaatatatagttgtcacaatgaatgcccacacagtgattgcaagaacaagaatgaattgtgtccttcactgaagtccctaatccataaaaaggtcaatgaattgaataatcttccccacaatattggccgtgggcaatctcaagagggcagtgatgctaagccatctgaccaaaataatctttataacaccatggcagcccaatccaaacaattcaaggatgcattggaaatactgggttcgaacagtgaactttttgtgaagctgcttcagaagccaaatcaacatatagctgatagtatccaacagcatgaaaacagtaaggtgtctgctggattagagcctgacaaaattcatggacagaccaattttgttggaggaagaggaagctcaaaacagcatcctttggctacaaaagagcaggctaaagagagaaaatatatgttcttctggaggaagagtaaatcaaatagaaggcagatgcttgacgcaacagatggagctcagactgttagcaaaattgttattctgaagccaaatccagaaagagggattaatcagaaagcagctactgcaagaactttacatcaacagccatgtacatcgaatgctcctggatgcagtggaagggaaaactcaaagttttcaattaaggaagtcaagaaaagattcagatttgtgactggtgagagaagtgaaagaaatttgtcacctgcagaggaccttcaaggagacccacgtaagatcaaagattctgttgttgcaattaataaatattttagacatctccctgaagggagcttggcaaacaagtctgcatcagacattgagaatggcatcaaaccttttatcagcagtaagcaaaagaatcaaaatgggagcataactgaaatcagtggccatatagtagcaccaaaaggtgcatctgtattttatgaagaggccaggaggcatttatcagagatgctaaaaggtaatgactgttccataaactatccagaagttcaaatatcaaaatccttggaaggcatactttctcttcctcatggcaatgtgtcaaccactgggagtagcctgaggggaaaggattaccttgacccctcacctggagaaacagatgtttacgatgcatgtgaggttgagagagaagaatgcacacaagagagaagccaatcacaagaggattttggaagcattgctcactgtacttgcacaacagttgatgatcaggtgacagttcgagaaggatattacacgaatgaagcacaagaaggaccaagacatgctcatgatgagccagacactctgtatattgaaggacttgataaattcatttgccgcgaaaacattcgcaacgaagagtccagtccagcagaacaaagcagagacgatatacgtcaagagatactagaagaaataaatcagggaaaagagcatgttaaaatgtccctagcttctgttgagggcatagatgaaaagttggggcagcaagagccagaaacaccggaaccaagagcatcagccaaattaatctcagacggttctcctaatcaaagcgatgaaaagcaagagaggcccagtccagtatctgttcttgagtcatccttcgaagatattggcagtccagactgcataaacaagaaagagtgtgagctgcatggtctccaaaggaccctgtattttccagataatgaaccagacgttaatgtcctttgggaggacaagaatgtcaggttggactacataaagctggtgctagaactctcagaactgtgcgcagaacaaaatctagaggtatggtacctagaagacgagttgatcagcccctgcttgtttgaagaactacagagccagggtgatcagacggatgatcgaatgcttctgtttgactgtatctgtgaagctctaacagagatccaagagagatattttagactctcctcttggctaacttttctaaaacacgacatacggacacctccgacaggagagaacctaatcacagaagttgataggtacgttaacgggtatattatccagtacagtcttccaagtactctagagcagacaattaaaagggatctggaagttcagacgtggatgaacattagatcgaaaaccgaagggattattatggagatgtgggagtttgtattggatgagttgatagatgagactgtctccgatttgtggatttgaagttctgattaggcttcgtccatggtgcctctgtggcgagcatagtgagtaggatacaggagttctttcgtgctgaaaaataaccagttctatgcggcagaatagcatgggctaccgctagccaagtgtgtaactgcagtggagatcgttctcgtgtagtcgtgtggaggagaacagaagtctaggttcagcagatctccagagctgtgaagtttgcgtggatgaagttgggcacggtttgtctcacagccatgcctctgcacggcgaagtgtacagcagtctgaagcgcattgcgattttcctctttgcccgttgagatttgggagcttgtgtgtgcatgtgtgatgcgtgcacttttcagcgtgatcagatcgcgcttgtttttttataggtttgttttgtgtgtaaatgtgaaaaaaagagagaaagcaaacatacatgattaatcaaatgacatgttttatgtatgctttgttgaatggcgcaaggcacatctacccccatggggctgtgcatgtatttatagatcaaaagatacatgcagatatgtacaagcaaggcaacaacctgccgagaagggaggcgcagctccagc

SEQ ID NO: 17230 - DNA, 2050 bp, Zea Mays
aaagacgcaaaacgtccgtctgcccctctctggttataattttgggcattaattgcacgtctcctccccacctctccttccctccacccgtgccgtcgcctcgcctatccgatctgccacctcctcccgtctcgcacgttccttcccaactccgcagcgtagcctctccgcggcgcgatccagatccaggtttttcagcatgggcctggtgaaggaaggcatcgacatggaggagggaacccttgagatcggcatggagtacaggactgtatctggtgttgctgggcctctggtcatattggataaagaaattgtaaacatccgacttggagatggcaccaatcgccgtggtcaagtcctggaagttgatggcgaaaaagctgttgtgcaggtctttgaaggaacttctggaatagacaacaaatacacaaccgtgcagtttacaggcgaggttttgaaaactcctgtctcacttgatatgcttgggcgcatttttaatggttctggaaaacctattgacaatggccccccgatattgcccgaagcctacttggatatctctggaagttctattaaccccagtgagagaacctatccagaggagatgatccaaactgggatatccaccattgatgtcatgaattccattgctcgtggacaaaagattccactgttttctgctgctgggctccctcacaatgaaattgctgctcagatttgtcgtcaggctggtcttgtgaagacattggagaaaggaaagcatgctgagggtggtgaagatgacaactttgctattgtgtttgctgctatgggagtgaacatggaaacagctcaattcttcaaacgtgattttgaagagaatggttccatggagcgggtcaccctttttctgaatctggctaacgaccccaccattgaacgtattatcacccctcggattgctctaacaacagcggaatatttggcatatgaatgtgggaagcatgtacttgttatcttgacagatatgagctcttatgcagatgcacttcgtgaggtttctgcagcccgagaagaggtgccaggtaggcgtggttatcctggatatatgtatactgatttggcaacaatatatgagcgtgctgggcgtattgaaggaagaacaggctccattacccagattcctattctaacaatgcctaacgatgatatcacacacccaactcctgaccttactggatacattactgagggacagatatacattgataggcagctccataacagacagatttatccacctattaatgtcctgccatctctttcacgattgatgaagagtgctattggtgagggcatgacacgtcgagaccattcggatgtatctaatcagctttatgccaactatgctattggaaaggatgttcaggccatgaaggctgtcgttggagaggaggcactctcgtctgaggatctgctttacttagagttccttgacaagtttgagaggaagtttgtgacacaaggagcatatgacacacggaacatcttccagtcactcgatcttgcatggacattgcttcggatcttccctcgcgaacttctccaccgtattccagcaaagaccttggaccagtactatagcagagatgcttcccactgaatcactgatcgttgatcagtgttccaatattttggcaagtgcagctttgaataaattgaacagattggcctcgtggccattttcctgtatttatctgtagtcaggtccaattcttttctgttggtgagcgcaagttattcatagatgactcggtcatgggaatatttgtaatattatgtcatgtatcgttaaatttcagttgttttgtttcagctgccagaactgttagcaagagtattctggagctggaagctcgaacgcaactggttgtatctatatccgtgaatgccgaataaaggaggggcaataaactgcagcgaaatatgtgctgtcagacattgttgaaaattttctcgattttgctgttttgagatgtgagaaatcttttcactgaaccaaaggtgttag

SEQ ID NO: 17231 - DNA, 1306 bp, Zea Mays
ctttaccaacagtgtagagggctgattctacttgcaaagaagactgtgaatgcaggggtctttctatgagttgttccaagaattgtcgctgctcagatctatgtacaaacaggccattccgcaaggataagaaaattaaaattgtgaagacaaagcgatgtggatggggtgctgttgcgttggagccattggagagaggtgattttgtaatcgagtatgttggtgaagtcattgatgatgcgacatgtgaacaaaggctttgggatataagacggcgtggtgacaaaaacttctacatgtgtgaaatcagcaaagattttacaatagatgcgacatttaaaggcaatgtgtcacgttttctaaatcacagttgtgagcccaactgtaaactcgaaaaatggcaggttgatggtgagacaagagttggtgtctttgcctctcgttccatcgaagttggagagcccttaacttatgattacaggtttgtgcattttggagagaaagtgaagtgccattgcgaagcagtgaactgccagggatacctgggcagccaaataaagaacccaattcaaagcattcttgccactgtagcaccgcaagtgcagttgcgagagtattcgcccatgcaccacgaagctccaagattgaagccaataaatcacttgttaccctggaccaactgtatagaggtctcttttaacctgagaagcaaaaggaaaattgaccggctatgctgggcccgcaagaagaagagaacatccctcgtgccatcttcaacaagcatgccagcatcgccgagtgaagttcctgccgcggatttctaactgcccttcgttgaagagcaagcctgccctgtataataatttcatggtacattctttacatgcattggttggaaacgattctttcacattgctcatcaatggtgttgtaacctgcaacattctttatttggtttcatagggcattcagtcagtttacgggtggtagtttgtcggaacatgtacccaatttttctgatgaaacaaatgtttgagcttcatgtaatgttggctgctgttttttttatgcgagataatgttatgaaactggatagtccctgtaaacatggcttaaaacatgacagaattattttcttttaggagaatgctaccccttttattttatgtacaaggaattgataaaaagagcagaggtcctagcggcctaggcgtgcgagagcctagagcgcatatctaatcatcagtttaatataaaggcgattaacgaagacacggaacttactgtcctgtcttgattgagttct

SEQ ID NO: 17232 - DNA, 1787 bp, Zea Mays
cgtcctcttaacttatatacgataatggactcaagttattcacttacgggcaattatggagcgcatggccttaaatctgatgttcgtgacatcacgaatcacattgagaacctctcattgagtgaacttcttgatggcacctacaagtattccagcttaggaagagataaaggaaagaaggtattgcgcacgaaagaggaactcctagtctctgttagaaaagctttttctatgctttctgacatggactattgccacggaaaggactctaatctcattctgggtccgaaacctcctcctgcatgcacctctagctgtgatatcaaggagcaatgttgtgacaagccatcccccttggttaaggactcgtcacaaatcaatgtctgtgatactgcactttgtcatccaaaagatatcttaagccgattaacacttcctcatcaacaagatctggactctcttttaacacctggaagtgagagcacagctgcagttaagccagttcgtggagctagtttaccaccatttccttggtcacactcacaggctgggggctgtcgacaaagtgttgactgtggtaaacatgggtcaagtagaagttactcccagtggcaatgggtgcgggttggatccaacctcacttctctagattatgaagatacgtctgtccatagaattgatcatctccttcaagagatggatgcagcaaaattatgtagaatggattcatgtgatgggcaatataatttgtgtggcacggaatcaacatctggatcacttgcacaaaacattcaatccagaaaaaatgggggtgagcatggttctcagcaactgcaaaccctggatcgtgttgactctttagatggcttccagaagcatgacagtgaacattctcttttaaaaacttctcaagtatcgccaaagatacagcatgccgctgaaatcttatgtgatatgagaagaagcattgaatcgttgagtggccagggatacagcaatggggtgattaagtggccaaaatcaccatccgaaaaggtgatgaaagcacggaagccctcatcccagtttggtataactgagagctcatcaggttctcgtaacaacgatgcaacttggaacggtagcagtcactctaccaagaaattttgtgacaggaagaatgattctgcatgcttgaattaccctggtaaggaaactataaggtggcctgtgcctgtggaaggtggcgcttctcctgtcaggtcgtccgagcgcggtcctatgctcgatatgaggcagccccatggaaatggtggaagacatcctgttcaggtgccatcacaggtggcacggcttgaaaaggagtatgagaaccagcagaagttgaggaaagcaacactgacctcgtctctagggcctccgggagattggagtagggagaggaacaggagggtgtgaagtctgtacattattcatgtcaaaaatcataggctacggtatatcgtctgggggggaacagcggaaccaggcaactgtttcataagaggtctcagaacatttgggagatgtgataatttaggtggcgggtgatgtatctattgggccatttgttgttggggaaaccgttgtaactagtgtaaatttcgttttttattaccatcatatatcacaggtctcgtctcactatagtccgttgtgtattactagtatgtgtcgaagccctcaatagtttacgcgctaccattttttgatggttgcaacttaatctcagttttgcttgtcgtcagtcttgttaaatcgtcacccga

SEQ ID NO: 17233 - DNA, 526 bp, Zea Mays
agatttcccaactttttgttcctcgcgccgccgccgccgccgccgtgacggaaggaagaggaggagcaaggagcacgacgcgatgggccactccaacgtgtggaactcgcaccctaagaactacggccctggctcccgcgtctggaagtacgggctcatgtgctgcaggcagtgcttccgcagcaacgccaaggacattggtttcatcaagtaccgttgaagaggccactgtgctgctgtggagaacttcctacatcaaagaaatgggtccttcattagaaggcctaatttatgcgctttagctttttgttcagaacttgagactcatgtgttaaactcgacttgttaaagttttgatggctactttgtgcttgttggaccagctataatcagaagattgaaattttctcactcatgatgtttgttcttatcctgcgtgtatgctcagttttctttcttgagttactgtattacctgggtaactgttcctcacttcatggatgattctgctgaagttgaatgatga

SEQ ID NO: 17234 - DNA, 607 bp, Zea Mays
aagtagaccggaaaaccccatctcccccgccgccccaccacgcacgatggccgccgtaaggtcgctgctccgctcgtcggcctcccttcttcgcgccgcccccgccctcgcgagatcctcggctaccacgcgtccgtctcttcggcgcgcattggctgctcctcctcgccttctccggtcgcccgtcgagtcgagcttctgcgtggagtcgcttctgcctctgcacaccgccaccgccggtgcacgcatgacgtccatgctcgccgctcctggccaaggcctcggctggctcacccaagctgaaactgacggagtataacgccccctgtgggtgctcccctttaggaaccaggacatcaattgtgcttcgagttcttctgtgcctggaggaaacaggaagagttgattggaaaaagaaaaaatgggatgtgtttttctttttgttcatgtgaactgagatacgacttaataaactagatcttcgaatgatgctctgacccccccccccccctttttttaatgttttttcattgactaaaacggttatgtaatgataactatgtgacacttgttttgtttggtgtgattcttcagcgtagcctggtga

SEQ ID NO: 17235 - DNA, 226 bp, Zea Mays
acaagtgtcgcacgagccttgctgttacaccatcggatctgaccgaagactgacctacctcccatctcctcgccacccgacgccatgacgaattcttaacactggatcgtacccgattctgcaacccacgcgctgagaggtcgagggcaaaacagggtccatcagagtactataatcgcaagaagagtaaatcgcaaaccgaacaactggccaaaccaaactcggc

SEQ ID NO: 17236 - DNA, 1557 bp, Zea Mays
cccagaccaggcaggcaggcagccagccactcacctcgaaccaaattattagccccgttgtcgccgccggctgctacacacacttctccgcgttcctcgccgccgccggagcaatcccgcggcgcactgtctaactcaccaccatgctgcagagcaagtcattcgtgaagaagacgaagcaaggccgcatccaaaaggtcgtcagggagcactacctccgcgacgacatctactgcggcttcgtcccctgcaccgcctgcgccgcagccgcggagcgaaagcttggcgccgctgccgccgccatcctcgtcgtcgacaccaacgtcgtgctccaccagatcgatttgctggagaacccggcgattgaggatgtcgtcctgctgtcagtggtgctggacgaggtgaagaataagaacctttcagttttcaacaggatcaaggcactgtgtatcaacaaagcacgtagattctatgttttcgccaacgagcagcataggcgccatcctagcccaacaaaagagatgcttgagccattactccgtactgcctcttcgattggcctaaatctggacgtgtcatcctcaaaggcattagctgaatcacttgacaacgcaaagagcaatgacccatacttcaacaagcttattagaattttggcgactagatgcatgacacaggctgtttatttctgcagtggagatttgaccttttctgaatattaccattatgggcttgctgcttctctttacactcatttcacttctcccattcgcagatatgcagatgttgttgttcatagattgctagctgcagctctgaatattgcaaagctcccaccaatctttcaggatggtccacaacttacaggcattgctgacaacctgaattacaggcacagaaatgcccagatggcaagcagagcatcagttgaactccacacccacatatatttcaagacaaggccaactgacactgaagctaggatagtaaagatcaaggcaaatggtttcatagtatttgtcccaaagtttggcatagaagggcccatctaccttactccgaagggcgacaaaggcggtgattgggttgttgacgaggtgcaccagagagtaaccaagcccggaacaaacatcagctatgctatcctccagactgtcaggattcatatggaggttgttgaacctcagcctcatcgcccaaagctgcaactcaccctgatatgaaaaatgtacagctgaattgtagcaacattgtagtgttttcccgggcctctcacacctccagctcactctttagttcaacattggtgtgattttcgatttgtaaaactaatcagtaatcaccacatggtcaagattttgtagtatcagatagttttttctcaatacatggggctctatgcatggaagcttagtttctgaatggtactcacaatagagaaaatatacgacattgtattctgtttatgtgaaagagatgtatgttaatgtgacaagggtggttattgtgcgcacgcaccattcatttatatgggaagcgaacattatttttgcatgg

SEQ ID NO: 17237 - DNA, 532 bp, Zea Mays
ggacccgttcggtcagccctcttccccctcaatagcgcgcgagtctggcgggcgcactgatttctccgggatgggatcgtggccggaattctctcctcctcacagtataatgcgtgtgtgccccgcgctagccccaatccatccacgccctgaattgtaggctcgtgcgctcacggccagagaggagcaccaccagatatcgtcgtgaacgcgcagcggatgtagcctcgaatttgttcatcttgggcgtggaatctcgtcgcagagcttcccttgggcttgccgaaacgatttggggcatctccgtgcgggattggcgaccggagcgacggggatttctcgccggggtcgctgcatcgctgttgagccgcgccaatgcgtgggcagagccaccgcctgcccgaattgaggtaacaaaaccgccatctagttcgcctttccagttgcatcgtgtatcgcggtccaaatcacgacttcgggcacgggagcgcgtagttgctagcctctgccatggctccgccgtggagctcgg

SEQ ID NO: 17238 - DNA, 1637 bp, Zea Mays
tggcccagcccagttgttgggcgaacagagagtcgtcttgctctactctagtcgttcggtcttcactcgacaaaaggtgagggagtgcagtccggggacgggagggagaccaatcggagctgatggaggcagcggcggcgctgccgccggagagggatacgtcagcggactggggagatggcgtggtaccgctaggtttccgggtgaaggcatcctctcgcgagtcgccgtcacagaaggcggggaacgtgctggaggccgacctgcgctcccactgggccaccgccaccaacaccaaggaatggatcctccttgagctccaggaaccgtgcctcctctcccacatccgcatctacaacaaatccgtcctcgagtgggagctcactgccggactgcgatacaagcccgatgcattcgtcaagttgcgcccccgctgcgaggcccccaagcgcgacgtcgtctaccccgccaaccacaccccttgccgctaccttcgcatttcctgcctgcgcggcaaccccatcgccatcttcttcatccaactctttggcatccccgtgcctggcctcgaacctgagctccagccactgctcagctatttactcccgcaaatcacatcctccaaacaacccctttctcacaacatgcacctccagttgcttaaagatatctccaccaggctacctccatttcttccccaaattgaggctgaccttaatagtgtcgtggacaccccagaaagcagcgtgcggttcttggctctacttgctggtccattttatcctatccttcaccttataaatgaaagagatcctaccaaatctttgtttggttctgctgattcagatgccctcagaactagtccagcttctactccaacagtttcttcaaactttgaggcacaaccaaggagatcacggagtccatctgttcagcctgcttcatatttgctggcatttcgatctgaaacaactatgctcctcttaaggaaagcacataaagacaaaacccttggagttgtttgtgttcgagcatcgaaggtattgcaaaaactgttggagcctgagccatttttagacaaatcgatgtatactgatgtcatgctaccaaaccaagtctctgatgaaattcctaaaagcgatgctctcagcctagtacattctacagactactccagtatgtttggagaggaatttagcctgtcagagaatcagtttgatggttcattactgaatattttggatattgctgctgtggaagaaggcattcttcatgtactatatgcggctgcatcacagcctatgctatgtcgcaagcttgctgaaactacttcagacatttggtctgtcttaccacttgtccaagctctacttccagcacttcgtcctccaatcagttctggtcctattgaacatattgatgattcttttagccaatggaaccatccaaacattcagaatgctctctcccagattgttacaatgtcagtatcgtcatcagtttttcatcctcttctcagagcttgtgctggttatctttcatcctaccttccatcacatgtaaaaacggcttgtgttttgcttgacttgtgtcggggggcattgttatcatggataccaatgataacagcaaaggtc

SEQ ID NO: 17239 - DNA, 2241 bp, Zea Mays
tttatatgagcgtgctttggacaagaaggacctcgcgggtgcattatagcaaactctagtatatattgctgtttcgatttgttggttctaagttccaagtaccatgagtccaccgagtgtgatggggcagtttggggacacaacctacaccaaggtttttgttgggggactcgcgtgggaaacccagaaggagacgatgaggaagtacttcgagcagtttggggagatcctggaggctgttgtcatcactgacaagaacactggcagatccaagggctacggatttgttaccttccgggatccggacgcggcgatgagagcttgcgttgatcccgcaccggtgattgatgggaggagggctaactgtaatcttgcttcccttggggttcaaagatctaggcctcctactccccagcatggaggagctagaaactttagagtaatgaaatccttcaaccagcaggcaggaatccaaggtggactcggcgcagcttttccttctcatgccaccttccctcattatgccatcccacaaggccttcccttccatgtctatgggtactctccatataccccagactatggttatccaacaaacttctacaatatatatggaggagctcagtacccgttttatggaggagcaacagctggcatggtgacaggaacaagtcccttttatccatatttccaatttgggcagtcaggaaacactactaccaactatacaagtggacaaggctacaacttgcaacaatacccacaaatgttccacttctcaactgtatcttctacagctgcagctgtgaccggctttgctcagcaatatggaggaccattgtcactagcagcaagccctcaagcccaagcagtgtgtatccccattaaacaggcatgactatggcactcacagctccaaccctgccaactccaacacaggctgctcatccttaccggttgattccctcgcactttgcagtttctgctgctccagagcaacccttggcctaaccatggtctcccttctcaccgttgttgtactgtctcgtttccgacgtgtttgagtccatgcatccatctctaacaccaaaaggcactattgtagatcacgcttatcagtcaaagtgctcacctccatatcccacatggtcatgtggtgaatggatattagctttagccccaggatgggcataaagcttcatgccccaaggatggggtgttctaacagacaagtacaaaccccaaccattctaacaatagtccaaggaaggactttatctgggagagttaatttcagccgtaccaagacaatgctgtagctaaaagaaactaacagtcaagcatgacccagggatggttcatgctgatactagtcaaattggacaacaatgacagctaaataactgactagcatgccactcccacatgtcattagtagaatcccaactgtacctagcttaggcatggcatctcttgttgaagcatgaaccatttagcaaaacctacccttctatagtcccgatgttacctagaccaaatgcatttgatatatgaccagcgactacttgtgtaaccaactcatcttttctttgcaaatgcttagatgcatcaactaacattttatttgatctttcagtcgatagcttgcatctaggtggtcaaggctctaaggagagcctgtgcccctaatcagacacaggttcagagtagtgctaatgtttgtttttagcacttggcactacctcctgtcactccaaacacagtattgggactccaaagaaggctttggagtaaccaagcactgctgtgtaactcattaacacaatggacccacagataaatttttattgtcttgggccaccccactcatgtagatgtcattacttctcagtgtcactaccatggttaggtccaggcccccctccccaaccgcgtcccccacctctctcactgcacatcgcagagaccttagtgctctttaatctactattaccaggcatggtggttgtaataataaagtagcgctgtgctactcgtaggacatgaagaactatttgttattcaacccttcatatgtacttaatatcttgtctatttcagttcagtagtcggtacttatttccatccattgtaatgcaccatataatgttgtgtaatatatgtccactgtgctgcacatttcttagggcatgtttggttcgtcttttttgtgacgaggttttctgagaatttgtttatgag

SEQ ID NO: 17240 - DNA, 1079 bp, Zea Mays
gaagattatgtcaagttactggagtaattattgcaaacaggcaatctgcagcacggtcaaaggaaagaaaagctcgatatataacagaattggagcggaaggttcaaactcttcagacagaggctactactctttcagcacagctgacactattccagagagacacaactggactttcagcagaaaatgctgagctcaagataaggttgcaggccatggagcagcaggcccaactgcgtgacgctctaaatgatgcactgaggcaagaagtggagaggcttaagatagcaacgggcgagatgtcgaagtccaataacgagcatttcaatatgggaatgcagcacgtttcctacagcccttcattcttccagctctcggagcaacacacagtgcagcagcatggaaacattcagctgccgcaccatttccaacagcctccgctgaatgtcccgagccaccagatgctatcccaccccaactccctctcgaacatggtgcagcaagactctcttgggcgtctccaggggctggacattgggaaaggctccatggctgtgaagtcggaggctgaggtcgtggtgaagtcagagggcagctctatatctgcgggtgaaagcaacaccaccttctagctatacaatacgtctgccttccaagaagcctttgtttggtttagagttcttcttttgttcatagtctgacatccttgaactgcttcctccttccctgtagtttttttttattccattcgttatatctagttaccattgatcggttgtgtcgatcgttgttgttgtcgtggtggctgattctatagggacattggtgtgctggtttcgagtttgttatgtgtgtggtatggttggttgtttcgagctagtgactgaaagggcaccgagtgattttttggcagaatttcttttctccacctgttttagttttgttatagaacaaccatgatttctccttctggaaatgtgtacattgtgttgctatgctaatttctagtaataattttgatgatcccaactgtaccctgctgtgcatgtgcgtgaagtgtgttgtttcaggctatcttt

SEQ ID NO: 17241 - DNA, 967 bp, Zea Mays
gcggcgcacactgcccttgcgcccgcaccgcccactccatccaacggccaggatgcgctaagtgctcctcccgcggatcgtgatccgtggcttcgcatctccagccaatcagaatgcagaacgtccctcccgccggatcgctcccttcccgaactatataaaacaaggtgacccggcccagtagaatctatccagtcgcatctccctctccgaaatcaaggtagcgtacaccgctgcagtttctagagccctctctgccactcgtgatcccactagtcacaatgcctgccctcgccaagcccgcctcccgcaccgccaagcccgccgcggctccgaagccgaagcctgccgccgccaagccgaaggcggccaccgctggtgcctcccacccgccttacttcgagatgatcaaggaggctatcacggcgctcaaggagaggaccggctccagctcgcaagcgatcgccaagtatgtgggggacaagcacggcgcgtctctgccggccaacttcaagaagatgctttccatccagctccgtgggtccgcagccaagggcaagctcgtgaaggtcaaggcttcgtacaagctctcggacgccgccaagaaggcatcccccaagaccaaggccaagccgaagaccgtgaagtcccctgcctccaagaaggcacggaaggcctccgcatgagatgggttgctttaggtctaagctctgattgtggttggtgtcagttaggtactgtacaaactaagtgtgtgcccaaagtgtctcaggcggtgtgttatgtgcttagcaagttctatctatcagagtgttttagtttaacaatggttttacctctggcttttgtagtcaggtttctgaaatccctgttctcgcgcagtctaaatttctgaattctagcgcagtacaatcgtttcgatctccaataaaaaaaataaaagcgtcttccgcgaagtacctgcctc

SEQ ID NO: 17242 - DNA, 1955 bp, Zea Mays
cgcaagtaacccaacactgtcttccaatgcaagtgactgccccgacccatcatgcgccaggcgaatcaaaccactacctgatttgtttaccccccgaaatttgccgtctcctcgtctcgctcctctccctgcgcagcccccagatccggcaccgcccgctcctcgatccccgcaccccacgcccgcaggccgggaccggcggggtcgcgcgccgggtaggaggaggagaagaggaagggtggtatggcggcgccgccggcgagggccagggccgactacgactaccttatcaagctgctcctcattggagacagcggtgttggcaagagttgcctcctgttgcggttctctgatggttccttcactacaagctttattaccacaattggtattgactttaagatacgaacgatagaattggatggcaagcgtataaagctacagatttgggatacggcgggccaagaacgcttccggactattaccaccgcgtactaccgaggagctatgggcatcttgctggtttatgatgtcaccgatgaatcttcttttaacaacatccgaaactggattcggaacattgaacaacacgcctctgataatgtcaacaagattttggttggcaacaaggccgatatggacgaaagcaagagggctgtacctactgcaaaaggacaagcacttgctgatgagtacgggatcaagttttttgaaacgagtgcgaagacaaacctgaatgtggagcaagtgttttttctccatcgcacgtgacatcaagcagaggcttgcggagactgattcaaagccagaggacaaggcaatcaaaattaacaagccagaccagggttccgaggcaccagctgcccagcgatctgcttgctgcggctcataagcagatgcacgatggccatagcctttggttatttgacattatttatttcccgcttggctgttataggaaggatttgaagaagccacttatgatataccgatgtggttgtactcgtggttgcttccattctttgaagcaaccacctcttgctgttgacgtagctattgctattgctgggagctattgcactcttgcattggatccgttggaaaaactctcccctccctacagtgtgtaatgaatgaaatccatgtcgttgggtttgcatggaataacgtgtcgctcttgtgtgtgtgttttaagtgtcgccgttccttgataatcgaatttgttgggaccaagaatatatctacctggaatgtctgtatccacagaaagtctggatcttcgatttaggttaaaaggaaacgtatctggaaatagaccgctgcatgttgtaatgtttgaaaaaagagtaaataaaacttgtacagttgtatatactataattgtaggcagcttgtcaaagaggagggcagtccagtatcagcgatttccgttcgcagtgcgctgtgttgccgagcacggcgtcattccggcacttggcgcagttccccgacggcgccaggctcaagtccaaacagattccgctggcacagccagcgccgccaacgttggcttcctcaaccgacgtggcgtccccagagcggagctcacattcggactcggctgccagcgaagtcctgcggtgccgacgcatgtggccgcccagcgcctggccgaccgcgaactcgagcccgcagatggggcagccgtgcagcctcggccccgccgcgctctcgcgcggctcatccagcctcgttcggcgtagtagccccgggtcgccgacgccgtaggggtaagggtagggcttggggcgcctgtggctggcgcggtggccgcccagcgcctggaacgtcgggaacctcctcctgcacgtcttgcactcgaacacgcgcccgcgcgcgccgagccccgccgccgccgtcctcgcgccgccctgttgccgctgcgagaggagcatggggacggcgccggtctccat

SEQ ID NO: 17243 - DNA, 2833 bp, Zea Mays
ggcccaggctcttggaggacagcaatggatcagtgacatcttgacacttctttcctggacggggatccgacaatttttgctgatttgggatgatgtaagcaatattgtgttaacacaggaggcggatattcacacctggctgcatacttcctctgagtaaggacaattggatcaatttaagtaggtctgggcacacaaatttgaactattaacgcattgggagtgcttgtgtgttagaggtctaggaggagctatgaggtactacttccgtcaggtccagcgtttggttggagatatggaaggaggagctctcttgtttatagatgacctcaactccaagtgacaaagtgaacagctgttgaacttcccgtctatttctgtttctttttgctggatttggagatggaggtgaattcctctggtgaggaaacggtgataaaggtaaggaagccatacacaataaccaagcagcgggagcggtggacagaggctgagcacaaacggttccttgaagccttgaaactttatggcagagcatggcagcgcatagaagagcatgttgggacaaagacggccgtgcagatcagaagtcacgctcaaaagttcttcaccaagttggaaaaggaagctattaacaatggtacttctccggggcaagcccatgacattgacataccgccaccacggcctaaaagaaaggctaacagtccatatcctcgaaaaagtggtctcagctctgagacaccaaccaaagaacttccaagtgacaagtcaacaaaaccaaatatgcccttgagcaatgagaatgtactaatggcaggtgatgcatctcttcagaaatttcaaaggaaggagttgtctggaaaagaaagttgctcggaagttcttaatctcttccgtgatgccccatctccatcattttcttcagttaacaaaagctcttcaaatcatggtgcaccgattgaggcaagtaaaacaaaaatccgagatatgaccattatggaaaatagttctcttaaccccaacatgcaagaggatgtaaaggaaatcaatgatcaggagatggaaaggcttaatggtacccaaatcagctctaaatgtgaacactctcatgagggatatttggacatctcaatgcaacaaatgaagctaaagccagagtctgtggagacaacatatgtggacaaacaaaccgcaagagcttcacactccctagcggagagaactgggacaactagcattccggtcactgcaactgaagaaactcattctgttctaacaagtgatcaagtgggaatcaatggaagcatgaacccatccatccatccaatgtttcctgcagatccaaaatttgatagcagtgccacaccacagccttttcctcataattatgctgcctttgctccaatgatgcagtgcaactgcaaccaagatacccacagatcattggtcaacatgtcatccaccttctccagcatgcttgtttccacgttgttgtcaaaccctgccatccatgcagctgccaggctcgcagcatcatactggccagcagctgaaggtaacactccgattgatccgaatcaagaaaatcttgcagatggtgttcaaggaaggagcatagggtctcctccaagcatggcttctattgtagcagctacagttgctgcagcatctgcatggtgggcaacacaaggtcttctccctttcttcgccccacccatggctttttcatttgtgccagctcccagtgctgccttccccacagttgatgttccacgaccttcagagaaagatagagattgcccagctgaaaatgcacagaaggaatgccaagaagctcgaaaacagggacagtttgaaggtttcagagttgccgcttcttcagagtatgatgggagtggaaaaggcgaggtgtctgtccacacagagttaaagatatctcctgtccagaatgctgatgccacgtctgccgcaggagctgacacgactgatgcattcatgaataagaaaaagcaggaccgctcttcatgcggttctaacacaccttcaagtagtgatgtagatgtggacaatgtccctgagaaagagggcaatggtaatgagaaggcgaagcaagcctcctgcagcaactcttcagctggtgacactaaccaccgcagatttagaagcagtggaagcacgagtgattcatggaaggaagtttccgaagagggtcgtctggctttccatgcgctgttcagtagagaaaagcttccgcaaagcttttctcccccacaagcagaaggctcgaaggaagttggcaaggaggaggaagatgaagtcaccacagtggcagttgacctcaacaagagtaccacaagcattgatcatgacctcgacacaattggcttcaaaccatacaagagatgttctgtggaagcgaaggagaatagggtgccggctagcgacgaggttggtaccaagaggattcgtcttgatagtgaagcatcaacatgagcgatttctacatggttaccgctcggacttcctctgccgccatgaagtttatgacaaagttgtatttacatctaaactagtataggacttaaagaccttgcaatgcaatgcttcatgaaactgttgtgtgctgtattttagtacttgtgaagcagcccggtagactgcttttaaacctttatctcgtagactctgatttaagcatcaagcaactattgaactttatatttttggcgggaaggaaaataattattttttgatttattttgcagggtcatgcatttacatagcactcttgatgcaaaagtttatttcgtaaagttgtagtggaatatgc

SEQ ID NO: 17244 - DNA, 2222 bp, Zea Mays
gtttctaggaccttcccacgccctgcgcccctttgctgtctcaaacctaccttaaacccttgttagtttctagaaccttccagacctccagttcccgacctcggcgccatggacctggacccagaggggatcttccgcgacgacagcgatgaagacgaagacagtgtccaggagagggaggcgaacaaggagatggttgtctaccttgtcgacgcctcgcccaaaatgttcacccctgccaccacccaggacaatgaaaagcaggagacacatttccataccattgttaactgcatcacagagtctctgaagacacaaattattggtagatcttatgatgaagtcgcaatatgtttctttaacactaaagagaagaagaatttacaggactcagccggtgtttatgtttataatgtcggagacagagagcaacttgatagacctactgcaaaactcatcaaggatttttctttgatagaagattcttttatgagcaccattggaagtcgatatggaataacagctggatctcgggagaataccctgtataatgctctttgggttgctcaggcgctgttgcgcaagggatctgtgaagaccgtgagtaaacgaattcttatattcaccaatgaagatgatccttttggtactattacaggagcagtgaaaactgatatgattaggacaacacttcaacgtgcaaaggatgcacaagatcttggcctgtctattgaacttcttccactgagcccgcctgatgaccagttcaacatgtccctgttttatgcagatttgattggtctggatggagatgagatgaccgaatatttgccatctgctgatttagatggtgtttatttaatggcacatatattagtatccagtgggacgagactgggaatagctaagccacatgaatacatgattttggagctgaagtttatcagtgatctgattgaatacgttgagaggtctttcatatgcaatgatactggggctctacttcaggatgcacagacacgtttccagatgtacaatgacacaattgtcaaattttctgtacgtgaactctctgaggttaaaagggttgcaagccatcatcttcgccttataggtttcaagccattggattgcttgaaagattaccataacttaagaccatcgacatttatttatccgagtgatgagcgtatatttggaagcacctgtgttttcgttgctttacatagctcaatgttacgtcttggaaggtttgcacttgcattttatgggaatccaactcgaccacaactcatagcccttgttgctcaagaagaggttacttcgtctggtcgtcagtttgaaccgcctggcatgcacatgatctatcttccatactccgatgatattagatatcctgaagaagttcatgtgacttctgatgatgcaccgcgtgcaacagatgaacaaatcaagaaagcttcgaacatattcaaacgtattgatctgataaatttctctgcatgccaatttgctaacccagctttgcaaagacactatgggatcttggaggccttagctttaggcgaagatgagatgcctgatataaaggatgagaccctgcctgacgaagaaggcttgtctaagccaggggtagccaatgctattgaggaattcaagacttcagtctatggtgaaaattatgaccaagaggaggcagaagcggcagcagggaaagcttcccgtggtaatgcttcaaaaaagcggaaggaggtcactgatgcagctgcgcagataagtgctgcttatgattgggcagaacttgcagacaatggaaaactgaaggaaatgaccacggtggaattgagatcctacctgaccgcgcatgatctcccggtttctggtaagaaagatgtacttatcagcaggatcttgactcacctgggtaagtgaagccgggtatccgaactgttagtttcctgagacccgactgacatctgtagtgctgtctcgcggatccttgtggaccgtaatcctcccccgtgcaggctacgtgccgattttttgtatagcgacaggacagcaccagttgccaatgtaacctgtgttaagtttcgtcttgtggtatcatctgcttgtcattgtcaacatgaaacataatgtaattctggatacttagacccacaatatggagcataactgcataaggtatgttaaagcataggccctctttagcatggcta

SEQ ID NO: 17245 - DNA, 770 bp, Zea Mays
gtttgtatgcattgtagaattatcacttctaaattcaactggatattcttgaaatggaaatgaagctcctggaagctctcgactattatttggttgttttccatccatatcgtcctctcttacagttgttgcaggatgctggcataacagacctgacacaatttgcctggggccttgttaatgatacatacaagatggaccttatcctcatataccctccctacatgattgcactggcctgcatatacatagcgagtgttttgaaagataaggacaccacagcatggtttgaagagctccgtgttgacatgaacatagttaagaatatctctatggaaatattagacttctatgacacctacaagattgatcctcaaaggggcatccctgaggataagataagccccgtgatgaacaagttgccggcaaaggcttaactcagatttggcgagcttaggagttgtaaactagtagtaaactacatcatacttccaccatgtgtgtactcagcctgcactgtcgcttgagacgtgttgatgaactacttgatagattcgatgcaaaaaccccatggaattgtttgtgtatgctgctggagtttattcaagttagtagcatctgcatctattaactatttattacgattgttattccagggttcttgacattaatatgaaaggtgctactttgttttacccgaagatgttttcaagcttttggctgttaaaactgcatcaccagcaccggcggtgtgcacgctgggatccaat

SEQ ID NO: 17246 - DNA, 372 bp, Zea Mays
ttccgaaaaaaattccgagacagaattccggaaaattccgagacacaaatcctgtcacacccggctttaaggaacaaagtcaggtgcatctcatacatgcgccaagaagacaacatatataataacacagtgtatagagataaatgtcaataacatcagagtacttattacatagcggaaaacttattacaaaataaagtaataaagataaaacgaactaatgatcgtcggtgccaatgtcaacagagaaacgccacctagatcagatcatactcctcgccttgtggctcctcctgaaccacctgctcttctcctgtgggggggtgtgagacagcaagggtgagcttacacatgatcatagctcaacaagtt

SEQ ID NO: 17247 - DNA, 2648 bp, Zea Mays
acctggaacacacgcaccgtcccaagttaacctctcgtgctcgggcactttctttttccttcccccctgtgcgctcggccgcctccgccgctgcctcgctccctccgcgcccaccacggaggcgcacgcgcgggcgcagcgtccctcgcgtgcctcgccttccgcactgctctgtccgcccgcctggctcctgcctcctcctcctcctcctcctctagggttagggcacgcgtcgcgggggcccgtggcgcccggcgcaatgcggaggccgtcgggggccggcgtgccgagccgccgccgccgcgcgatccaggtgctcgtggcggtctccctcgcctacgcggtcgccgtgctgctcctcgagtcgcccctcgtgtccacgtcgctgcccggggcgggggcgtccgccgcggcgtcgcggaagctccacctcgacggcgcgtgggagggcgcgggacgagcagcgccggcgcgccccgcgaagcacccgcacagggagaccctctcggcggacgcggggcggggacgggcgcgccggttggcggggatcgtctctggcctcgagctccgccacctcaactccacccgctccggctcgctccgcaaggtcgccgcggaggccgccgagtcaggggcccgcgtgttctccgacctggaggctctagcgacggccttgactttctcgggcgattcgtcaggggaggaggaggagaagagcaagtgcccgcactcgatcgtcctcagcggcgacgagttccgggagagggggcgggcggtggagctgccgtgcgggctcacgctgggttcgtatatcacggtcgccgcgacgccgcacgaggcgcaccctgagcgggatcctaagatcacgctgctcagggagggggaagagccgatcatggtgtcgcagttcatgatggagctgcaggggctcaagacggtggacggcgaggatccgcccaggattctccacttcaacccccgcctccgcggcgactggagcggcaagccggtgatcgagcagaacacctgctaccgcatgcagtggggcactccgctccgctgcgatggctggaggtcccgtgccgacgaggagactgtggatgggttggccaagtgtgagaagtggattcgggatgatgaagggcggtccgaggagtcgaaaacatcatggtggctgaaccggctcattggccgtacgaagaccgtctccgttgattggccatacccattcgtggagaaccacctgtttgttctaactctcactgctggattggaaggttaccatgtgaatgttgatggacggcatgtgacatcatttccataccgcactggatttgttcttgaggatgctactggcttatcattgaatggggacctggatgtgcaatcagtgttcgcggggactctgcccactacacatcctagcttttctccacagaaacatctagagttgttacccagttggcaggcccctccccttccagacgaaccagttgagattttcatcggtatcctgtcagcaggcaaccattttgctgagcgtatggctgcaagaaagacatggatgtctgctgctcagaagtcgtcgaatgttgtggcccgtttttttgttgccctgcatggcagaaatgaggttaatgtggagctgaaaaaagaggctgagttttttggtgacattgttattgtcccattcatggatagctatgatttggttgttctcaagacaattgccatatgcgagtatggggtccatgttgtatctgctagatacataatgaagtgtgatgatgatacttttgttagacttgattcagtaatggctgaagtgaagaaaatccagaatggtgaaagtctctatatagggaacatgaattatcaccacaagccattacgtgatgggaaatgggctgttacttacgaggaatggccagaagaggattatcccatctatgcaaatggtcctggatatgttatatcctctgatattgcaggttccattctatcggaatttttaaagcataaattaaggcttttcaaaatggaggatgtgagcatgggcatgtgggtagagcggttcaacaacaccagacttgttaaatatgtccacagcatcaaattttgtcaatttggatgcatagatgattattacactgcacactaccaatcaccaaggcagatgttgtgtttgtgggacaaactgcaggctggaaaagcccaatgctgcaatatgagatagcaagaatggatgtggtggtactgctgaccaggtggtgtttgagctggaaatggaaacaaggggaacagacagcagcctgtaacgcctttccctcttcttttctcaacgtatagaccgagttctttgagcagtatgagacctgcttggggacttgatttgtaaatggaacggttagaaagcttagttaaataactgttactttttggcaccattggctgtggttgctgtcagacaacccagctggtacacatgagcgatcttggtggacaagaattttgctgtgtaacttctcttaacatggtcataatttatgatttgatcagttggtggatgtatcactatctcgcgacttcggctttatgttttttcctcgacactgtttggtttaatatccaaggcgtcacaacatgcc

SEQ ID NO: 17248 - DNA, 118 bp, Zea Mays
gtctagtggtatgattctcgctttgggtgcgagaggtcccgagttcgattctcggaataccccttcttttgattcgtggcagcactaagattggtatatgtggacttgaaacccctat

SEQ ID NO: 17249 - DNA, 3993 bp, Zea Mays
catagcttctctctctcccccaaccttctcttccacatctccgcttctctctcgcctccgcttcgcttcgcgagagacgggccgacgacggaaccctaggattcgcgcccgcctgagcggccaagccaccaggaccgcgccctccggacccgggggcgccagacaagctccggggcgcgcggatcgaccactggccggcttaccgccgccgctgccatgtcgtcgctcagccgcgagctcgtcttcctcatcctgcagttcctcgacgaggagaagttcaaggagaccgtgcacaagcttgagcaagagtcagggttcttcttcaatatgaagtacttcgaggagaaggtccatgctggggagtgggatgaggtggagagatacttgtcaggattcaccaaggtagatgacaataggtattcgatgaagatcttctttgagatcaggaagcagaagtatttggaagcgcttgataggcatgatagagcaaaggctgtagatattcttgtcaaggatcttaaagtcttctcgacattcaatgaggagttgtataaggagataacacaacttctcactcttgagaattttagggaaaatgaacagttgtctaagtatggggatactaaatcagctcgaagtattatgctggttgagctaaaaaaacttattgaagcaaacccccttttccgggaaaaacttgtcttccctactcttaaggcatcacgcctccgaactctaatcaatcaaagcttgaattggcagcatcagctttgtaagaaccctcgtccaaatccagatatcaaaactttattcaccgaccatacatgttctccacccaatggagctcgtgcatcgccggtatctgtaccactggcagctgttccaaaggctggtgctgcatatccaccactcacagctcatactccgttccaacctccacctggtccatctttagctggttggatggcaaatgcagccgcctcttcatctgttcagtctgctgttgtagcagcagcatcaatacctgttccacccaatcaagctgtctccatgttgaaacgcccagctctaacagactatcaaagtgcagagtctgagcaactaatgaagcgcttgaggcctggtggacatggcattgatgaggccacatatcctgctcccacccctcaacctgcatggtcagtggatgatcttccaaggacagttgcttgttcattgtcacatggatctaatgtaactagcatggattttcatccaactcggcatacactgcttctagtgggatctgctaatggtgaatttacactttatgagatcggtctgcgtgaaacattactttcaaagcccttcaaaattcgggatataaatgcatgttcaccacaatttcagaatgctgttgtcaaagattcctccatatccattaatcaagttacctggagccctgatggagaaatgattggcgttgcattcacgaaacatttgatccatctgcatggataccaaccaccaaatgagacacgacaccttctagagattgaggctcattctggaggtgtaaatgatatagcattctcccgaccaaataagcaactttgtgtggtcacttgtggagatgataaactaataaaggtatgggatatgcatggacataaattattcacatttgaagggcatgaggcacctgtgtattctatatgtccgcatcacaaagagagtattcagttcatcttctcaacttcccttgatggaaaaattaaggcctggctttatgacaatatgggatctagggtggactacgatgctcctggcaagtggtgtactactatgctatatagtgctgatggaactaggttgttctcatgtggaactagcaaagagggagactcctatttggttgagtggaatgaaagtgaaggatctatcaagaggacatattctggattccgtaaaaggtcagctggtgttgctggtgtagtgcagtttgatacagctcagaatcacattctggctgctggtgaagataaccatattaaattttgggatgttgacaataataacatgctgatctgcaccgatgctgaaggaggcctcccagctcttcctcgcttgaggtttaataaagaaggcaatcttcttgctgttactacagcagacaatggttttaagatacttgcaaatgctgatggacttagaactctacgcgcattagggagccggcctccttttgaagcatttaggccgcaatacgaagcttcttctatgaaggtctcaggtgctcctgttgttgctagcatctctcctaacataggccgaatggatcacttggataggaattctcctgcaaagccatctcctatactgaatggtggggatacagcatcaaggagcatagatataaagccaagaatctcagaagaaaagcctgataaagcaaaaccttgggaactaatggaagttctaaatccccagcaatgccatgtagcaacaatgccagaaactccagaccaagccagaaaggttgtccgacttctgtacacaaattctggtgttgggttgctagcactagggtctaacgccattcaaaggctatggaaatggagtcgaaacgaacaaaatccgagtggaaaagccacagctagtgttgtgccacaccattggcagccaaatagtggtcttgtcatgacaaatgatacagcagataccaatccagaggaggcagttccatgcattgcactctcaaagaatgattcctatgtgatgtctgcttgtggtgggaaggtttctttgtttaacatgatgacattcaaggtgatgacaacattcatgccacctccaccagcatcaacatttttagcatttcaccctcaagacaataacatcatagcaataggaatggaagattcaaccatccacatatacaatgtcagggtagatgaggtaaaaactagactcaaaggacatcaaaggaggataactgggttggcattctccaccaaccttggcatacttgtttcttcaggcgctgatgcacagctctgtgtgtggaccaatgacacctgggaaaaaaagagaacagtctcgatacaaatgccagctggaaaaactccttcaggagatacacgggtccagtttagttctgatcaaagtcacttgctagtagtacatgagactcaactagccatatatgacgcatcaaaaatggagaggatctatcagtggataccccaggacacattgtcagcttccatatcgcatgcatcatactcatgtaacagccagctagtttttgctgccttcactgatggtaacttaggtgtttttgatgcggagaacttgagattaagatgtcgaattgcaccatcggtgataaacagcaatccacctgttcaccctcttgtcgtcgccgcacatccccacgagccaaaccaatttgcggtcgggctgtcagatgggtccgtcaaagtgctggagccattggagtccgaagggaaatggggagcgcccgctccggcagacaatggcatcattcccaatggcaagacgccagcttcgtcggctactagcaaccctgctgcggatcaaatccaaagatagattgtattccctaagcttttctttttctgcaaactttctaattacactgacttatttgtatgtggatgccgttaggatattatcgtcatttgttgtaaaaaggacagaataggttttatgttcaggtgtggttaactttcaggtactaccctagttatcctgttcatggaagattatgtttgcgatacggggtaatagtgtctataaagtatgtcgcctaaggttttctcaggtttagctcgatagctcaaatgatgtaagctatatatttcttcatgaatgtaaagcaatacatagtttttgctcaagatctatttttacctggttttacatagtttttgctcaagatctattttacctggttttttaatatagcgtgtgttcatcgaaaaagaggaa

SEQ ID NO: 17250 - DNA, 98 bp, Zea Mays
tcaaatatttgtcgtccgtttgattggagggagtactatactacggctatacaagagacgtagacgtcccgacgaccatgtaccagtacaccagacca

SEQ ID NO: 17251 - DNA, 1760 bp, Zea Mays
cacgcctcccttgcccgccattaactgcctcacgctcttctcttgctcgctcggctcactccctccacaaagcggcagcctcacgcgctccaccacgccaccaccctccttcctctctatatactcactcctcccgttttccgtccattttcatccatccgcccacagcttcgcagcccgcgcccctaaaaccctagccccggcggatcgcggggcgcctctggtgccagcgacgcggctcgtttgatccgattggttggtcgggccccgccctcgctgccgcgcttcgctccggcggtgtggcggggagagcaccgagcacgcgggaatggggaactgctggggcgcgcggatcaaggacgggagcgctggcgcctcaggaatgttctcaaagagtggtggtaaggatgggagtaggcttagcggctgtagtagtcgagcctcttcagcttccatgcctccaagtgtgaagactgaatgtgaaatcctgcaatccgccaatgttaagatcttcaccttcaataatctcaaggcagccacaaggaatttccgtcctgatagtgttctaggtgaaggagggttcggctctgtctataaaggatgggtcgatgagaacacattatcaccttgcaggcctggcactggaattgctgttgctgtgaaaagactaaatcatgagggtttgcaagggcaccgagagtggtgggcggaagttaattacctaggtcagttctgtcatcccaaccttgtcaagctgattggatactgcttagaggatgagcaccgactgctagtgtacgagttcatgccccgcgggagcttggaaaatcatctgtttaggagaggctcatatttccaacctctgtcatggaaccttagaatgaaggttgcactaggagcagcaaaaggactggcttaccttcatagtggagaggcaaaagttatttaccgagatttcaagacttccaacatcctgcttgatacagattattctgcaaagctttctgattttggattggctaaggatggtcctgttggtgagaagagccatgtgtccacaagagtcatgggaacatatggttatgcagctcctgagtatctctcaacaggccacctaaccgcaaagagcgacatctatagctttggagtcgtacttctggaggtgctgtcaggccggcgggccattgacaagaaccgcccccagggtgagcacaaccttgtggagtgggctcgaccttacctcacacacaagcgcaagatattccggatcctggataccaggctggaaggccaatacaatctcgacggcgcacaagccattgccgccctttctcttgagtgcctgtcctacgaagctaagatgaggccgactatggatgccgtggtaactatcctagaggagctccaagactctggtgaggccgagaagcgtcaaggacccaaggctggaaccaaacaggcgcctgctgctgctgccgcgagcgctagcaagagcagtcgcaagcttcgccggagaaccctgggagggacgaaggagacgactgttggtccaaatccaaaaccattattggcccgttctcgttagcgaggaaagggaaagcgttgcttggtcaggtggtttgggtaggtagactgtagcttgtgaatatgatctgtcctgtgtataacgagggtaaacggattcttttttttggcaacgagtcttgtcgttttttaacatgaggtccaacctcttgaaaattttcctgtggaattgaagg

SEQ ID NO: 17252 - DNA, 589 bp, Zea Mays
gatccctcgaggagattatcgacgagagccacgccatcgtctcctcctctgtcggacccgagtactatgtcagcatcctctcctttgtcgacaaggaccagctcgagccgggatgctccatcctcatgcacaataaggttctttctgtagttggtatattgcaagatgaagttgatcctatggtatctgtgatgtacaagaagaaggaaggtgttccggatggtctctacatgtagccaatctattcatcatgccgaacaagttacccgattgtgtgtgtactagcacatctcttcatcatgggagatatgttaccacaatacttgttgcatactgtgctaagtggtcaggagaaccttgtattaattaattatcctttcattgtctcaaagtaaaaatttcccttgcgctaaaaatatgcatccgttcagcatccgtgtgacgtgttggcagcttgatcgcatggtgactattgcgtacacgaaattgcaacttatttgaatgaaaaaattggatattagaggaaattcgcatctctatatatatgtagtttgttgtgaagcaaaaaaaaaaaaggaaaatgttgaga

SEQ ID NO: 17253 - DNA, 4078 bp, Zea Mays
cccccccccttccacgagacaaaatccagaaccaggccggcggcccactcccaccgccgcgcctacgccttcccccgccccccgcgcggaggagggtgccgccggcgatggagacgacggccgcgggcgcgccaagagcgcagacgctgcgggacctcgcggaggagggcaagaagcggggcgtcctgctcctcgtcttcgccttcgggctggccttcctcatgtcccttacgagctcgtcagtttggtttaatctgccatttgccatagctctgattgttttgttccgctacatatcgcttgattatggccttcgtagaaagagcgtaactagaacagatcatgccagtcattcactcgtcaaaacaaaaggtactgaggtaaagaaagtcattcatcagactgaaacggatggaaaaatagattggaggagcaaggttaactcgcctccagttgaagcagcattcgaacagttcacaaggcaccttatctcagaatgggtaacagatctgtggtactcgcgcgtaacacctgacaaggaaggtccagaggaactcatcgatgtagtcaatactgtccttggggagatttcagttcgggcaagaaatgttaaccttatcaatctgctgatcagggatttggtcgatcttatatgcaataatttggaactttatcatttctgtcaagccaagattggaagagagaagtttgtgggccttccttcagagcgtcgtgatgctgaactgaaaatgatccttttagctgaaaacaagttgcatcctgctttattttcagctggcgctgaatacaaggtattgaaaagtcttgctgacgggttgatctcaatcacagtgaagcctcaggatctacaatgtactttcttccggtgtacagcgcgggaacttctcgcttgtgcagttttgagacctgttgtgaacttagcaaatccaaggtttataaatgaaagaatcgaatcctttgctctttcgcatgccaataagttggagaaaggaactgcagaatccttggatgttgtcacaactgttaagcacagggaaccacatatgccctctgttgatgaattttcggcactaatagaccactcaagttcaggtgttgagctcgttcaatttcgtcagggtcaatcgaaaactgcatcagatatacaacctggaaaaagtacaaatccatatagtctaaaattagaatcctctcatgcacctttagtcagtagttcacacccactggagtcaacaagtttagcttcgtcttcccacgttacttctgataatgggttttcgttgcataccaaaagcagcaacagagcaactgcaaatggtcatggtagagagtgtgcacagcccttgggtatcagttctgagcgtgcacatcaagctttagcacttgagcaccttgagaatatgtggacaaagggaaagaactacaaaccagaaaatgtagaacatgtcgcaaaagtgtctgttggatctgcttctctgggctcgacttcagttcagcaatcagttccttgcagcacttcagtttgttacaatcaaagtaattctgaaagaccaacagcgtcatctcagtcaaaggaccagcatttggtaagacactcaactacacctacatatgtaacatatccaaatggcaccccgaaaagcctatctgcagaaatggcagaacatgccggtccagaagactttgcagtagagagtgagagttcatatgccactgaggacgatgaattcaacaatgtgactggacttgattctcctgttaccagagtttgggaaagcaaaagtaaaggaaatgctaccttatcacatatacatcacccactcgaatctcctggtttccatagagcaaagaagaacagaagtcatgtgggaaaactgaagatgtcaagaacttcttcaggaagaaaaaggtcaaggtcaaatgctcagaagcctcctatctggcaagaagtggagagatcctctttctctgttggtgatagtatggacatactaaatacatctgcaaatgatctaaagacgcatgagctagacgaggatcctgaggtggaaagtatggctaggatgtttagtagttcaaatacttcatctttattgttgccatcaagtgactctgcatattcttcaaattattgtggtgccaatgtgctacaagactcttatttgaagttaagatgcgaggtggtaggagctagcattgtcaaaagcgggtctggcatgttttgctgtgtattctatttccgtgaccgacgccaatggtaatagttggtccattaagaggaggtttcgtcattttgaagacctgcatcggcgtctaaaagagtatgctcagtacaatcttcatttacctccaaaacatttcctctcatcaggtttagaggtttctgttgttcgagagagatgcaagctgctcgacatatatctgaagaaccttctgcaaattcctattgtttcaagctgcatagaagtctgggattttctgagtgtggattcacagacatatattttcacggacactctctcagtcatccaaacattgtcagtcagtttagatgaaagatcaaatgggaaaaatataaaagcattgaactcttctggagctttgaatggaaattctatctctggaggtcaatctttgcatggacatatagacgacaccgtacataaggattcagacatcgcttgtgatggtttgagatttaggaaagggaatgtgaacaagaacttgggaaacggtgttagccacacaacagatagtgttagcaacacaactgccaatcattatcaggacaattctggaagtgatccagagcagaatgatcattccttttcaatagattcattaaatcctaagaagttgcgttcaactgaaaccaatgacacatctcaaattccagagtctggaggattttcagtatctcctaatgattggatggccccgaatcttagtgttcccttgtttcatcttgttgatgtggtctttcagctccaagatggaggctggataaggcgtcaagcattttgggtagcaaagcaaatactgcaattgggaatgggagacacgtttgatgactggcttgttgacaaaatccaattacttaggaaagggaggataattgcttttgctgttaagcgcattgaacaaattctctggcctgatggaattttcatgacaaaacatccaaagagaaattcgcctccacctcctcctggtgctcagagcaatggcatgggaaactatctaagcgatgaacaacggatagaagctgctcatcgtgcaaattttgtccgtgaactgataatagataaagccccatctccactagtgagtcttgttggtcgaaaggattatgaaagatgtgctcatgatatctatttctttcttcagtccccggtttgtttgaagcagctagcgttcgaactccttgagctgcttgttctttcttcatttccggagttggatggcactgtgaggaagtggcacgaagataaagagcaattctgcgcccagtaatgtttatcaaacgtttgaatttgtcacgggcggtgtttgtttccaacacatatcgtctttccagagtggtgtggcctgtgaattctgcgaaaataaggtggtggcttcagaggagtgcccgtggatatctcagtttgaagtgggtggtggctttgtgcagtgtgaatatggttagatagtgcgaggatatggtccctttttccaccgggccatggcagaacggtttttgtgcccgatagagttcatttttccccctccagatttggtatacgtaatgctgctgcctgaaaggaaagagatggtggcgcattttttttgcacccgttttggtggtacactggtacccgtcttgtgtaaatctgcatagagataaatgaagtttcgaggtggtcaatgaatgataatagctctctggcatcgtgatgattcgttgtggctccgccttgctgtacgtttttttggtgctgcccctgcgaatcatctcggcactattttgtgatgataaaaaaaaagtaatatgcgctggagattcgtttattcaaat

SEQ ID NO: 17254 - DNA, 177 bp, Zea Mays
gtagagcgtgtgtatattttattgttttgtgatgtatgagctacctccgaataggctggaaaagcgtaattattataattagtcctatatcgctagctagtatttgcttaatgctttgttataagtgtttcatcctcttcggtgtagattatctatcttatgctatttatactcgtg

SEQ ID NO: 17255 - DNA, 1816 bp, Zea Mays
cgagagaccatcagatcacggctccagatccgccgtacgcataagccccagctgccctacctgcgcactcgcctccgcctccatctccttcgccaccagacctcaagcgcgccacacgccgccgcacgggagccgcgcgccgcacccgccgccgcttctcctcaaaaccagaggtctccccacgtcccccgatccagcgtctccatggccgcgccgcagcctgtcgcccccgcctccgaggcgccgccgtctgcgcaaatggtgggcaacgcgttcgtgcagcagtactacctcgtgctgcaccagtcgccggatctggtgtaccgcttctaccaggaggccagccgcctcgctcgccccgcatccgccgccggagccgccggcatggactcggtcaccaccatggaggtgccgtgccacagcaggaacatcatgttgtggaccgatcactgcctcaacctgaagaggacgaggctgaggtttacaatccgccgcaagaggaagtagtggatgaggaacagcctgttgctgaagtgataaatgaagttccaaacaatgtggcacctgtggtggcaactacagttgcctcagtgttgcaggaggaggcaccaaagaagtcatacgcctcaattgtcaaaatcatgaaagaagttccattgcctgctcctgcgcctcctactaggccttcaccacccaaactagagaagcagtctcctcctcctgctactcctgtcacagatgtaccgcctttcagttctaaccccgagaacatcaatatccaagagcctgaagttgatgcacatgcaatatatgtgaggaatttacctttaaatgccactgaaactcaactggaggatgagttcaagaagtttggtaccattaagcaaaatggcattcaagtcagaagcaataagattcaagggttctgttatggattcgttgaattcgaggattctacttctgtccagagtgctatagaggcttcccctgtagcaattggcggtcgtcaatgttacgttgaggaaaagagagcacctggttcacgaggctccagcagaggcggcaggttcgcaccaggcaggggcaacagtttcagaagtgaaggtaccagagggcgtggtaactacggtggaggaaggggctacgggaggggtgaatttagttacaggtctgattacggggtcagaagtggtggcagaggtggctcattacgtggagctgatgttggctaccagagggttgaccatgctggatatgctggtggtcgtggtagccgcacagcagctgctggcgcaccttcaaaatgaggggcaccatagctgttgcgcgtcttttgggagtgttgttcggtggctctaagattattttgaagttggcatagaggctcatcaattggttcagtgcgggattacaagagaagcctggatacaaattatgagggttcctgtccttgatcattatttttgcaggcagcaaaaatggttactaattgagtaattgtagattagacacctattcagatgtagttctagtttcggtcgtcgactgatgtgccttgttgtcttttttgcaacgcatcatctaggtttttgttactgctggtattcatttattctgttgaattgaggttaatagcttttttagacttggaataagtgacagtttagggaagttaatagtggctagggtaaggatttaaatgtttctttgcaatgtgtcgacgccaaaagattctcttagtatttattatactgacaatattggtctttttttgaattcagtatatagttacatatatttacaaagggaatacggc

SEQ ID NO: 17256 - DNA, 317 bp, Zea Mays
tactcatatcccccaggtcaagaacaggtaccgtcaagatgaggagcatgaaggttgttgcgatgagtttgtgagaggtctaggtcatcgtctcccagtcaactatgcttgctggatcgttgtctccttatgatgtaattatttaattattttgtatagaactccgttatatattaaagatgtgacattcgtttctgtaccatgagtcatcatatgtgtgagacttggtcccagcacacttggtgaagatcgcgcccagtttggtgcccctaaaacacgggtgtgacatatcttgagaaggttggattggtttggct

SEQ ID NO: 17257 - DNA, 4876 bp, Zea Mays
ttgctacctccaagcgagaagataattacaggtcgcgtctcgtagcgtccacccacgccgacgccggactgtgcgcattcttcgggaacgggacagaggagagaggcgagcgagcaacgagacgctgcgctgaccgcccgccccgcccgcgcccattcctcctcccactccatcctcctcctccgcagcccgcgcttcgccgctcgcgcctccttcccatcctcttcttttcaccgccacccctcttcgctctttcggagccaccgtgagtgcgccgcggcttcatcttgctgatcgtgtccgtggcttcttgatactccgtgactgtctccgtccgaagcgagtgagcaagccgaccaacagcggctgagattcgctgcaacgtcggtatcaaaaggtgtccgagcggttgagattcgcgtgccatgtccggattcagtgccgcggccaacgcagcggcggctgagcggtgcgcgctcgcgttccgcgcacggcccgcggcctcctcgccagcgaagcggcagcagcagccgcagccagcgtccctccgacgcagcgggggccagcgccgccccacgacgctctccgcctctagccgcggccccgtcgtgccgcgcgccgtcgccacgtccgcggaccgcgcgtcccccgaccttatcggaaagttcacgctggattccaactccgagctccaggtcgcagtgaacccagcgccgcagggtttggtgtcagagattagcctggaggtgaccaacacaagcggttccctgattttgcattggggagcccttcgcccggacaagagagattggatcctcccgtccagaaaacctgatggaacgacagtgtacaagaacagggctctcaggacaccttttgtaaagtcaggtgataactccactctaaggattgagatagatgatcctggggtgcacgccattgagttcctcatctttgacgagacacagaacaaatggtttaaaaacaatggccagaattttcaggttcagttccagtcgagccgccatcagggtactggtgcatctggtgcctcctcttctgctacttctaccttggtgccagaggatcttgtgcagatccaagcttaccttcggtgggaaagaaggggaaagcagtcatacacaccagagcaagaaaaggaggagtatgaagctgcacgagctgagttaatagaggaagtaaacagaggtgtttctttagagaagcttcgagctaaattgacaaaagcacctgaagcacctgagtcggatgaaagtaaatcttctgcatctcgaatgcccatcggtaaacttccagaggatcttgtacaggtgcaggcttatataaggtgggagcaagcgggcaagccaaactatcctcctgagaagcaactggtagaatttgaggaagcaaggaaggaactgcaggctgaggtggacaagggaatctctattgatcagttgaggcagaaaattttgaaaggaaacattgagagtaaagtttccaagcagctgaagaacaagaagtacttctctgtagaaaggattcagcgcaaaaagagagatatcacacaacttctcagtaaacataagcatacacttgtggaagataaagtagaggttgtaccaaaacaaccaactgttcttgatctcttcaccaagtctttacatgagaaggatggctgtgaagttctaagcagaaagctcttcaagttcggcgataaagagatactggcaatttctaccaaggttcaaaataaaacagaagttcacttggcaacaaaccataccgacccacttattcttcactggtctttggcaaaaaatgctggagaatggaaggcaccttctccaaatatattgccatctggttccacattgctggacaaggcgtgtgaaactgaatttactaaatctgaattggatggtttgcattaccaggttgttgagatagagcttgatgatggaggatacaaaggaatgccatttgttcttcggtctggtgaaacatggataaaaaataatggttctgattttttcctagatttcagcacccatgatgtcagaaatattaagttaaagggcaatggtgatgctggtaaaggtactgctaaggcattgctggagagaatagcagatctggaggaagatgcccagcgatctcttatgcacagattcaatattgcagcagatctagctgaccaagccagagatgctggacttttgggtattgttgggctttttgtttggattagattcatggctaccaggcaactaacatggaataagaactataatgtgaagccacgtgagataagcaaagcacaggataggtttacagatgatcttgagaatatgtacaaagcttatccacagtacagagagatattaagaatgataatggctgctgttggtcgcggaggtgaaggtgatgttggtcaacgcattcgtgatgagatattagtaatacagagaaataatgactgcaaaggtggaatgatggaagaatggcaccagaaattgcacaacaatacaagcccagatgatgtagtgatatgccaggccttaattgattatatcaagagtgactttgatataagcgtttactgggacaccttgaacaaaaatggcataaccaaagagcgtctcttgagctatgatcgtgctattcattcagaaccaaatttcagaagtgaacagaaggcgggtttactccgtgacctgggaaattacatgagaagcctaaaggctgtgcattctggtgctgatcttgaatctgctatagcaagttgtatgggatacaaatcagagggtgaaggtttcatggttggtgttcagatcaatccagtgaagggtttaccatctggatttccggagttgcttgaatttgtgcttgaacatgttgaggataaatcagcggaaccacttcttgaggggctattggaagctcgagttgaactgcgccctttgcttcttgattcgcgtgaacgcatgaaagatcttatatttttggacattgctcttgattctaccttcaggacagcaattgaaaggtcatatgaggagctgaatgatgcagccccagagaaaataatgtacttcatcagtcttgtccttgaaaatcttgcgctttcaattgacgacaatgaagacatcctgtattgtttaaagggatggaaccaagccttggaaatggctaagcaaaaagacgaccaatgggcgctctatgctaaagcatttcttgacagaaacagacttgcccttgcgagcaagggagaacaataccataatatgatgcagccctctgctgagtatcttggctcgttactcagcatagaccaatgggcagtcaatatcttcacagaagaaattatacgcggtggatcagctgctactctgtctgctcttctgaaccgatttgatcctgttttaaggaatgttgctcacctcggaagttggcaggttataagcccggttgaagtatcaggttatgtggttgtggttgatgagttacttgctgtccagaacaaatcttatgataaaccaaccatccttgtggcaaagagtgtcaagggagaggaagaaataccagatggagtagttggtgtaattacacctgatatgccagatgttctgtctcatgtgtcagtccgagcaaggaatagcaaggtactgtttgcgacctgttttgaccacaccactctatctgaacttgaaggatatgatcagaaactgttttccttcaagcctacttctgcagatataacctatagggagatcacagagagtgaacttcagcaatcaagttctccaaatgcagaagttggccatgcagtaccatctatttcattggccaagaagaaatttcttggaaaatatgcaatatcagccgaagaattctctgaggaaatggttggggccaagtctcggaatatagcatacctcaaaggaaaagtaccttcatgggtcggtgtcccaacgtcagttgcgataccatttggcacttttgagaaggttttgtcagatgggcttaataaggaagtagcacagagcatagagaagcttaagatcagacttgcccaagaagattttagtgctctaggtgaaataagaaaagtcgtccttaatcttactgctcctatgcaattggttaatgagctgaaggagaggatgctaggctctggaatgccctggcctggtgatgaaggagacaagcgttgggagcaagcatggatggctattaaaaaggtttgggcatcaaaatggaacgaaagagcatattttagcacacgcaaggtgaaacttgatcatgagtacctttcgatggctgttctcgtgcaagaagttgtgaatgcagattatgcttttgtcattcataccacaaacccatcgtctggagattcttctgagatatatgctgaagtggtgaaagggcttggcgagaccctcgtgggagcctatcctggtcgtgctatgagctttgtttgcaaaaaagatgaccttgactctcccaagttacttggttacccaagcaagccaattggtctcttcataaggcaatcaatcatcttccgttccgactccaacggtgaggacctggaaggttatgctggagcaggattatatgatagtgtaccgatggatgaggaggatgaggttgtacttgattatacaactgaccctcttatagtagaccgtggattccgaagctcaatcctctcaagcatagcacgggctggccatgccatcgaggagctatatggttctcctcaggacgtcgagggagtagtgaaggatggaaaaatctatgtagtccagacaagaccacagatgtaaaatagagaaagttcttgcaaatatctactctatgaaaagga

SEQ ID NO: 17258 - DNA, 2477 bp, Zea Mays
tgcagctgtgatgaaggccatgatgttgaagaaactaagcaagcaattaaatggagaagactggagttggaataaccttaatactctctgttgggctattggatcaatatcagggtctatggtagaggagcaggagaatagatttctggttatggttattcgtgatttgctaaacctatgtgaaatcacaaagggaaaggacaataaagctgtgattgcaagtaacatcatgtatgttgttggtcagtatccaagatttctcagggcccattggaagtttttgaaaactgtggtcaacaaattgtttgagttcatgcatgagatgcatcctggagttcaggatatggcatgtgataccttcctgaaaattgttcaaaaatgcaagcgcaagtttgtgacacaacaggtgggcgagaatgaaccatttgtttctgagcttctgtccaaccttgctacaacaatcgcggatcttgagccacatcagatccatacattttacgaatcagttggccatatgattcaagctgaatctgacaacactaagagagatgaatatctcaagagattgatgagccttcctaatcagaagtgggcagaaataattggacaggcaagccaaagcattgatatcttgaagaaccaagatgttatcagatcagttctcaacatcctacagacaaacacaagtgttgcgagctcccttggaccacacttcttcccacagatttctctaattttcttggacatgctaacagtctacagaatgtacagtgagcttgtatcaagcacgatcgctgaaggaggaccatttgcctcaaggacatcatttgtaaaactattgagatctgtcaagagggaaaccctaaagttgatcgagacttttgtggacaaggcagaagatttaccgcacttaggaaagcagtttgttccaccaatgatggatcctgtccttggtgattatgctagaaatgtacccgatgcaagggagtctgaagttctgtctttgtttgcaacaatcattaacaagtacaaaggggaaatgcttgaggatgtgcctcgtatatttgaggctgttttccagtgcactcttgagatgattactaagaactttgaagattatcctgagcaccgcctcaaatttttttctttgctccgtgcaattggcacccattgcttccaagcattaatccagctttcaagccagcaattgaagcttgtgatcgattcgattaattgggcgttcagacataccgagagaaatatcgcagagactggccttagtctattgttggaaattttgaagaactttgaggcttcaggattccaaaatcaattctacaaaacctactttttgacaattgagcaagagatttttgcagttctcacagacacattccacaaacctggtttcaagcttcatgttttggtgctccaacacttattttatgtggttgatagtctaactgagcctctatgggattcttcatcagtaccatatcaatatacggataatgccacgtttgttcgagattacaccataaaactcttaggaacatcatttcctaacatgactgtagctgaggtgaccaagtttgtggatggccttcttagttcaaaacttgatcttccgagcttcaaaaaccatattagagatttcctggtgcagtcgaaggagttctcagctcaggataacaaggatctatacgcggaagaggctgctgcccaaagagaaagggagcgccaacgaatgcttgccattccggggctgattgcccctagcgaattgcaagacgagatggtagattcgtagtgttccttgttttgattctgctttctctaatgtagcttcctgtttgttggtctggcctcgggagccctcgtctttcaagtgcgagttttcttccagggtggtgaaagactgggaatggactagtcagttttgccgcaggggaggttcctggaaccgctgttgggtcttcagcagctgtgcttgcctggatgtgttaacagcggctcttaacattggtgcgtgtgctttgcccatggtatatcatcgtggtacagcattgtatgcttcttcagttgaagctcatagatggatccaggctgataggaaccttgatatatctgtactgtactattctcagatatctcatatatatatttttctttgcattggtgcatttctcaatgtgtagatttgctgtctcatcgacaagctgtgtatcgagaaactgttcggtatttctgccagctgtggaggcacattcgaaaacggaatagatttttttgttttttttgtgtgtctgtgtgtgtgtgtgttagggtttagggttcaataggtcgatccttactgtgttggtttgttagaaaccgcctgaataaacttagaatattcaacttagaataaacttagaataaacttgatggcttatgtaaataatctattaataaaatacatgggtttttatttaaaa

SEQ ID NO: 17259 - DNA, 2008 bp, Zea Mays
ctgtcgagcacatggcgtgcagggagcctagaccgcctagacgtgcatgagaggaaggcgcagaagagctactgggaggagcactctggggagctcaacctcgaggccattatgctcgactcccgtgccgccgaactcgacaaggaggagcgccccgaggttctgtctttacttccttcatatgaagggaaatctatactggagctgggagctggaataggtcgctttactggtgaactggctaaaacatctgggcatgtttttgcagtggatttcgttgaaagtgtgattaaaaagaatggaagtataaatgatcactatggcaacacgtcctttatgtgtgctgatgttacatccacggacctgatgattgaagcaaactccattgatctgatattttcaaactggttgctgatgtatctttcagatgaggagattgacaagttggtagaaagaatggtaaaatggttgaaggtcggtggttatatcttctttagggaatcttgcttccatcaaactggagatacagaaaggaaatttaacccaacacactatcgagaaccaaggttttataccaaggtatttaaagaatgccaaacctttaatcaggatggcacttccttcaaactttctttgattacattcaaatgcattggagcttatgtaaacatcaagaaagatcaaaaccagatatgttggctatggaaaaaagtaaactcatcagaagatgggggatttcaaagttttttggacaatgtgcagtacaaagccactggaatactacgctatgaacgtatctttggagatggctacgtgagtactggtggagctgagactacaaaagaatttgtggagaaactgaatcttaagcctgggcagaaggtgcttgatgttggatgtggaattgggggaggtgacttttatatggctgagaagtatggtacacatgttgttggtattgacctttccattaacatgattatgtttgcccttgagcgttccattggatgtaagtgcttagttgagtttgaagttgctgattgcaccacaaagacatacccagaccacatgtttgatgtcatctacagtcgtgacactatccttcatatacaagataaaccctccttgtttaaaagtttcttcaaatggctgaaacccgggggaaaggttctaatcagtgattactgcaagagtcctggaaaaccatcagaagagtttgcaacatacattaagcagaggggttatgatctccatgatgtggaggcttatggacagatgctcaagaatgctggtttcagtcatgtcattgctgaagaccgaactgaccagttcctcagtgttttacagaaggagctagacaaatttgagaagaacaaagatgatttcctgtctgagtttgcccaggaggattatgacgatatcgtgaatggatggaaggcaaaactgcagaggagctctgctggtgagcagaggtgggggctgttcgtcgccaccaagtgatgcgcgtgcgtgtggctttattacaaataacatttggagctctgctggtgagcagaggtgggggctgttcgtcgccaccaagtgatgcgcgtgcgtgtggctttattacaaataaatttgaagctctgctggtgagcagaggtgggctgttcgtcgccaccaagtgatgcgcgtgcgtgtggctttattacaaataaatttgcttctgcaattcaccgatgggattcgcttcataacgtgattttacataactgaactcagagagcctatcctattgctttgtgttttgggacaatgagactgatataacttttacggtcctgttaaatatagagtgtgctgtactgatgctcctcatggctgtggctacatggttgacacgtgacatgagatttgttattttcatatttttttagaaaaatattttgcatctcaacttttgaccaatgtgcatcagatgcattgaatctgtgcatcattttataatttttttaaaacttatgtgtac

SEQ ID NO: 17260 - DNA, 1381 bp, Zea Mays
gagaagatttgacgtggtggataggtggctcctttttaagcagattggcttgacatagactttgggattgccgaaggtgtagatttcatcgctgtttcatttgtcaagtctgcagaagtaattaggcacttgaaaagctacatagctgcaaggagccgtggaagtgacatggcagtcattgcgaaaatcgagagcatcgactctctaaagaacctggaggagatcatccgagcgtcagacggcgccatggtagccagaggggacatgggggcgcaggttcccctggagcaggtcccctcgatacagcaaaagatcgttcagctctgcaggcagctgaacaagccggtcatcgtcgcctcccagctcctcgagtcgatgatagagtaccccacgcccaccagggccgaggtcgcggacgtctccgaagccgtccgccagcgcgccgacgccctgatgctttccggcgagtcggcaatggggaggtacccggacaaggctctcagcgttctgaggagcgtcagcctgaggatcgagaagtggtggagggaggagaagcggcacgaggcgctggagctccggagcgtctcgtcctccttctccgacaagatatcggaggagatctgcaactcagcagctaaaatggctaatggcctgggagtggacgccgtctttgtgttcaccaagaccgggcacatggcctccctgctctcgcggtgccgccccgactgcccggtcttcgccttcacgacgtcgacgtccgtcaggaggcggctgaacctgcagtggggcctgatccccttccgcctcgccttctcggacgacatggagagcaacctgaaccgcaccttctccctgctcaaggccaggggcatgatccagtctggggacctcgtgatcgccctctcggacatgctgcagtccatccaggtgatgaacgtaccctgaggtagaagagccttacctttacctccatgccgcacggtcccgtatcggaaggaacacgcgtgttatcggcaccttggaaggacggtttcttccttccctgcgcctaaatcgctgccctttgttttcgctgtatcagatgctgctatgctatgctaggctctagtctggcccagggaactgtggcaataatctgtggctttcaggctggtgttagaactcttgtactacttgtaggcttaggtgatttttatcgtgcaagtagttggtttgatgtttttgtgtggtataaaagcgactcaagctatgggcctaggcctctttggtataccttttttttctgaagagtttttttagagaatctggattcgttgataacctagctctcacgagaatctcaatattacggggggcttacttacagagaaatatgaagggg

SEQ ID NO: 17261 - DNA, 458 bp, Zea Mays
cgcatatgcacacaaagggcaggaccgcaggagcacacacctcagtgcgccagcgttctgcacctcgctagctcgtcgtcttgcctgcgctgtcgtcgctgatccttgagatctgcagactccatggaggctgcagcagcgacgacggcggcggcgcttcttcctcccgctcggaaggtgttcatcctgcccctgcttctcctcctggctgcatcgtcgctggttccacgagcttcgtctgatggagcgcaatatgattatagagcttacactgagtgcaaacctcaccctgagccagctctgtacaacggtggcgtcctgcgctgggcgagcaaaataacggacttcagaacggaggacgaaggcaactactccccggcatttgtgctctacaacatgtcggcggcgactgcgtacagcttctcttcttcgttgcttcactgtttacatctatccag

SEQ ID NO: 17262 - DNA, 201 bp, Zea Mays
ccgagagcaagacccgctacaacagaaacagagagaggacatgactagcggaggtgccgccaggtcgtgtgggagcttcgggggtcattgatacgacgtgggaggccttgaccctatggcgatttcacgccgaagtcgccacaacctcgtggatccgtaacatggtgtcgagggctttcctactgagataatccgaggtga

SEQ ID NO: 17263 - DNA, 442 bp, Zea Mays
attcttgggattcttgatgacgcacggaacgacgatgaccttcgattgaagtcttcgaccgaacatctggcgagtgtgaccgacgagctaaggctgaggcgaagcttgacgacgagatcgaataggggatggtgagcatgagggtttcacagcgaggatgagcgacatcgtggattcttggtccgatatttaatcaaacacaactgaagcgtggcacagcaggaatggcagtattaaccatgagcacgataagggacgtgctgctgcacggcgcgaaggcgaacgacgacaatctacgagggcaggaacagaagacttggtcgaggcggggtccgagcgtccagagtttttgtcgaggccgaacttggtgagctacgcgtaggcacgtgtcgaccacggcaagggagcagagaaaattgcgcggacggccagaacagagacg

SEQ ID NO: 17264 - DNA, 2591 bp, Zea Mays
tgcgtgttcgactgctgcttctcgactgattccatgggtgaggatgagtaccgggattacttgagcggcattgttgcgcagttgcaggaattttttccggacgcatcatttatggtatccaatttttggtctggggacaaaagaagccgaatttcagacatattatctgagtatgacatgacagtaatggactacccacaacagtatgaagggtgtccattgcttcagcttgagatgatccaccatttcttgaaatcatgtgaaaattggctatcggtggaaggtcagcataatatgcttttgatgcattgtgagagagggggttggccagttcttgcattcatgttggctggactgcttttgtatcgcaaaacatacactggtgagcagaagacactagaaatggtctataagcaggctcgaagggactttatacaacagttttttcccttgaatcctcagccttcacatttgagatatttgcactatataacaagacaaggaggtggttcagaatggcctcctattagcagacccctcatcttggattcagtagttctccatgttgttccacggtttgacgtagatggtggttgtaggccatatttgcgtgtgcatgggcaagactcaagccccggtaacaagagtgcaaaagtcctttatgagatgccaaaaacaagcaagcatcttccacattatggacaggcagaagtccctataaaactaagtgtgttttgccgtgtttatggagatgtggtccttgaattcatccatattggcgataatatagagcataaggaaacaatgttccgcatcatgttcaacactgcattcgttcaatcaaacatccttgcgctgaatcgtgatgatattgatgttgcttggaatgtgaataatcagttcccaagggacttccgggctgaggtacatttttcggaccctgattcattcaaacctgctgctaccgtcgaggagatagctgatgatggagatgagactgatgttgcttcggtagacacaggagaggagttttatgaagcagaggaggattggcatgatgctagaaaagaccaagaaactcgatcaactgatggtggaatatcattagatgacgttgcagatggtggggtggcaactgaagaaaggagcagcctagaaaagcaccaattcaatgagggtgtgaagattggtgtctcccagaatttaggtagcatgaatgagaaaggggcaagtgcacctaccccaacttttgacaaccaggaaggtttgcagcagcctcgtgaagttcttgcaaatggtaaactaagcagcactaatggccaagagaacagtgatgtgcatgatatacaggtggttgctacatctgttgattcagagggacacaagtttggatctacctgtcaggaggacatgaaaggtgtaattgcacaaactttagtcaccacagttgatccaagttgcagtgatgaaattgaatgccaggctaatgaacaaacaaaaatatcggaataccctgatttggactacactgcttttggttctcctagaagtttgtcacgtacaaatggtgatacccacttgagaactacaaaaaatgaagggttgcagaacggtgatatcaagattatcactgagaacacaataagtatggacaacgatctagtgatctatgaagagaaaactatagttgtcaatggtaacactgtacaggaagtaaagaatattgtcaatgaaaagagcattgcagccaagatagacaaaccaattattgagagtaggaactcactgaacaacaacaatggcaagattcaaatcgctaaaccttctgatacatctaatggcaaattggatgggtgtagattagaatcttgccttgaggaagccctacctacaaagaaaaccactgtccatgacaggattgttgtcttaccagccactgatgtaggaactgagataaaaaccaagcaagaggggcttggtgacaagcaggattttggtatagttcttcctcaaagtcgaacagtagccagggctaggagtccaaggcttgaaagtgatgaccgagggcaaatccctgataaagctgtgtcatcagtattgaagaagatggcagtaggcaatgcaaagatggaagagcaaccaaagcttgccaaaccaaaaacaatacgtagatggatctcaccaaagaaggaatctgatgctacctctgtgcataggccatctcaccctccatctagatacgacagttcaccagctgcactggctattcgatccatgcctacagatgttaagatcagtgcagtaaatgatgcacctttattatcattgaaacaaccatatggctgcaactttacacgagaagtaacatctgcactgtctgcttcatcgcctccacaacaatccttgttaccaggtgcacaaattgcatcaagaaaccaggtttcactaccttctttgcctccacctccaactaactattcttcaagttctacgcctatgcacaggggtctagcttcaacatgtttgccaaacttacctcaaggtgcatctccacctaggtcgtcgggagcacaaaaacaggcatttgcccc

SEQ ID NO: 17265 - DNA, 1056 bp, Zea Mays
ccctaaaaaaacactcgtattccgtccctgctcgagctcccgatttctgaatttgttcctcgtttcgttgccagcccaatcggttcagtttcggcggtaacaagatcaactgcggtcgccagtcgattctgtgagcctgccagccatggagttgtccagttccgtctcgtccacggcggcggcggcggcgcaggcgcggctgctccggccgccgtcgtttcgccagccggggccggcgggattcgtgtcctgtaggagttacgctataaggagcaaactggtgagggcgatgcctccgatccttgctagcttccagcctgcatctcctcggtacccaagctttcaagacgcaaatggcaaaagacgaaatgttccttgttatcagagacaacaaaccccgcaggtagaagccaggtcgatggaggaggtatatgacactttggctgaacaccttctttcggtcttgaagaatattgaacatcttgattcaaaatacattgttggtctagctggcccacctggtgctggcaagtccacagttgcctctgaagttgttcgacgtgttaatacattttggtcccagaagcacacaaagggtagtggagcaccgcttcctaccaaggaaattgctgcaatgcttccaatggatggtttccacctttatcgtgcccagcttgatgcaatggaggatccaaaagaagcacatgcaagaagaggagcaccctggacattcaatccatcactgtttctgaaatgtctacatacactaagaacagagggttcagtttatgctccatcatttgatcatggtgttggcgacccagttgagaatgacatatttgtaaagccacagcacaaaatagtgatagttgaagggaactatctgttactggaagaagatgtttggaccgaaattagagacttgtttgatgagaaatggttcattgacattgacattgatatctccatgcaaagagtgctcaagagacatattgcaaccggaaaagagccagatgtagcagcatggaggttattatcttgaaattgttcttgtga

SEQ ID NO: 17266 - DNA, 925 bp, Zea Mays
cagaaatgcagaatgtcttggagagtatagttgaaaatcggggaatgagttaatgttcttgctgcttgacatatctagtttatcatgggtcctatctgtggtgtgccagacttcaagatgaggggaaagaagagtgatgagctcgaacctgtcgatgctggcgatgaagatgatgatggtggtgacgatggggacgaggatggtgactttggggaggagggtgaagaggacgtctcagaaggggagggatatgacaacccaaagggcaatgagaccaagaagcaaagaggtgatcctgaggaaaatggtgaggaagatgaggaagaaccagaagatcaggagggtggcggcgacgacgatgatgacgacgatgacgatgatgagaacggggatgacgaggacgacgacaatggggatgacgatgaggagggtgtagatgaagaagacgatgaccaggacgaggatgaggaggaagatgatgatgaagactcgctccagcccccaaagaagaggaagaagtgaagatcttctgccgctttagttaccgtgcgctgagttctgcctggcttttcgtcatatcctcgcatttcaactttcccatagagagttaagaaggatccacacgttcagcagcacgtgtgggcttgtaggagctttatgatttgaggcaattagggacaactcttatgtcattgttgcttgcttctgtggagtcgaacagatgtttcgctaacataattcgacttgagtgatgaaagcctccagattgaatatgccttctcttttatctcgtatggaatcattgatgcagccctggttgatagcgttccttcaataaatgaattatattggcatcatgacagcttcatgtgaattgcacgtttatactgtgcgttcaaatctcaactaatgtatgactgatcgg

SEQ ID NO: 17267 - DNA, 1553 bp, Zea Mays
aactcagcagtttttttttccggttttttaagttgaggtgaagaaacaaagttcatgtgtcgtccacctaatcaacaagtccaacgactatgttgctttcaaggttaaaacaacatctcctaaaagatactgtgttcgaccaaatactggggttatccttccaaggaaaacatgtgaattcacagttaccatgcaagcgctccgaactgctccgccagacatgcaactaaaggacaagtttttggtacagaccacaattgttccttatggtacatctgacgaggaactcgttcctgcctttttctccaaagaaactggcagatacattgaggaaagcaaattgagagttgttcttgttagtgcataccaatcccttgaagagcaaccgactaataaaattcatgacactgagccagttgttgaagttcctgtactgaaagaggtgccaaatatagagaacgaagtgccagatgctgcaaaagaagttcctgcccctctggtacaagctccagcgattgtgactggaataccttcacctgtcgaagagactcctggcctgagagaattccgtgtgccgctgaatgaagcaccagctgtattggcagaatctccttccgctcaaaaagacccttctgttattacagttgaacatgcctctactgttataattgaacattcccctgctatttccattgaatcccctcctttgaaacaaagtgtcacagtttttaaggaatctcctccttcgaaacaaagcattgcagctttcaaggaatatcctcctccttcgaaacaaagcattgcagtttttaaggaatctcctccactggaggaaactagtcctaaagaagctgttgtgctaagtgaccgaggactcttcagtgtgcagaaccatcaattatctcatgtaacagaagatgttcagaatctgaaatcaaagctcaacaatctcgaatcaaaattggaagaggctggaaagatgataataaggctaaaagaagagagcagaagtaccacccaggagcgggataagctacagcaagaaatggtattcctaagaaagaagggaaccccaaggagccaagtgggtttccccttgctgtttgttgtctacgtcgcgcttcttggtaccttactcggttacctgctccgtctatgaattcagaactctaagaaaacaaaaaagttcagcagctgggatgcctcatatgcggcaagagaactgaattgaacggcagttgcactctaaaatgttggagaggtgaatttatttgcattattagttcaggacttcgtatggttttttgcacataacagcagtaccaaactaccagcagttgcgtgcatatatagaacagtttttttttttttttggcgttgtatagaatagaaccgacccaaaagatgcctgctgtcttgtagactaattatggggattcttcctatgcctaagctttctcttttcttctgtctcttttacagtttgctggattcgcttgtcctgaatcggtattgaactgtcgtgtgactatttacacctagtttccttccag

SEQ ID NO: 17268 - DNA, 1707 bp, Zea Mays
gccggctccgctcggccctcctcttcctcgattcgcaagtcccaacccgcctctcccacaaaggccaaagccccacctgctccgtcgagtcccgtcggctcgccccgtctccctccctcctcctccctcaaatcatatcatcagagcgagagggacggcgagaggagagctgggaaggacagagagagagagagagtgaagagaaagagtagcgttgatacaccgtcgaatcgaatcgagaccctccctccgccccaccgcaccccccatatcgcatcggaatccagcatcgccatcgccacccctccatcgcaccaccgctttccactctccactcccttcccaccctcgccccgccccgccccgcgcttgcgtgattcgtacggtttatcaccgcctctttctcttccactctctctccgtggttgggtccggctcggtccggtccggtccgcccgccgccgccgcggcacccactacaactgttggtgcagagcgagatggcgggagggccaggaggaggcggcgacgccggcggcgagcacgcggcggcggcgtactggtacgacgcgtgcgaggacagcgcctccctgctctgcggcatcgacttcgccgcgtccgccgacttcgacccgggcctcataccggccatggactgcggcgccgatgacggcttcgtcgccgagatcgaccggatactcgagagcatcaacgccgaggccacccccgcaccgccgcctcctcctcctgcgcctgcgcctgcgccagcgccagcgcctgtggctccgctgcagccacagccgcagttgcaggaggcggctgcgaccgtggcccacaatgcggtggcggtgtcggacgtggcgcagagggccccggccgtggaagcgaggaaggagcccaggagggagttcccggtcgccgcggccaatggcggcgacgactgcagggacagcaagcgccagcgtctccctgcgggtggtaccgggggaccacgccacgactggcggcggcgtccgatggcgcccccgcctccatcccgtgggtgggaggaccgggggcgcggaaggcgggagtacgacaggcctcgtaagcgcgaccgcgacggccactacggccaatgccatgatcaccaccgacgcgaccctcggggtttctgggagcgcgaccgcggcggcaagatggtgttccgccatggcatgtgggaggctgaggcggaccgccagggaaagcgtgccaggacgaaggatggatgccctcctgcggagaataaggcggaggtggatcggtcggggaaggagaagcctgccactgaggagaaggcgaggcagtaccagctcgaggtgcttgagcaagcaaagagcaggaacacaattgctttccttgaaactggtgcggggaagactctcatagctgtgttgctcatcaaaagcatctgtgacaaaatgctcaaggagaacaagaagatccttgctgtcttcttggtgcctaaggtgccccttgtgtatcagcaagctgaagtgatacgcgagaggaccggctatcgtgttgggcactactgcggggagatggggcaggatttctgggattctagaaagtggcagcgcgagtttgagtcaaaacagattatgaatttctaaaaaaattctttctctagatgtaaactagtagccgaggcacctgcattaaatctggccgtgcaggacgtaa

SEQ ID NO: 17269 - DNA, 3805 bp, Zea Mays
ttttaatgcggcttcgggtacacgcgggcaggtcaatcctcgcactccacctcctgcctgcccccgcacccgtagccatgttggatccaccgccccaccacgggtagctgaaggggcggcggcggcggcgcggcagagggatgaagaacttcctcaggaagctgcacatcggtgactccgccgccggggatggcgcctcgtcgccttcggcacctaccccgccgccaacgaaaaagggcgggggcatcgagcataggcacgcctccgggttgtcgggctggctgagctccgtgaccagccggccgcacccacctacgccgctttctgcttctgctgcaccggcagcggcggcgccggaggtggaggagtcggcgttgacgactgcgttggcttcgtctgttgaggagaagagggtagccgaggaggacgaggagagggcgaggcgggagtcccggaaggaggcggagatggagaagaaagagaaacagcaggcggagctggagaactatcacatgcagctggccctcgagatgagcgtgagggaggacccggaggcgatgcagatcgaggtggccaaacagatcagcctcggctcctgccccatccagagctcgcccgcagaggtcatcgccttccgatactggagtttcaatgcccttagctatgacgacaaaatattggatggtttctatgacatttgtgccactggggatgagcttgcaatgtcaaccataccttctctgatggatctgcaagcactgccattttcacatggaggcaaaactgatgctgtattggtcgacagagcactggattctgagctcgtagctcttgagcagaaggctgttatcatggctgtagaatttcgctcgaaaaaatcagaatttgttgaccgctctttggttcagactctagctaatttagtttccaactacatgggtggaccagtcattgatccagaaagcatgctgttgaagtaccgaaatatgagcagtgcgttgaaagctgatataagaagtgcagttgtacctcttgggcagctaacagttggtttggctcgtcaccgtgcactgctttttaaggttttggcagatagccttgctgttccttgccgattagttaaaggaaggcagtacactggatcagatgatggagctttgaacattgtgaaatttaatgatggaagggagtgcattgttgatctcatgatagatcctggtactcttatttcatcagatggtgctgacctgggtagagaattggaagacagcttagtcgtagataatcaacatgttaacaaagatgacactagcactcagttactttcctctttcagtgaagcttcaagttccatgcacagttcatttgaaaatggatcgcttgaaaaaggatttatttgcaatgctgggcattttggtccatatgaagcaacaactgcccatagtgacaatgatgtgcttgggtctggggtatcaagttcatttgatgagctatcggtcagcacatatgcatgtgaaaacatacctattattcatgaatctaatacagatcataccatgactgaaaaaagcaaagataagtcgatcacatcaaataattcgtcatcatgttcgcctccatcttctgagataggcagtactcctgctgtacgaaggaaaaaggtcaaagacgtctcggagtatatgattagtgctgcaaaagagaaccctcagatagcagaaaggatccatgctgtgttacttgaaagtggtgttgtgccaccacctgacttgttttcagaagaatctaaggaacaaccaaaggacctgattgtttacgacacatctctgtttcaaacaacagatgaaatgataaggacaatgaatgagcttgaatccacagcacacgatggttgtgctggtcttggtccttcattgccacctgatcctggacatgagctccaaacaaagattgttccttatcggatgcctcctgacctcaagcctgtccagggattaggtgtttaccataagtttgatttccgggataacatcaatccctctatacctctctatgaaccaagtccagctcctcaggaaaatccattacaacttataaagcaaatgcctgttacagctgctgctgttgcaacagctgcagtggttgcatcttcaatggttgttgctgctgcgaaatctaacagcgatattaaactagatgtgccagttgcagcagctgccactgctgctgcagttgttgctactacagctgctgttaaccaacaatatgaatacttggatccgggttgtcaattgctttgcttgccaagttcatcaaataaattaatccaaaaaggtagacatgacttgttggatgatgatcagctggaaacaaatcatggacaggataatgcccttgagcgtgaaaaggatttggttcaagcaccccaggaagctgagcgaatctctgataggtcaactgggacagagagtgcaagatctgaaatttctcttgataaaatcgcagagtttgaaatccagtgggaagaacttacccttggagaacgagttgggctgggatctttcggagaagtgtatagaggtgaatggcatgaaacagaagtcgcagtcaagaaattcttgcaacaagatatttcaagtgatgctctggaagaatttagaactgaggtgggaataatgagaagactgcgtcatcctaatgttgttctttttatgggtgctgtcactcgtgttcctcatctttctatcgtgactgaatttctgccaaggggtagtttatttcggttaatccataggcccaataaccagttggatcaaaaaaggcgtttaaggatggcacttgatgtggcacgtggtatgaattatttacacaattgcaccccagtcatagttcaccgagacttgaaatctccaaatctacttgttgacaaaaattgggttgtgaaggtctgtgattttggtttatcacgtctgaaacatagtaccttcctttcgtcaagatccgcagctggaacagcggagtggatggcaccagaaatacttcgaaatgaaccatcagatgagaaatgtgacgtcttcagctatggggtcatattatgggagctctgtacattgctgcagccatgggaaggtatgaatcccatgcaggttgttggagctgttggttttcagcaacgacggcttgatattcctggtggtgtggatcctgctgtagcagagataataaggagatgctggcagactgatccaaggatgcggccatcattttcagagatcatggctactttgagaccattgttaaaaaacatgcctgccaaccaacctaccaggaagcgggcacaacaaacagatgattaagaatatattggtcagtatcagctgaagacacaggccaaagagagactgcattgtacgccaaatgcgtatttgatgaagaacagatccatgaagccaaagaaaagaaagggaaaagaaaatttgtgaaagttcgtgcatactatttttgcagacacaatggttactggagtcagaagttgacatgtcatgttgtaacaggatcatcgtcttctgttcagttaggccttatttttgctagtcctcgaactaatggaaaactattccatctttaaggccccatcaaattgtaatgttttactatgaaaaggttggctcacccttgtgtatatcacgtctcaacaaatctgcttttaattgacaggtagattacaaaagaaaattatgccctttgtactaagaatgatcattctttgcggtaggaaaaatgttaaacctacttttgcaaacat

SEQ ID NO: 17270 - DNA, 309 bp, Zea Mays
atctttattgaggagttgcttctgaatacattgaataagcaagttaggcatttcactggttcgggaaatacccctatgacttacaaccttaggcctgtcattgaagagatccaaaggtctgcagaggataatggtgatagacgaacttcaaagatgtgcttggggatgctaaagaccatgagaaatcgctctgaacagaacttcgttgcttatagaaagggtctcggtgttgtttgcaacaaaaaaggtggatttggtgtagatgactttgttgtagagttctttggggaggtcgagaaaacccctgaa

SEQ ID NO: 17271 - DNA, 1004 bp, Zea Mays
attcactaaaaacatcataaataaagggacgtgatgttcggcgggacggagacggtggcgtcggcgatcgagtgggccatggcggagatgatgcacagccccgacgacctgcgccgggtgcagcaggagctcgccgacgtcgtgggcctcgaccgcaacgtgagcgagtcggacctggacaggctccccttcctcaggtgcgtcatcaaggagacgctccggctgcacccgcccatcccgctgctcctccacgagaccgccgacgactgcgtcgtggccgggtactccgtgcccaggggctcccgcgtcatggtcaacgtctgggccatcggccgccaccgcgcctcgtggaaggacgccgacgcgttccgcccgtcgcggttcgcggcgcccgagggggaggccgcggggctcgacttcaagggcgggtgcttcgagttcctgccgttcgggtcgggccgccggtcctgccccgggatggcgctcggcctgtacgcgctggagctcgccgtcgcccagctcgcgcacgccttcaactggtcgctgcccgacggaatgaagccctcggagatggacatgggcgacatcttcggccttaccgcgccgcgcgccacgcggctctacgccgtgcctacgccccggctcaactgccccttgtactgacgccctgcacgtggcgcgcggggactgccattacgcatgcatgcgtttggactttggtgttcatccctggggtggggccgccgtgggggaagttaggagtttggtggctttctagctctgtcttcttgtattctgtttattataaattttcccaacccttccatgcctgatcgatgtgcggtaataattgttagaaaatgtgacattttgtatgtaatcaatctatggggtgcaattgttatctcgtcaaaggacacaccactcgacttgcaccccttcatgtatatatatacatacacgaacatcccctgcaataaagaaatcgctgtcactttctttcg

SEQ ID NO: 17272 - DNA, 2714 bp, Zea Mays
cccaagagacctaaagcccgctgctatacgtgcgggcgcgtgtgtcgcggcccgacggcctggatggacgcgccgtgtgtgccggccccgacggacacgccgtgtgtcgggcggtccggttccaacagccgcagcctcgtccaagctcatcgccgggaccgcgtgcgcgacgtcggcggtctggcacgacgcctgcttcctccggtactcggtccgcgacaccggccggttccgcgaggacgaacacacggagaccgtgttcaacgcgagccgcgcgctgtcgtcgttgccgccgcatgtcggcgccaacaaagcggcggtgaggcgcctactcgccgccgtcgtcgcggacagcacgaggagcggccacatgtgcagcgacatcggtgtaggcactggtgggacgactgcggcaggcggcggccggatctacgggctcacgcggtgcctcggcggtgcctcggccggatctacggatctacgggctcacgcggtgcctcgccgccgggatctcgtgcgccgactgccgccgctgcctcggcggcgctctcgcggtggtagagcgggagtacaacggcagcgcggggatgcaggtcctgcggctcagctgcatggccaggtacgagagctaccccttctacaacaccaagtccttggcccggcgatcgctggcgtcggcgatgatcgattacttccccttaaatgtatcatcatcctttcctgcgagtgtggggggtgtacaacccacaccagcgcctcctggcggtcgtaacccatcgccttcaccgcctgcacaagcacgagcatcacctgcaccagcagcaccgttgaacatctccgggcctgcaactgcgactccgagagctgcacaacccaccccagcgccccctggcggtcgtactcgtaccccacagcatgcagctgccgcaacgaatgatcaaacggcctccggatcatcagagaacaaaaggaaggaaacttcgaatagaaccaaatggctgatcgcttctattgcaactgggttggtggctgccttcaccagcctcgcactcaccatgtccatatggtaccggcggcgaaaacagcaactgtatcagagaggacatgtcatagatgccgtgcccgaggatactatgcgtgacctagagaagaatcatttggactccgaagaagaagaagacgaggacggaggaagaacgagctaccagctctacaactacctggttcttgaggctgctacatgtcgcttctcaagtagaaacaagctagggagcggtggatttggaacggtatacaagggcacgcttgagaatgggaaggaagtagcagtgaaaaggctcagggactccaagaggacgatacaagaactagagagggagatctccattgtggctagcttgcgccataagaacatcgtgaggtttttaggctactgcttccaagaggaagggaggttcttcatctacgagtacgtgcctaataacagccttgataagttttggtacaaagcatcttctcaatggcaccagaggctagagtgggctacatggttcaacgtcatcttaggggttgctcgcggccttaagtttctccatgacaaggggattattcaccgggacctcaagccacacaatgtacttctcgaccataacttcaacccaaagatcgccgattttgatctcttgaggatgtatgatcaacagaaaactcatgagagcaccgagaaggccgctggaacattcgggtatatggcaccagagtgcacatccggacgaaaattgctgctttcaatcaagtccgacgtgtacagctacggggtgttggtgctggagatcatcaccggccacaagatctacactttcgaaggccaaaactctgaaggcctcgtcgaatacgtgtggcagcactggacggagaagagagcgagcgacgtcgtggattgcgacttgggcatggaagggcaggagcacgggccatggcaggcgctgcggtgcgtgcacgtcgcgcttctctgtgtgcagtcggatcggtcgaggcggccaactatggggcaggtcatcgccatgcttagcagtggcgatgacgggacggaggagctaccggagccatcccggcctgcctgggtacgtcgtccatccaacgacggtgtcaagttttcagctgtgcttcgggtgcaggtagcaccgcttgatgacgtccctccatcaacaaaatggatgggattcttgcatggcttagatttgatcgattatgaactaaacatatttatatttatgatattaatttaaaattatcagattagctatgaaacatatttttataatagaatgatttagagttatactagtacaatactcacgcattgggacgacacataaattattcgataaaacacaatagttacctaaaaacgaacaacacatatattaccatcgatcttaatatctcacaatttttttttgccaacaaccaatacattgttattgttactctctaattttacatcaactatttagactccatctactaagctaggggcacattgcatttggcacaagcaagtctcaaatggcacatagatccatgtcaagaaaaatcttgtatttatgataactttacatctctatggtatgtttttatagtacttgatgtatacatgatcaaacaatgtttaaactaataatgaggtcaatataatatcttttgtatacaca

SEQ ID NO: 17273 - DNA, 179 bp, Zea Mays
tgaagatgcatttgaaggactttatcttgatgacccttaggacttttatcttcctagttcctactccattttgttgatttggaaatctggtgatgtaagttgtaatatgtaactgaacaaccttggcatgaactattaaatcagagctgggttgtactcttttttcctttctagggttt

SEQ ID NO: 17274 - DNA, 3406 bp, Zea Mays
gttccgtgtcgtgtcggaccccaccacaaccctcttctccgtttcgtttcccgaccaggcctcgccggctcaccgcccccgccgcgcccgccatggacttctcggaacaggacgtcgacgtcttcggcgaggactacgacgtccacgacggcggcgccgaggccgaggccgaggccgacggcggcggggactcgtcgggctcctcctccccatcatcgtcctcgtcgtcctctgccgccgcgtcctcctcatcctcaagtggcggctcaagcctcagcagcagcggcggcgctgccggtgagggcgaggatggcgccgatgcgggggacggggaggaatacgattcgtccaacctcatagccacaaggagcgccggcgccgccggctatctggacgatgagaggagggaatatgagaaccaggaggtagaggaggagagagatttgttcggctcagataacgaagagtacgtcagaactccggcgcgcagccactacctagtcccagtgcttcctccaattcggaacactaataatcattctcgaggaggctttggaggacgaggtggtagaggcccaccacttcttccaaggccaggaggccatccagggcgacataactttggttacgggagattcgggaatgggcgtcatgttgaaggtttagtttcagatatgaagcttaataagagcgaagaaacattgtctagaaaagctgttacttttcaggagccttgtgagattgcatgcttaagccgtgttgagggtggagaggtgtattttgatgatcgcagcttgaggctcttcaaacgtgaaatctgtgaataccgcggtgcagatctcaataaaggattcgagtcatatatagagaagagagatttgggttctgaaggatttggcgatctactcgcatgcatacgaaattccaacatacttcttcagaatactatacattttgtgacataccgcaacaatcttaataagatattggccactgcttacctaagagaaccatggaagatgggcgttcataaaagaaggggtgttgtatatcttgatgttcataagctccctgaaagaccaaaaagtgaagttgagcgtaagagatgttattggggctattcttttgaaaaccttgccactgagaactcattcagcgacgatggaaggggtatcgatgcaaatgtagagttttgttctgtaataaagacaaaattgggtgcccatcggattgtcatgggtgctgagatggactgctgtgatgcaactgatgatggcaggaggttctatgtggagctgaaaacaagcagagagctggaataccatacagtggaagcatatgaaaaagaaaagctacttagattttggattcaatcgtttcttgccggtgttccttatgttgttgtgggattcaggaatgatgctggcatacttgtacggacggaaagactaagaaccaaagatattacacaaaaggtgaaggcaaagaactactggcagggtggcgtttgccttgcctttgccgatgaagtcttatgttggttgtatgggactgtcaaagagaatgaagactatgttcttcaatttgtacatccatttaaccgcctcgaacttctgcgtgcccagtccccctgtccggaagccataacgttgcatgtgcagcagctctcaggtgcagcggactagattctagcagtgacctcggcggggactacttgccttggagaaaaacccaattctagcagcagcactgaacaatggttgatctggcaacttactcaaccccaattaccaagcagatgtgctaatgcatcaaagaactgatgagatcgatcactggtctagctacatccatggtttacactcttgaatggccaaagagattttgaatccatcaaacatgtatttccattgtaacattattacataataaacaatacagacagagctactagtgctgtgctactgtaacattattgcatcaaatcctgtaaacttcagcaagggatggatgttcttaaacatccgaattgtcagcctttataagtcataatatgtaagcagaactttttcgtactctagcgttttgaaataataaatttcattaatgacgattagaatggtgagtggctgtcgcctatggctgcagatggttttatgctcacaaggcatcgtggattgcaatgtgaacctgctgtaatacgagctttaaaggtcaccttttgtcattgtttgtgtaggcgctgtggaattgttcatgatgagtcccggtcccgctgcctgtcccaagaacatctcgcttctcgcacgggcacagcaggtcaacgctctacacgcctcgacgccttgtccggcctgcaaagctgcagccccgctgcccagccgcctgcctcaaccctctccctctatcttcgtgagccagcggggaaggaaggaagcaacacccagggtaggatgggggtaggcgagtgcaagagcaacgactacggcgccgccgcatactgggacgcccgctactcctccggctcgccagcttccgccgccgccggctgtgggttcttcgactggtaccagacgtacccggcgctgcggccgctcctccgcgcccgcgtcccgacctcctcccgcgtcctgatgctcggctgcggcaactcccttttgtcggaggatatggtgaaggatggttacgaggacattgtaaacatagacatttcatctgtggtcatcgagcaaatgagagagaaacacaaggagattacacagctaacatatatgcagatggatattagagacatgggatttttcggtgatgagtcatttgattgtgtccttgataaagggaccctggatgctatgatgtgtgctgatgatgctcctcatggtgctttcaaaatgctagcagaagtggcaaggcttttgatgcctcatgggatctacttattgataacatatggtgctccaaaggaacgtgtcccacttctggaccagtccggatgcagctggagtattgcactctacatcatgcccacagctggataccaactgagaatgagtaaaggtgctcaacatcttataatggaggaggttacactcacagagggtggccaactgccacctgactatgttctcaaagatccagattcacatttcatttatgtttgtgagaagttggaagagaaagggactaattgcagagatactgatccaaaggaatcaacaaatgcaaattaactcactaccaacttcagatttcattttgattattgctggggaagtttgttgttgcaaaggcatagtcggagctcgtcttttgaatcatgtgttacccttcgtatgaaaaacctggctggcttcgccccgactgggtgtttggtttaaagaacgtgttagtatcttttcacttctca

SEQ ID NO: 17275 - DNA, 70 bp, Zea Mays
cttcgtcttcgcccgattcttgggatttcttgatgacatacggaacgacgacgaccttcgattgaagtct

SEQ ID NO: 17276 - DNA, 1814 bp, Zea Mays
atcgaccaagtagccggcagccgcgcggcgtccgcgtcactccaatcccctcgccccgcggcgcctccgttcacagcgccatggcggggtggatctcctccaagctcaaagcagccgagaccctcctccaccagatcgatcagcaggcggcggaatccctcggcaagtccccatccgcttccgacctcgccacgctgcactccacaacatctcgctccgccgatgacctccttgacgtgccgctcccgcgcaggccgccgccgtccggcccgcccccctcactcggcctccgtctcgcagcgaagcgccgctccccgccttcccaagggccccgtcgctccgcatcggcggctgcgatgctcgcggtgcaggatcaagccggtggtgaaccaacggtgggggtggtggccgaggtgaaaccggaaacggatggaggggatcgcgaggacggcaagagtgtcgcgtccgagagcgggagcgatgaggactccgatgggtcagggagcgaagattcggaggattccgaggaggagaggcggagggaggaggagaggacgcggcggcgggctgagcggcttgcggccatggccgcacgcgctattgctgagcgcgaagatgctgttgcgaggctcgagggggagaaggcggggcttgagaagctgctcgccgagcgtgagaaggagcaggctcaggaggcttcagagttgcagactagtatgattgaaaccttggaagcagtggagatagagaaacagagacatcacagcactagaatggaagcccttgcacgtttggctagacttgaggttacaaacggtgagcttgcaaagtcacttgccagggaacaatggaatctggaagttcaagtagatcaagtggcgcagcttcgagaggaagttgaattgaagaaacttgctcaagataaatacagaagaaagctaacaaagatacaaaagacaagtgcccctccggttgatgaaaatctttgagaaggttcaagctggaggaagaaattattgatgcagaatacactctgacatgtgacagaattgtgagcttgaaggacaaggcaaggaagattgaagaaagcattgagctgactagaagagacatggttcatcctacagaggtggaaattgagctcaagaagaggcttgatcaactaactgatcggttgattcagaaacaaatgcaggtggagtccctatcttcagagaaggcagctctgttaatgagaatcgaggcagtcacgaggttgcttgacaatagcacctcatcatcagcttcctcaagctcatcaagattggacattgaagctggtgcatggcaacaatcacattcaccaacaatcacattcaccaacaatcacattcgcgacagaatacgggctggacagcagcaactgggatctgcgatccgacagctcgattcgatcttttcagccgggcatatcttcttgaggcggaatccgaaggcgcaggtttgggccttggtgtacctggtatgcctccacttatgggtactgtacatactaacatcacacccaacagtgtcggaaactcgctctggggcaaccttttctttggagacattaaacaagactagcacttgattgctttttcctggcatgttctgatgttatattctggctgtatacatgaggcatcatacctttttctggttgagaaaaatcttagcatataatgcctcgtgcattttgttttggtacctgtccctatccgcaattaaagtgtaacggtggctggttgcatacatgaaagttggaattacttttggacaatggtggctggttt

SEQ ID NO: 17277 - DNA, 2329 bp, Zea Mays
gtggctatggcagccagtgcccctatctcgctctgctccgaagtccgaactgaagcttgggtgcttcagtgtgtcgaaaattcctcttcatggcgttcagaactataaaagtttcaagaagacagtagcacgattggaagaggctgctgtatcatgccgtgggggtgaaagagttgaattgttgaaacgttggttaggagcattgcaagatgttgatgctgaaaatggaagttcagatttaaaggtgtctgaagctaatgacccttctggtgaaatggacactttgaaagcacaaactgttttgttctatgatgctgatattgatggtgcacctatgaatttttgtgatgtattcttgtacagccaagcacttgaaggtattacattgtccatgattctcgaacctccttctgaggaggaagtttcactgcttttggaaatattcagcatatgccttactggagggaaagaagtgaacaaagaaatcatgagtaatgtacaagacttggccaaggcattttcagaatacaaagatgaagtcctggtgaaacgtgaagagctgcttgagtatgcccaaagtatcatttcaggactgaagagaaatgctgacattgtgaggatagatgctgaaaccctagaattgcagagaaaactagacgagaagcagaaatcacgaggtcaatcacctgaatatcaagataaaacgtcagataagattgctgctgcaaatcttgaggtcttcaaagaagcacttggtgaactccgcttatgctctagagttgaagaacttctgctgaagaagaaatcaatcactcttggtgactccctggagattcattctcagaaggtagataaactaaaggttttagcagattccctggcatgttcatcctccaaagcagaacagcgtattttggagcacaggcgccagaaagaagatgctctcaactttcgtgtgaaaaaagagaatgaagtcagtgtttctgaaaaggaattgcttgatgagattactgaattggaaaagcaaagagatgagcttgaggcacagctgaagaaggttaatatatcactaaatgctgctgctggacggctcaaacaaactagggaagagagggaccaatttgacgaagcaaacaatcaaatcatatttagcttgaaaaaaaaggaggatgacctctcaaaatccattgccttatgtaatgtggaatccaatgttgtcaagatctggatcggtttccttgaggactcgtggaagctgcagtcctcatacaatgaacagaaggataataaaacgtgtgatgagctggagaaatgtgtgagtgattttctaaagttgacaaaacatcatctttcagcattcaaggaagtcctaagccaattgattgagaatatcgaaacatatgtcggtaacttggctgtcttaacctcaagggaagaggaaaaagaacatggggatgatgaggcatctgagaggacagatccacgtaaatcccttgaagaggaatatctagaaacagaaaagaagattataattgcgttcagcatagttgatcacataaagaaattgttttattctggggaaggggctgattcaaggagagatgacccagaggtcaagagcttaattgaggagattgagaaaatgagggaatcgttcgagtctatagaaaggccaacactaagcatagaatctgagaaagcaaaaccactacctgttgagggatcgaaactgagtccttcacctcttcaggctcctgctaccccaaaagctgcacacgttgactcaccaaaatctcccatgaaacctgagcagcatttcgattcagatgcggagcttgcaaccctgggatcagagatcgggaaagaagacaaagagtactcagttgaggagataagcgggtgggagtttgacgagctcgaagaggaccttaagagctgacacaaagaatcgacaaacagaacacaattcgatttggttatcttcactgacatgtattatttgtctgggccttgcgtgggcaagaaatacacactggttgatatgtacatagtgctgtttgattgtgtattgtcgcgcactcgcgctgtcaatttgtcactgtcttaagatatacggactgagctggtgtaacttgggcgaggcatttgctatttgtttgctcttgccgcgaatatttttatcttacatgtataccgaaccctgttgtaacagttgtaaacgcggaaaacaaaattcgaacatttgacagaatttgctccgtagaacattggattgttgggtttgagttttacattgcattcctaatggatgaatctatcaggattcagg

SEQ ID NO: 17278 - DNA, 2236 bp, Zea Mays
aaaaaaaaaaaaaaaccaaacgtgttattgctgcacctaaggaaacgcggccgaggacgagagtgggccagcggggtcgaggaggtaaagaaaactaatggcagcgaaggagggaggcagtggggaaggtgggaagcggctgcccaaagccacctccaccaccaggccttcttctacccccatcccaacgcccaggccacaccagcgcagcgagctctctcctcgtagcggagtcccagcccctcacgccctcccgatcgcgctcgtcggcgcccttgtcgactcgagcccgcttctgggccgatcgacagcgagagcgagagcagcggcgcgccgaggagagctctttcggtgctgctgtataacgacgacgacagcaggcggcagataacacataaaggcgcgcgatgtgcgacgcggcggccgtggcggctccgcggtacaggggcgtgcggaagcggccgtggggccggttcgcggcggagatccgggacccggcgaagcgcgcgcgcgtctggctcggcaccttcgactccgccgaggccgcggcgcgcgcctacgacgtggccgcgcgggccctgcgcggcccgctcgccaggaccaacttccccgcgctcacctcccgccctcctgccaacctgcccgcgcccacgcccacgtgcagctcaagctccaccgtcgagtcctccagcgggccccgggccggggtgcccagggcgggcaggcgcgctgctgggaagccgcgtgccccgcggcaggcggccgcgcccgccgacgccgactgccgtagcgactgcgcctcgtcggcctccgtcgtggacgacggcgacgacgcctccacggtccggtcgcgcccggcgctcgacctcaatctccccgcgccgctcgacgtcgacgatggtcatgacctcgagctttgcacggacctgcggctctgaataggcgaccggatccacggacggatcgggacgaagggagagaaggcggtttttgctttggtcttcttttcttgatcagattctgccttgctttgacttgtcgtgctcgagggagcttgtaccagtgctgcactgtactactcgatacgaatggcaatagaattggatgacgattcctgcaacgctatgcagactgcggatccgttcagagaggctccgctcggcgctcctgacaccatcggccatcgcgcttcgcgcccgcaactgctcgaccgagccgggaccgggcggcgcccgttcgttgcgtatcccgcaagttggccggcctccctccgccttgggaggggaaagcggaggaggaagagggagccaagcggtcaagccggctcggccgatcgcctcccaccaaaatacccccgaatccccatccccaagcaacacccagaaaaggcgacaagtgccgaggtctggggagcgatggttgtgcggcggctgggcggcacggggcgcgcgctgctcacgctccccaacatccggaggcgggcgtccaactcctgggccgccgtctgcgacaccttcttctccaccaagcaagtgttcgagagccaccgcatcgtcttcaccgtcggcacctcaatcgcctccgtcctcacggcttgggccggttattcacttcgccatgtgcaacaattaaagattgaaaggaggcttgagtcaattgaatcatctctgaaggataaccacaaagttgaacatgaagagataaaaaagatcgtcacttccagcaatattagcgctccaggctgtgtagccacggcgatgaccacaatggttgttgggtacgcgttaggctggcgaggcggtgcttggtacgctcgaagggccttcagaagagagcagcaaaagctgatgatgggtcacatgaagtcgtcacagaacaggtggcactggcggcccttcaacaggctcaggaacagcaggttaaccgcctccaagaacaagagcaccgatgccctctcaacctcacgcagcggggcctctgcgaacgttggcagcgcagcgggcagtgcttgagctatacgcataatggactaggatgtggacttagggcgcgtagtagtccatacaactttactacgtagaacagatcatgtgactggtaggtacgcagattgatctacatgcgcgcagtggatcatttttttgtgtagtatattaaggtcataatgcacccaactgcatgcatggaacaactgactgacgataggattgagttgagacagccatatggtggcaga

SEQ ID NO: 17279 - DNA, 1051 bp, Zea Mays
ttccctgggaaataaattgccacgaaatttaaacaccaacctctgatttcctctcctccgtgtcgccggccacccactgatccatccactcgccccaatggatcacgccgccgagcacctcgaccccaccgccccggcaccctcgtccgcctcctcctctgctgccgtcgcggagctttgtagtggcaagtgcagacttgtctctgaggcgagcagaggtggaggagaagagggacaaagtgcataaggagtccaaggcactacttgactacacacggaaggccataaacaagcttactgagctgaagaagatgctggagaaatttaagaatgatgtggagaagcaacaagtggagcaaatgactgattggcaaacaaagcttgttatgatggactccaaggaacggcaatatatcctccaagtctcaaattataaggcaatgcttaatcgagtgggttatacgccagagatcaatcatggtgtgttgatggaaatggctgagcataagaaggatctcgagaggaagactaaacccatagctgacacattaaggagctaccaggatttacctccagataaagctttagctgcactagctatagaggacaaaaagaggcagtatgcagccgcagagaagtacctagaagatgtgttgcaatctgctctaaccacaagtggcctataatgtgcatagttttgtttgctgtgtcttatatgttgccatcgattgaaggaagcagatcgatggtatcctacaaatgtgaagacgaaatcctacgagtgcgagctctactatatgtataaattgtgatgcacatcttgtttaaatgttctgataacgctattctaccccttggtgctaacagatgttccttgtcttgccttaccctgtttcctgtaaactgtaaatataatagtgaagaaaatgtctacttgactgtaaaatatattttcatttgcagtcttgtttcctgtaaaaacggttcacattctcttaagggtaccgtagaaaattccttatataattaaaagaatgttgccgaatcactc

SEQ ID NO: 17280 - DNA, 684 bp, Zea Mays
gatcctaccgctactctttgtgtccaagtacacaccctacaaactttcagaaggcagctggcaggattctaatgtcagaaaagcctttgctgagcgatgcttctctttgattgatgagtacgcgccaggcttcagctcatcggtggtaggctacgatatgctgactccgcctgatcttgaaagagagttcggcctaacagggggaaacattttccacggcgcaatgggcttggattctctcttcctcatgaggcctgccaagggatggtcggattacagaactcctgtgaaggggctgtacctctgcgggagtggcgcacacccaggtggcggggtgatgggcgcgccaggacgcaacgccgccgccgttgttttggaggaccacgtgaagacaaagtaggtgtagtgtagctcgctggaaaccaagatggcatttttatcatcaggagaaaatctttgatgccatggtgctgttttagtgcctttcttttcttttcctttttggagaattattgtcgcaatccatagtcggagaacttatatcatgtgaagactcgtgtaacaaatcctcactaacatttctgtccctgtccggcgggaaattggaactgtggtaaaatgtggacccatctctttgaaccacaaaggccctatgggcttattttgtgatgaaacaaccaatgg

SEQ ID NO: 17281 - DNA, 1386 bp, Zea Mays
ttttaatatgctgccgtgccatacgtaacgttgcaggttgtcttgatggcgcccgctgtagaagccgtgaaggagacaggcaccttccagaaggttcctgccttgaacgaaaggatactgtcatccatgtccaggaggtctgttgctgcacacccttggcatgatctggagataggtcctggtgctccaaccatattcaactgcgtcattgagataccaaggggcagcaaggttaaatatgaacttgacaagaaaactggactgatcaaggtggaccgtgtgctgtattcatcagttgtttaccctcacaactatggattcattcctcgcacgctttgtgaagacagtgatcctttggatgtactggttataatgcaggagcctgttatcccaggctgtttcctacgtgcgaaggccatcggccttatgccgatgattgatcagggagaggcagatgacaagatcattgcagtgtgcgctgatgatcccgagtacaggcattacaatgatatcaaggagctcccacctcaccgcttggctgaaatcaggcgcttcttcgaggactacaagaagaatgagaacaaggaggttgctgtgaatgactttctaccagcgagcgccgcttatgaagccatacagcactctatggacctgtatgctacatacatcgttgagggcctgaggaggtaggattctgatggctaggaaaggtggggaggatgttgacgaaaaactgggagaccatttaccgcatggaacgagtaccgttattattttatttgtgtcgtgtatactgctagtagtgaaccctcaatcaaagaccgaaatcccctggggagtcggagtcggtagtaggtgaagctagtaacaaggttggcgaaatattattttctggcctgactgcctatatatgttgtacgtgattggtatcgtaatattcattcgcttttgtgatacataattcgttattggatcttcaattgtgttctgctctcggaacacggtggcgatgtgcctcgtagaaaaatgcaaaggcctcagcgttcttgtttgttactttgctgttatggaaaactgacaggacctgaagtcctgaacgttgtctggtggaatttgtccagcattcccctttcagctggttgcgtatttgaatcctgcacgtaaaaacaaccgcgcacttgtttaactacaattgatctagatttctttaagggctagtttgagagaaaaaaaagaggggctagaatctccttatttaagaagtaaacagaaaaatattaaatttaacagcagctcatggttgtttggatgcccgtcttagagcagcttcaatagttttctaaacaactctctaagtattaaatttaagaagtaaaaagaaaaata

SEQ ID NO: 17282 - DNA, 687 bp, Zea Mays
ggagggggcgtaagttctattcgcgcaaccgcgtagaaaaaaaaaaggtccagtcctcaaactctacagcgggggcgagccgaggaagaagaggtcgccgccgccgccaccgcttccatgtctgggggaatcgcccgcggccgccttgccgaggagcgcaaggcctggcgcaagaaccacccgcacggtttcgtcgcaaagccggagtcgctgcccgacgggacggtgaaccttatgatttggcactgcaccatccccggcaagcaagggactgattgggaaggtggatacttcccactcacccttcatttcagtgaggattaccctagcaagcctcccaagtgcaagttccctcagggtttcttccacccaaatgtctatccttctggaacagtctgtctttcgatccttaatgaagatagtggttggagaccagctattactgttaagcagattctcgtcgggatccaggacttgctagatcagccaaatcctgctgatcctgctcaaacggatggctatcacctttttatccaggatcctacagaatataagaggcgtgttaaactgcaggcgaagcagtatcccgcgttggtctgagaacttcgccctactagggatccaagctgcacattcgcatagttgttgctagtgtcttgaatggaagactaaagaacaagatcaaca

SEQ ID NO: 17283 - DNA, 1097 bp, Zea Mays
tcggcgctcagcgaacaagcaaccgccaccaatggctgcgtgaccttgcgggcgagggcgagggcggcggcggcggcggaaaggagcaaggaggcttccagaagctttcgtccatgcaagctccacctgagagatacgggctcgccgcgatggaattcgagtcagcggcgcggcggcggcagcgcagactctcttcgccgtcgttgaggacccacctcacgccggcttttgacgccgtggccggtggggagggcggcgtgtctgggtactcttcatcgtcgtcttccagcggtctcgaactcgggttcgacgcctctctcctccgcaaccgccgctccggtttcgccgccccctcggacctggacagccgtgtcctcctctactccccgcagtccgtgccgccgcagatgagggcggcgtacctggcagcggatgatggggtcagggcacctggcgtcaaccactacggatccaaatatgaggctgcccggcttactggcgcgccaggttttcagggttcagaaaaccacatttcttttgcctccccgccgcagacaagtagcaatattcctactacagttctgggcgcctccacctccaccaagcttcctgctgaactccagttgccagagggcagcgtcgtagcgaccaatgcagagctcaagacgccaggaccagaagctacgccttcaactctcaagccatctgctaatccagaaccacgcgtggatggcgatgacatcactgatgctctctacggtgaccatggtcatcgcaggctccctattttcagggagatctgtccagattgagtgtcagcctcagcattctcaacgtcgctgatggatgcatttcggccctagctgtatattctgtttatctatcttgtacccagggtcttggtagcaattactctggagggtcatttctagtttcctaaaggagaatctctcttctcttgatctattcataatcgagaaagctatgatataatttacttgattaagccagcaattgaccgttttgcttgacgttggttgtagatgaaccttgtcatatatatgaattgagccttggtttttttttgccttttgtaa

SEQ ID NO: 17284 - DNA, 1654 bp, Zea Mays
tgaggcgagtgttggtgtttcggttgcaatagagtgattggggaaactgatcagccagaattgttggtcaaccgatgggaagcaatgaccctaacacaccctcgaaggcttcaaaggcgtcagaacaagatcaacctccagctaccaccacatccagtggaacagcttcagtgtaccctgaatggcccagctttcaggcctactcagcaattccaccgcatgcgttcttcccccctaccgttgctgcaaatccacaggcccatccatacatgtggggggctcagcccatagtgccaccttacgggacaccgccaccaccaccttatgtgatgtatccacctggaacagtatatgcccatccctctacacctcctgccatgcatccatttggccattatcctatgccaacaaatgggcatgctgaaactcatggagctgcgccaagcgctccggaaatgaatgggaaaagcgagcctggcagaacgtctgctccatccgccaacgggattacctcgcacagtgagagtggaagcgagagtgagagcgaaggaagtgacgacaattctcaaaacgattcacactcaaaggacaatgatgggaaggaagatggcaattctcagaacggcatgtcttattcaggatcgcaaggagtggtaaaccaaaccatggcgatgcttccaatgcaaccgggtgcaatggtcggaggagttcctagctccacggcagctaacctgaatatcggagtggactactgggcagctccgggttctgcggctgtccccgcagcgcacggcaaagcgccagctggttcagctcgaggagaccaatgggatgaaagggagctcaagaagcagaagcggaagcagtcaaacagagagtccgctcgcagatcccggctgcgcaaacaggctgagtgtgaggagcttgggcaacgtgctgaggctctgaggtcggagaactcgtcgctgagggccgagctcgagcggatcagaaaggagtacgaacagctactttcacagaacgcttccctaaaggaaaagctgggggctgccagtagtgattcgcttcctgatatgaacgaacagaacgacggcgacggagacggcggctacaggaagcagcctgattccgatggccaccagcctgggagcgagtcctgacccgtttttagctcaggattcttttggaatgcacattgcttatatattcattctcttgaacgttgtggaacgcagcataggaaggaaatccaactttaattagaatcgattcgctgtcatccctcatgcatggccggagaggggagagggttctcttcttccttggatgttggatacaccgacagtcacgtgcatggcaagagcagaagctagcagctgcggcgactcagggcagcgagcgtttgactggctggggtgcttgctgatatgctcaacacatgaagcagcagcagcctggagcgccagacattcctgactgagtgactgctcatcacgaccagagccaaatccaaatggaataaaaaaaacacacacacactacgtgcagcaatatcagctctccttttctttgtccatgaaaggaaaaacaacgtcacgggaacaattgcggtcagcttttctggaccgtccaccatgccttcatttcaaattcg

SEQ ID NO: 17285 - DNA, 4615 bp, Zea Mays
gaaggggaaaaagaatatgtggggcagctaattttggtagtacagtgaagcatgggaaaaagaatcagaagaaaacagctctatccaatctgttcaagactcttgaggaatgtggactatctaagcacaggccaatgagtcatgagtggggagatgagctggcagcaccaagtccattgttcttggagcagtcatatgattctgcacatttattacagcaaataaactctcagaaaatgctggaagatgttagcatcaatcattccacactattgaacacagataactggaagcatgcaaatcagcaatacttcaaatgtttagcaatgatgcaacaacttcgacaggtttctttgaagtttaacaaagatctaggtttggaagaggttaacaaggctatgtcatttatgagtcatctgttgactgtgttgtctgaacaacgacatcttgcttataatctatttgatcaacggaaccaattcaagcatgctattttcttattaggttctggaggaaagagtaaatctctatcatcaagccaaaatgtgctgctgagttccatgtggcagcaaaagaaattgtttgatgctgtaatcactttgataacagactccaacttattgctcagaagcttcaaggattgccattataactcttgtaacaactttatagaagttgaagggatctcatctctccttggaaagttcatcttgaatttttctgaatccaaggagttgttagatgaatgcttgcttggatccactaatatatttgctggtgcatataagagcatgcctcattctgcaacagagatggaacaactttttactgataattgccagcatatagattcattgttggatggatacttgcctggatccaataatatatttccagatgcatataagagtattcctcttgctacaacagagatggagcaactttttgctgataattgccagcttatagattcattgagagaagatatgaaggttctatgccacagggatctttcagtgggatctgttaagaaagttcttatctctcgtttggaagaattgttggagaagggcaagatggcaatggagaaccgaagacatgttgaagaaaatcataagctatgcttaaagcttgaagcttcgtatatagaaattttgaaggaaactttcatgttagttgttggtgctgtcagaaagctcactgatcatgaagtatgcagtaatggaactgaaaaatcgccagttggtaatgttgcatcatggaaagatactttgcagacatgcattatgaatcttaaattggatgatatttgtgttgctggtgaaaagattcgtattctagtgaggttgctggttgactataaacctgatatacgtactagtatagagctgcacctaatgcatcttcatgcttggctgagtgtgatcctatcatcagcagaagggatactttccgaacttttagaagcacacataacaacttctgaaatgactcttgcacttggggacctttttattcatttatttacggatgggtttggttccactgaagatacagccgaagatgcagatgaactacagcaagatgctgttggaagtggaactggaatgggtgagggggatggtcaaaagagtgtaagctctgatatagatgatgaatcacaacttggtgacagtaaggacttgacatgtaaggcagatcccgctcctaagaacgatgataaagctgttgaaatgcaagacggttttaatgcacaattatctgatgtttctgaggatcttgaaggcaaagactcgggtggcgaagatgaggataccttggataatcagatgggtgatactggtgatgcaagtgaagtggttggcaagaaatcatgggataaggatgaagatgatgatcctaagacatctattgagaaatatgagtcaggctcatcagccaagggaacacaacaggatgatagggaaatgagagctaaggatgatggttctattgaggaggaagatccgatggaaatggattctgaggaaggaaagaataataatcttgaacatgatcctagtacccatgatgaaaccgaactgaatactgatgaagtcatggacaaagctgatgcatatgatgaccggactggacctgaactccctgaaccagagaatgattccattgatgttgacatggtggaacaagaacaaacggatgaaataaatgctgacaatgaagatataggtacagaagaagctgaacaagcagatcagaggttagatgcttcagatgatatggaggaaggagatatggcacaacatagcgatggtgtggtagataatgaaggggagcatgttgaagatgcaaatacagacgcaggtgagatggattcacaccaattggacaaggcggattcacttatgcctctgtcacaaggcctacagcctgacaatatgcaaataaattctaatggagaatctgaagcgaacttggccaacagcagtgatatgcatggcgctgttgctccttcagtaaatttttcaggaaatgaagtgcccaatatggaaatatctatgcccaatactggtaacgattcaatactatcgtctaactccaagccagatatgcaaaatgatgctcagcagcacatcaagcagacaaatcctttcagaagcatcggagatgcattggaggactggaaagaacgggccagagtctcagctgatactcaggatcatcaaccagaaactggaaaagatagtagtgagaacactactgaatttcgttatgtgcctgagggtgaggagagcacctctcaggcattgggtgctgcaacagctgaccagatcaattatgacaatcagattaatcaatctttcttggaagatgaaagctgtatcaggaatttggaacatagtgatgagagaacacctgataaccctgaggtgccttaccttcaaacttcacaagcacttcccaacaagtctgaaaatgccaatgaattggatggaagagaaattcaaactgatgcatccgttcaaaatttagttgaaagaacagatcacactttccaagatctagtttctttcaaacaacccccggcagatgataaaatagctcttattgacctaactactgacagggaattgccttctcagatggatctcgacatcactgatgcagagacaaaaagatctaatgcggtctggaaaaatcttgagctcgcaaccatgaaattgtcccaagaactggcagagcaattgcgcctggttatggaaccaactcttgctagtaagcttcaaggggattatagaactggaaagagaataaacatgaagaaggttattccatatattgcgagtcatttccgcagggacaagatatggttgcgccgaactaagcctaataaacggaattaccaagtggttattgctgttgatgactctagaagtatgtctgagggcaaatgtggaaaatttgctatcgaggcattagttactgtgtgccgtgctatgtcacagcttgaggttggacaatttgcagttgcaagttttgggaagaaggggaacgttagtgtgctacacgattttgatcagatctttaatagtgaagctggagttaatgtgatctctagcttgtcgtttgagcaagataacaaaattgaggatgaaccggtgtctgatctcttgacacatctgaatgttatgcttgatactgccgttgcacgggcacgcaccccatcagggcaaaatcctctccagcaactgatactgataatatctgatggaaaattccatgaaaaggaaaacttgaggcgccatgttagagacgttctaaatcgaaagaggatggtcgcgtatgtgctcctggatagccccgaggattctattattaatctaaaggaagcatgcttcagagtaggggagaaggtagagctgaaaaaatacatggattcctttccgttcccgtattatgttatgctacagaacattgaagctcttcctcgcacattggccgacctgcttagacagtggtttgagctcatgcagagcgccaacgagtgacccttgggagttgggagtagtgccacgcatttagctgtacagcaaactacattctagcttccatttttgcttgggcctggacagttctgtggtggcaagcttgattgtgcacaaatgccttcacggttcaaatcgctttcctgaaatatgatctctggtcgcaggcttgattgtctaaaagcatcatcacaattcaaattgtttttgggaaatttgaatagaatttccgctttcctgaaatatggtctctgctcgcaggctttattgtgtaaaaacatcatcacaatttaaattgtttctggcaaatttgaatagaatttccgtgctcaagagttatagtttgttttttttttcaatggagaattgttgctcacgtgctacatgcgacctgagtgtgattgatccttcaatcttgccctgctgttcatcttgtgttgtttgtcatgtttggctttgttgatgtacatgtttcttccactgcatgtgctacgcgttgacgatgtacgcaactgtcgctgccaacgcgaccactttatatatgtgacagtgacacatgccaggggcag

SEQ ID NO: 17286 - DNA, 709 bp, Zea Mays
aacggcactccatcgcctcatcttatccgccggcctcctcacgccgtcgctgctgcctgctcactccccactcccgactccccgacgcacgagctcccaggagttagccatggcctccaccaccctctcctccgccttcagcctcctctcccgcccctccacctccccgtgccccgccgtctcgctcccgaggtcctccttccccgtgcctgacagccgccggagacgccgcgccgtcaccgtcgcgtccaccgccaccgagtcccccaaggtcttggagctcggggacaccattgccgggctcactctcgaggaggcccgcaaccttgttgaccacctccaggagcggctcggcgtcacagctgcggccttcgcgccggccgccgtcgtcgcagcgcctggggcgggcggcggggccgcggccgaggaggaggcccccgttgagaagacggagttcgacgtagtaattgaagaggtgcccagcagcgcgcgtatcgccactatcaaggtggtgcgcgtgctcaccagcctcgcgctcaaggaggccaaggaccttatcgagggccttcccaagaagcttaaggaggccgtcagcaaggacgaggccgaggatgccaagaagcagctcgaggaggtcggcgccaaggtgtctatcgtgtgacactagaatacaccggccgcaactgcatgtccggctgaagatggggaa

SEQ ID NO: 17287 - DNA, 553 bp, Zea Mays
gcagctgagttgttgacaaacaacaagttatctgagttggcatgtttggcattatatctcatgtatgagaaaaagcaaggaaaggattcattttggtacccctacattaaggaacttgaccgacatcgaggaagggggcagctagctgttgaatcaccacttctatggactgaaagtgaactggactaccttagtggaagccccttgaaggatgaagttgttgctagagatgaggcaataaggagagagtataatgagcttgacacattgtggtttatggcaggttcactatttcagcaatatccttttgacatacctactgaggcttttccgtttgaaatattcaagcaggcttttgttgcagtacagtcttgtgttgttcatttgcagaaagttagtcttgctcgaaggttcgcactagttcccttggggccgccactattgacttacaagagcaactgcaaagcgatgttgacagttgatggtgagtctgttcgattggtggtggatcggccatataaagctggagaaccaataatcatctgattataca

SEQ ID NO: 17288 - DNA, 1391 bp, Zea Mays
gtggagggactcggccacggaccacccgtctcgccctcatctaattacgccccgctcgctgtccctctcagatctcttccttgttctcgcctcgtcgtccccaatcgtcgccgggagtctcccgatccttcttccaccacctcaccggtggtgtcagggccggctcgcggacggtgcttggactgcccccgtcccgtcatggatcgcgccgagctcaccaccgaacaggttctgaagcgagatattccatgggagcattacatgtcaactaagcttatctccggaacgtgccttcagcttttacggcgatatgaccacaaaccggagagccagcgagctcctttgcttgaggaggatgggccagcatatatccgagttttcctgaatatcctgcggagcatctccaaggaagagactgtggaatacgtgcttgcactcattgatgaaatgcttgcaacaaatcctaagcgtgcagcactgttttatgatcaatctttgtcgggtgaagatatttatgaaccgttcttaagttgtcaagggctctactaaagagaaggtggtcagagttgttgtgttgtccttccgcaatttgctggcaaagggtgcatttgctgcccagatgatcgatcttggattgccacaaatggtacaaaacttgaaagctcaagcatggactgatgaggatctgttagatgctctgaatcaactagaggtgggactcaaagaaaacctcaagaagttgagttcctttgataagtacaaacagcaagttcttcttggtcatctggactggtctccaatgcacaaagatccaagtttctggcgtgagaacattaacaattttgaagaaaatgatttccagattctgcgagttctcatgacaatcattgacacatcaagtgacaccaccgctcttgccgtggcctgctacgacctctcacaattccttcagtaccatccatctggccgaatcgtggtggcagacctcaaggctaaggaccgagtcatgaaactcatgaatcatgagaacactgaagtgaggaaaaatgcattgatctgtgtgcagaggctcttccttggcgcaaagtatgccagtttcctgcaggcttgagaaaagctgagtcttgtatttagatccagagaacccctggtcatttttcagaatggctgttgagaaagaaaaaccttgaaaattcttgttcagtgtatcctattgttatttgatttctgaagccgatgtataataaataatcagagtcatagaatgctcgatgtaataaagtgtccatgggcttgttgattcatttatgtaaattttgacttgtaacattagcaaacctcttttttgttattcttctgcctgacaacattgcctgattcgtgtgcattac

SEQ ID NO: 17289 - DNA, 762 bp, Zea Mays
ataaaacgacttggctacgcttcacgcacacggcgtctttgggtgagcacaccgcgcagcaacgagaggggcaaacaagcttgctactgtgatttctcgtccgagcagcggcggaggagagagagagagcatggccgaccacaaggaggagcctgtgccggagtctgtgatggacaagatcaccgagaagttccacggcggggactcgtcgtcgtcgtcgtctgactcggacgacgagaagaaggggtcctcgttggcgtcggcggcggaagccatgaaggccaagatctaccgccttttcggccgggagaggcccgtccactccgtcctcggcggcggcaagcctgccgatcttatcctatggaggaacaggaagatctctggcggggtacttgctggtgccacggccatctggctcctattcgaggtcatggagtaccatctcctcaccttggtgtgccactgtctcatcctctcgctggccatcctcttcctgtggtccaatgcctccactttcatcaacaagtccccaccgaacattcctgaggtcaaaatccctgaggatgtggctgttaatgttgccctgtcactgagatatgagatcaacaggggctttgctaccttaagggagattgggcatggccgtgatctgaagaaattcctaattgttattgcaggtctctggcttctttcagttctcgggagctgctgcaacttcctgacactgttctatattgttttgaatgaagttttatgcctcca

SEQ ID NO: 17290 - DNA, 779 bp, Zea Mays
gttttcgcgtaaccggtccagcacgcaaccgagcttggccaagaccgcgtcgagcaggaaagtgagcggagaggacttggacgcctccgcctccgcctcctcctcttcagcgttcccgcttccacggcggcggcggcacaagctcgccgagctccgcacttcgctgctgtctttggaatcgaccgccgactcaacggacgcttcctgtttcgcaaccttctcctccttagacccgtcgcctagctggctgggatgtttgggcggcttcagatctgtggagttcgactccctgcatgagcacccgggctcctcgcttgagaggcgatcgtggtcgctcacagcctcgccggaggctctctgctcccgctccgctttcagccgtttcacttttgactgcagcgtcctgcgcgaatttaaaaaaaatgagattagcctcccattaaataaatccccaccgaacgatcatcatcaaacgagagatcgcatcgctcgacgtcgcgacggagctcggcgacgcgcagccgccggagctcgtccacccatccctcggcagcggaggcgtcgggatcctcctcggcctcctcgaccccgccgctgccgacggtggagaagcggcggtggaggtggcggaagcggaggcggcagctgtgcggcgtgaggcctggccgcgccgccacggggatccgtgtctgcacctccatggccaccgagtcccagctcgccgtgccgtgccgcgtcacggcgcacgccaggagcagctcctccagcggctggagcgg

SEQ ID NO: 17291 - DNA, 2634 bp, Zea Mays
ctcacatttagatctttgatcttgatggctatagtcatgaaagggcctccagctgaattggttaaatgatcttagcgctcttcaggtcctgtatggatgagcaatgttgcccaggctgatgctaagaacactttccagcctccatctcaagtgaaacatggttggggtggtgttccaggtcgcccttccatggctgaaatagtgaagatgggccggcctcaagctaaagttgggagcagatctgttgcaagtagcattgtcatgccagctattggtgattcagccattcccaatacaccaaatcttgcgcccaatgaatacaaccaaactgtatttgcatcagaagtaggccatggtgcagcagataaattgccaaatgttgccgatgaggtgcactctgtatctaaagatgcttcctcacttgatatgttaccttcagcagagggaacagatgttgaagccccttccatgagtgctaacatgcaaggttcatcaacgccagatgccaatgaagatgacgttgaaaaagacacaaatttggaagagggcaatacagaaagcttgacgactcctggacaagtttctgcttctggtaaagatctgaatggagatgtgtctacaacgacaacacaatttgatcatttgactctgcttgatggaccaaaattgtctgatgagaatccggctgtaataatccctggccatcttcaggtttcaaacgctgattgtgcgcacttgacatttggtagttttgtgtatggaacacttgatgcgtccttgacaacaaaacctcttgagagtcatggggatatcgtaacaattcctgacgatgattatgaccaatcagagggcagcaatgtagagaatcttgatattacatcagtacagcaatctgaagtcactagatccaatttcctggatgtcacgagcaatacggaatacaacctatcatcacccccagattatgcaacttcaagtgcagcgctgcaagattctacttcacagagttatctacaggaaaatcgacaattccagagcatttctcctctcccaagcttcatgcaaatacaaaatggtctcatgtcaccagcaattccaccattgcgcgaatttgatccagcattctcactattgctcactaatcctcctattatgcatggtacaacgtcatcatccatgagcagtgcaactgtttctacgcagccccaagagaatgccaatccagttggtttacccaaccctcaattgactcaatctcagccaagcaccagcattgctccagggcctccactccctcagcatcttcttcatccctatgctcaaacaacccttcctcttggatacgcaagcatgattggctatccatctcttccaccaagctatgcatatctcccacctgctgcttttcagcaaccatacatgaacagtggcatgttcctccaccaagcagcagcagcagttcccaactcaagtgtgaaataccctctgccgcagtacaaaagcaacattgcccttgctagcttaccacagccaggctctttgctctcaagctatgtcgggggctttggaactgcaaacaacatgcctggaaatttccctctgaaccaaagtacaacgtcggcaaccgcaactcttgggtttgatggaacggtcccgtcacatttggaagatggaaaccagtttgtttgtcttcagcagaacgagaaccctgcaatgtggatgcatggagctggttcacgagggatgcccccacttgcagccagtaccatgtatggctatcaagggcagagtcatcagaccggccttcggcagggccagctaccttcacaatatggctctgctctagggcagtcacagccgggcctgggccccgaacaccgaaatcctagcgatagtaacctaagtggtgctgctcaggctaaccagatgtggccaaacagctactgatccacccgaccaccccccttatcaacatctgtggaagacggtcttgttgttgtgtgcgcaaacgccagaggccatgcaaatgcctgtggcctgatccaggcacgcggataccagctgcgtgtgcatgagttactgtcgtgacattttgagaggcgcaagagatatatgttggagcatgttccacctgtagggtttgtaggatatggccaaaaatgtagctggatctgttcattcaaattctgatagggaaagggccggtcgtttttcgttctatttcccccctttttttgtcgtttgcatatcttgtgacaataaaaccggaatatctaacacatcagcaccattagttccccgaggggagtgaaagatagtctgttgtctttgcatcaccagtattgcgcctgcctcgcttaaattttatgattgagatggttatttgatggatgagaatttcccaacctgtgccttgtctgatgagatgtatcgttgtatttgaacattgaatgcataaaaaagagagattgcagcacacatttgccagccaaatgttgattattcgctgaagtatgtaaatagctctcattatattgattgatttggtcaaattgtttggttatcttgcaaatattacagtggctcagtgttataaaaaaaattaaggctagtttggaaaccatatttttaagt

SEQ ID NO: 17292 - DNA, 1121 bp, Zea Mays
ctggctgtgcgcttgttcctacaacctgatgtttttttggatttgcaaccttaacaaaaagagataaataaagaagttcaggagcttttaaggcttacgttaagcaaggcccgagtcaagctgaccgaaaataccatttttaaacgaatcattatggacactaacagcacagatccatttaatggtctctatgtgggagcatttagtccatatggaccagaaattgtgcagcttcgtcggaagttcggccactggaacagtactgatgacgttgagtttttcgagtatgtcgaagcagtaaagttgactggtgatctgagtgttcctgctggccagataacgttccgtgctaagattgggaagggcaagcgacttgagaatcgaggagcatatccagaggaatttggtgtgattgccagttacaaaggtcagggtagaatagctcagcctggattcaaaaatcctcgatgggtggatggtgagctgttggtactcaatggcaagagtacaattccacaccttggaggcgcagagctcggtttcctgtatagtgtacctgagcagagttttctggttctcttcgatcggcttaatcttcccgagtgatgagactcctaaagggagcagactcctcacatgtagattgcatgaacgcgcagaggccggccacagctccaagtgaccgaaacaggtctggggggccgtttccccatcgtcttctgccctctgggcttcctgccaatcctttctccgcacctactttttaggagctcatgtgcttaactcgtttcagagtgtgagggaaagtcgacaccattgctggtctaaactaacggaggagtcttaatactaataatatatatgttatagcatggtagtttgctctccaatgccacagttgtagctgtattgggtatgggcatgacagttttgcgagttttacccgtcatcgttgatttcagtaattaccgaattgaataaaaatcgttctggtgtatcgtgatgttacaattataataatataaaacaaggcaaataaagtctcatgatttatgatcgtttttctcttgtaatatggtcgagatacttttattcctgtcctattagattttgatattgac

SEQ ID NO: 17293 - DNA, 1454 bp, Zea Mays
gatacatgcctatgaactcctgatggagatatgctactcatggataagatttgaagaggagaatggcaccttggatgattatgatcttgctgtaaagaaggttacccctcggctaaaggagcttatgacattcaagtctcaagaggaggctaaagttgaggcttaccctaacctcaatgataattctaatgcaaatgattcctctcagaaaagaaaaccaagtaacaataaacagcagccccctgctaagaaaagaaaagagaatccaccaaaaagtaccatgccatcagatgaccaaggatcaaatgtgcaaagtgggcacagtggtgctgttactgatgtagaagtcggaggggccagcagggagaaggtcatggcatctatcgagatgaaagtggacagtgacagccgaacagggaaatcaagttcaaatgaaccaaagccatccttttataatgacaactgtacagtttttgtgtcaaatattgacttgaaagcaaatgaggatgatctcaggcgattcttctctgatattggtggtgccacagcaataagattgctgagggacagattcaccaaaaaatcaagggggttggcctatgtggactttttagacaacaagcatcttgaggcagctattaagaaaaacaagcagaagctgcttggaaagaaagtgagtatcgcgcgatcagatccaagcaagggtaagaagagccgtgaagcaggtcaaacaagccaggataatttacctccgagtggtggtgatgatgcaaaagcaacaggatccagtggaccagacaatgaagtacccaagggtgatgcaaaaaccatagggaagaataccctttttgcaccacgagctctggttaaacctcttggatggacaaacaaggatgagaagaaaccagatgttgcaggggagttgaaatcaaatgaggagttccgaaatctgttactaaagaagtgatatcagttggcaggtgtggatctccatgccccaatccagtgccaagatttgtggtgccttcatctctatgttagaatgatggacctgtagtagcagcttgaactggggatctacaaccgttatgtcttaccccgatgtagacatgaatatttctttctgctagggagattatacaagccatgccgaattgcagggtggtgaaggtgaaaacgggacgttgcgttcgagcagaaaaaccctgcccatgtgaaaagaaaacactgaccttataatatgtgctcactttctttttgaaccatacgtacgcattgctggtgaaacatcactgcatctcaaaaatgtgtaatctactctacgcggcttgattggagatgcagatttatttgattgtacgttgggaccttttggaccttgcaactgcatatgttgagaggctaacatcttttcagagcggcagcccaacgacactttgcatacacgttttaaa

SEQ ID NO: 17294 - DNA, 924 bp, Zea Mays
tatcagcccgcctatttctgtgatgttaggccggatgacacgccgtgggatggaggcacgttcaagctgactctgcaatgtacagaagattaccccaacaaacctccaactgttcggtttgtttcgaggatgtttcatccaaacatctatgcggatggaagcatctgtttggacatcctacaaaaccagtggagccctatatatgatgttgcggcaatattgacctctattcagtccctgctgtgtgacccaaacccaaattctcctgctaactctgaagcagctagaatgttcagcgagaacaagcgtgagtacaaccgcaaagttcgtgaggttgtggagcagagctggacagccgactgaaactttatccgctccgccaggcggtgtaaataaagcatctgtctttcctacttggccggtctgttttaccgttagaaatcctcagctatcgttgtgttcttgtggttcagtcccttgttgtagtgatgcctgcgggttttcctaatgtagtgctgaacggtttcataaactcggatattggtgcatatgtaacagatatagctaagtcaagttgttgcttggtttgcataagcttcgtgtcgtgtcgtgtgcttctttctcgctgcacgaacggcctttcacgaggcacctctgacagatctccatgaccgtcctcagcgactcgtccgagcaccctttgctcaccgcggggtctgcgaagctcctcctcctcacccggtcctcgtcggcaatcgcccatgcaagctgcagtcgcatcgcatccaaggaggcccattcagttgaccgacccagtgcagtgccactagctaagttctacattgtcagagagtgagtgagagagagagatggtaccaattctttcagtatctccacttcatacatggacgtgatggtcttccc

SEQ ID NO: 17295 - DNA, 2059 bp, Zea Mays
gaaggcgttgatgtggttgtcccgttcctgtttgctcgatgttgatgtaaataagttgtggagaactgcagattcaaatggttggagagcatcttctgcaccacgcacctactggcctcccccaccaactgaatctgagagcaatggctacttgcgcgtccggtgcaatggtggcttgaaccaacaacgtagtgcaatatgtaatgctgttgttgctgcacggatcatgaatgctacactggtgctgccagaattagacacaaattcattctggcatgatgaaagtggctttgtaggtatttatgatgttccccacttcatcaagacactgaaatatgacgtccgaattgttatgagcattcctgaaatcactacaaatggaaagaccaagaagctcaaaggccagcagcttcggccaccaagagatgcaccggtatcttggtatgcaactgatgctttggagacgatgaagaagtatggagctatatatttaagtccattttcacaccgtttggcagaagatattgataatccagagctccagagattgagatgcagagtgaattaccatgcactacgattcaagccaaatatcatgaaaacaagcagtgagatagtgaacaagctccgctcagaaggccatttcatgtcaattcatcttcgatttgagttggatatgcttgcatttgcagggtgctttgacatattcaaacctcaagagcaaaaaattctgtggaagtacagggaagaacattttgcagaaaaggaacttatccccatgaaaatcaggctcaaaggaaagtgccctttaactccagaagaggtaggttttattctacgtgccatgggatttgacaatagaacacgcatttaccttgcctctggcgagctctttggagggaaacgtttcatgaagccattcaagaccatgtttccacgcttagagaaccacagcacagttggacctggaaagctggaagagaatacccaagggctagcaggatcagcagttgactacatggtttgcctcctgtctgacattttcatgcccacatatgatggcccaagcaactttgcaaacaacctcatgggccaccgtatgtactacggtttccggaccacaatcacgccgaacagaaaggctcttgccccgatactcatcgacaggatggaaggccgccacattggctttgagagaatcaggagggtgatgtccaacacccattttggtgccccccacaagcgcgtccatccagagtctttctacacgaactcatggcctgagtgcttctgccagacggatgccaagaaccatgcagaccggtgtccccctgataacataaatgacgttctggaaagccagttccagagcgaagaagaaatggaagaagcaagagcctctaatcagactgacccatccagccaaatagaagagctgacgatttaactgatcaactagggattactgctcggaagcattttgaacacttggaatggtcatcagagaaatccagatacaactatattcaaggaatgtattaattgatggctcaaactggagcggttgacatgctgaggtgtggtatctggtggtattcagggagagcattgaaccagattttgaataggtctggtcatatatggttttgaggagaaaacaatatgtatgtcaatagttttcctcattgaagagtgaagttgtgcgggttgtgtaggtggcagtgacaaaagtgagaaacctttgcgcaatatggtaccatccggtgtataaaggccccggttaggctggtgccagtgcaccctttgtctttcgtccctggcatgtcagctattgactccactcttgtccttactgttttagtgcacaactgcacaactcgcagcgggatatagcttcggcatatagtcacattaacttttctatttcagaattaagtaatttacgtgaatttattttaatgctcagaaaccacataacatgatatttttattaaagtaaaaattacaaagggtatgataattaaaataaaactatatgctaattaaaaaataacataaa

SEQ ID NO: 17296 - DNA, 1919 bp, Zea Mays
caagaagctaaaataaacctcaaattcttaaacctgacccttacgccttcgctcgcgccgccgccgccgccgccgctacgccccgcacctcgcttcatttcgtgtcgccaagatgacgaagcgcactaagaaggcaggaattgttggcaaatatggaaccaggtatggtgctagcttgcgtaagcaaatcaagaagatggaggtatctcagcattccaagtacttttgcgagttctgtgggaagtttgctgtgaagaggaaagcagttggaatttgggggtgcaaggactgtgggaaggtgaaggctggtggtgcttacaccatgaacactgctagtgcggtcaccgtcaggagcacgatccgccgcctgagggagcagactgaagcatgatatagctctttatattattggggtttcctgtagttgctcttgtcaggcatgttgtgggggccttatctagtggaaatgtggaatcactgtactggctgttttgccgagacaatgctccttatatttggtttatgctctaggatctcaaagttgtgttaagatttgcccttggttaccgttctgaatctgacaagtgatatttcatcctatgccatcttgacgtcgaatttggttgtggttttctatgcgcttggctgtgtcaatggtttgctattctgttcttgaaattctacagatactgctgcgtctctgctggttgagtctggtttagatagcaaccagtccttattattggtctttcaagttcaagtcaactaaaatgcgacaaataaaaaaaagaatggagggagtatataactgttcaagtcaaccaatccttattacgcctgcacttgtgtccaaaaagaaatgccccggagctattattggtctgttgccagataagcagtgacgacgcagcatcgaaggtcagagacgacttttttgcgagaacgagcatcaagctgacggaatggagcattattccgataaaaaaaaggtatagccagaactcttgcatcctggtgatggtaaactgccgtgccagtataaacgcgaaggcaggtcacacatactcacaagtccgtcccatctcaggtcatccatccatccatccctgcagcaatggcgtctgcagtgaccagcagcgacaaggagcaggccgtccctaccatcgacgctgacgaagcgcacgcgctgctgagctccggccatggctacgtggatgtcaggatgcggggggacttccacaaggcgcatgcgcccggtgctcggaacgttccctactacctgtccgtcacgccgcaagggaaggagaagaacccacactttgtagaggaagtggctgccttctgtgggaaggatgatgtcttcattgtgggttgcaacacggggaacagatccaggttcgcgacggcagaccttctgaacgcggggttcaagaacgtgaggaacctgcaaggtggttaccgctcctttcagcagcgagctcaacagcagtagacatcacgtcctgaaggtatgccagggatgctgcagttgaacgacacatttgcctacctccaggaaaccgtttatctccagcagctctctatcacacctcatactttaaattttactttgtaaacagtgctgtctaccgtcccacctcatactttaaattgtactttataaacaattctgtctaccgtataaaatattacaaacctcttgttttgcatatgcacgatctgttggtcccagccttacaaggtatattcaactgtagaaacaagtctctgtagcatgcgttacaaggaattggactacatgatgcactttgacatatgaatttcctatatgtgcctggcaaaactctgtggcgacatgattgttttaccatcatagcctgacacataaaaaagcaaaaaatagcgaacgaatgccagat

SEQ ID NO: 17297 - DNA, 1460 bp, Zea Mays
ctgggattacacattacaccatcacttttttcagtgccaatgcaatgctacaaattaataatggttcagtggaagttgatgcaagcatcattggagctcaacaagatgggaaaaaggttaaggttccactgaattcaagcgataagttgtacaaggagattcgagacctcaattttgaagttgtagttcaggttttacgtcaaaaagcaacatctattcagcaagattatgcagaagtgaaatccaccaacactcagtctgtttcggagctcaaggattttgtgaggaggttgcactcgctaccggagatagctaggcatgttcatttggcacaacacttgcaatcgttcacggggaaaccctcctttcatgcccgactagacatagaacaaacaatactggaggttcagaactttgaaatatgctttgagtacattgaggagatgatacataagcaggaagttattgaaaacgtccttcgccttttggtgttactttctcttacaaatgccgggcttccaaagaagaattttgattacatgaggcgggagatacttcatagttatggctttgagcacatgcacttattatacaatctggagaaggctggccttcttaagaggcaggaatcaagaagcaattgggttggtattacaagagcactgcagcttatagttgacgtaaatgatacagcaaaccctactgatatatcctacatcttttctggatacgcacctcttagtattcgccttgttcagcatgcagtgagatctggatggcggtctattgaagaactgttgaaactattgccaggcccacatctggatttgaaaagaggtggtttgacaattaattcatcaccggaggtacatccaggtttaggggctcaacagagtattgacagggttggtcatcgctctctggttttggttgtattcattggtggtgtcacatttgctgagattgctgcccttcgcttccttagtgcacaggaaggaatgggctacgactttcttgttgcaacaacaaaggttgtcaatggaaacacaatactcagacccattatagcaaatagcaaagaggggatgatgtaattttattccttttctgtgcatgtgttttttgtaattgcaattgcagacaaacccaagcttgtgggttttcttgtttggctgtgagttcgtgtttggtcagcaactggacgataaggctaaccacgcttgttgatagatggaatccaacagtcccattttttgttctgttctgttctgtagtacatccgctaaactgtaaatcctgggtttcatgtgttcgtctgtctttttattcaataattgcttccttgaaggccgtttatgttgtttgtggaccaatattgtgaaaaaagaaagaatgtatggaacctgttgcaaatctgcatattcttattcctcttttttactgaaggaaaatattgtcca

SEQ ID NO: 17298 - DNA, 147 bp, Zea Mays
cagcccaacaggcctacacaacccactccggcccaaatactttcacgctacgacgctttactcgttgtggacgcgcagcggcttcctcctcggactcgccctccacgtatttgtctgcacgaccgacgtcctggctgttggagctga

SEQ ID NO: 17299 - DNA, 4047 bp, Zea Mays
gccgggcaggcatgggcaccgccgggtcggcgcgcgcccccacctagccgtcgactcggcgctgctcactcgcgctccacgcccacgcccacgcccaccgccccccgctatttatgcgtacttgcttgccgggagagtcgccggagagctgggcgtcctcctcccgttccagagcctcactgcttcgctccacccacccttaagcaagagtggtatctggtggttttgtttttcaaaagaagacagaaatgtcttccttgaggcctgcccagtcttctagttcatccagcaggactcggcagagctcccaggcacggatactagcacaaacaacccttgatgctgaactcaatgcagagtatgaagaatctggtgattcctttgattactccaagttggttgaagcacaacggagcactccacctgagcagcaagggcgatcgggaaaggtcatagcctacttgcagcatattcaaagaggaaagctaatccaaccattcggttgcttgttggcccttgacgagaagagcttcagggtcattgcattcagtgagaatgcacctgaaatgcttacaacggtcagccatgctgtgccgaacgttgatgatcccccaaagctaggaattggtaccaatgtgcgctcccttttcactgaccctggtgctacagcactgcagaaggcactaggatttgctgatgtttctttgctgaatcctatcctagttcaatgcaagacctcaggcaagccattctatgccattgttcatagggcaactggttgtctggtggtagattttgagcctgtgaagcctacagaatttcctgccactgctgctggggctttgcagtcttacaagcttgctgccaaggcaatctctaagattcaatcgctaccaggtggaagcatgcaggccttatgcaataccgtggttaaggaagtcttcgaccttacaggttatgacagggttatggcttacaagttccatgaagatgagcatggggaggtctttgctgagatcaccaaacctggtattgagccctatctaggcctgcactatccggccactgatatccctcaagctgccaggtttctcttcatgaagaacaaagtcaggatgatctgtgattgccgtgcaagatcggtgaagattattgaagatgaggcgctctccattgatattagcttgtgtggttcaactcttagagcaccacatagctgtcaccttcagtatatggaaaacatgaactcgatcgcatcccttgtcatggctgttgtggttaatgaaaatgaagacgatgacgaacccgagtctgaacaaccaccacaacagcagaagaggaagaaactgtggggtctcattgtttgccaccacgagagccccagatatgtgccgtttccactgcggtatgcctgtgaattcttggcccaggtgtttgctgtccatgtaaataaggagtttgaattggagaagcagatacgagagaaaagcattctgcgaatgcagacaatgctctctgacatgctattcaaggaatcatctcccttgagtatcgtatccgggagtccaaatatcatggacctcgttaagtgtgatggtgctgctcttttgtatggggacaaagtatggcggcttcaaacggctccaactgagtctcagatacgtgatattgccttctggctttcagaagttcatggggattccactggcttgagcactgatagcctccaggatgctggatatccaggagccgcttcccttggtgacatgatctgtggaatggcagtggctaagatcacgtccaaggacattcttttctggttcaggtcacatacagctgctgaaatcaagtggggaggtgcaaagcatgatccatctgatgaggatgacagcagaaggatgcaccctaggctgtcctttaaggctttcctcgaggttgtcaagatgaagagtttgccatggagtgactacgagatggatgctattcactcgttgcaacttattcttagaggtacactgaacgatgccttgaagccggcccagtcatctggtttagataaccagattggtgatctcaaacttgatgggctcgccgaactgcaagcggtgacaagtgaaatggttcgcctgatggaaacggcaactgttccgatcttggcggtagatggcaacggattggtcaacggatggaaccaaaaggtggcggacttgtcggggttgcgagttgatgaagctataggaagacacatacttacacttgtggaggattcttctgtaccaattgttcagaggatgctatacttagctctgcagggcagagaagagaaggaggttcgatttgagttgaaaacccatggctccaagagggacgatggccctgttatcttggttgtaaatgcttgtgccagccgtgacatgcatgaccatgttgttggggtgtgctttgtagcccaggatatgactgttcataagttggtcatggacaaatttacccgggttgagggggactacagggccatcattcacaacccgaacccgctcattcctccgatatttggcgccgaccagttcggatggtgctctgagtggaacgcagccatgaccaagcttactgggtggcacagagatgaggtgatcgacaggatgctccttggcgaggttttcgacagcagcaatgcttcctgccttctgaagagcaaagacgctttcgtacgtctttgcattatcatcaacagcgcattagctggtgaagaggcagagaaggctccaatcggtttctttgaccgcgatggcaaatatattgagtgccttctgtcagtgaacagaaaagtgaatgcagatggcgtcgtcaccggagtgttctgtttcattcatgttcctagtgatgacctccagcatgcgctacatgtgcagcaagcctctgagcagacagcactgagaaggctgaaggctttctcgtacatgcgacatgccatcgacaaacctctctcaggtatgctctattctagggaaacactcaagggcacagacctggatgaagagcagatgaggcaggttcgtgtcgcggataattgccatcgccagctaaacaagatactcgccgacttagatcaagataacattactgacaagtcgagttgcttggatttggacatggctgagtttgtgctgcaagacgtggtggtgtctgctgtaagtcaagtactgataggttgccagggtaaaggcatcagagttgcttgcaacctgccggagagatccatgaagcaaaaggtttacggggatggtatacggctccagcagatcctctccgacttcttattcgtttcggtgaaattctctcctgctggtggctctgttgatatctcttccaaactgaccaagaacagcattggcgaaaaccttcatctcatagacttcgaacttaggatcaagcaccaaggagcaggagtcccagcagaaatactgtcacagatgtatggggaggacaatagagaacagtcggaggagggcttgagcctccttgtttctagaaaccttctgaggctcatgaatggcgacattcgtcacctcagggaagctggcatgtcaaccttcatcctcactgctgaactcgctgctgctccttcagcagctggacattgaagccgtcactgcaaacaagtgccaaatgctgcccagctccctcagagttcattcggaaagcaacggtggttcgcggagaatgggaaatgctgcagcctgtaggatcaccgaatgcataagaaataagattgacttgtatggttgtttgttaggcggggaagttgtgcaggcatagtaagactccatacttctgctcttttctgcctgtaaccaactgttttctatcagttattaggctatctcatcagtttaattatacttatccctcatatttaaatttcactttgcaaacaatacaaaacagtgttttgatgaccatatggatgaactgcgaagacaatttttttaggctgtctctaatatttcatccatatggtcacccaaaatactattttgcacgacg

SEQ ID NO: 17300 - DNA, 931 bp, Zea Mays
taagcaaatgattttcatgttacaaaatgtaactaatcattattacatgggagcatcgttaagatgtgttcgtttcagttcctttctactcggcctgtctgcaaaacatactttcagatgacatgatgggctcctctgaggatgagcaatgctcaggggacactgatgtgccagacatggggcaagaacatagctctcacttaggtgaccacgagctcaaggagatgcttcttaagaagtacagtggatgcctcagccgtcttcgttcagagttcctgaagaagcggaagaaagggaagctaccgaaggatgctcggacggtgttactagagtggtggaacacgcactaccgctggccttatcctacgacaaggtgaggctcgcagcaatgaccggtctcgacccgaagcagatcaacaactggttcatcaaccagaggaagaggcattggaagccatctgaggacatgcggttcgcgctcatggagggtgttgccggtgggtcttctgggacgacactctacttcgatacaggcacaattggaccctgaatcatacaccacttgggatgacaactggccagctcatattagtaataagatctggcatgtggagtgacgatctgctcggtgaaaattgaaaataaatctgctgagctgaggttgatcagactagtcagttgccctattattttacaagatcatgtgtatatggtgccgtcgtatcagaacaaactgtatgcatgtatgggcgaattgagacctgcaaaaggagtttaattagtagtttcaagtattggctcatggatttgtaatactcgctacccaatttaattgttagataggctgaagggcttataaaggtaaatttacttctgctcttccattattgtgtttctgttctgatcacatttgatttttttttaattttcg

SEQ ID NO: 17301 - DNA, 2274 bp, Zea Mays
acgctacaccacacctgcagagcagcaagactagcttgtggctaccagcctagctagccaccgccgcgatccactatcatcgcttgctcgccgagtttcctgcggcggccggcgggcacctacatctcctctacctgactggctagtcattagcacagccagtacgtacgtagctcgcccggccggtgctcgacgacacagtgaattggcgacgcacgtagctaggaggccagcagctggggtcggagatggccatgccagtgaagctgactcctgcctccctctcgctgaaggcggtctgctgccgcttcagctccggagggcatgcgctgcgcttcggctcgtcgctaccgtgctggaggaggacgccgacgcaacggagcacgtcgtcgtctacgacgcgccctgcggctgaggttagctctggcaaaagcaagcagcacgatcaagaagcatcggaggctacgataagacagcagctccagctagtcgatgtgcttgagaacatggggatttctcggcattttgctgctgaaatcaaatgcatccttgacaggacatacagaagttggttacagagacatgaggaaattatgctggacacaatgacctgtgcgatggcatttcgtattctaaggttgaatggatacaatgtctcttctgatgagttgtatcatgttgttgaagcttccggactccataattcacttggaggatatctcaatgatacaagaaccttgttagaattacacaaggcctcgacagttagtatctctgaagatgagtctatcctggatagcataggctcaaggtcacgtaccttactgagggaacaactagagtctggtggtgctctacgaaaaccttcactctttaaagaggtggaacatgctctggacggtcccttctacaccacattggaccgtctacaccataggtggaacatcgaaaatttcaatattatagagcagcacatgctagagacaccatacttagatattctagcgttgagtattagagacttcagttcctctcagtttacttaccagcaagaacttcaacatcttgaaagctgggtgaaagagtgcaggttagaccagctacaatttgcgcgacagaagttggcatacttctacttgtctgctgctggcaccatgttctctcctgagctgtctgatgctcgaactttgtgggccaaaaatggtgtgctcacaactattgttgacgacttctttgatgttgcgggatcaaaagaagaacttgaaaaccttgtcatgttggttgagatgtgggacgagcatcacaaagttgagttctactcagaacaagtagagattatattttcttcaatttatgactcagttaaccaacttggtgaaaaggcttctttggtacaagaccgcagtattaccaaacacctagtagaaatatggttggatttgctaaagtctatgatgacagaggtagagtggcgtttgagcaaatatgtgccaacagagaaggaatacatgataaatgcatctttaacatttggactaggccccattgtattgccagcattatattttgttgggccaaagatctcagagtctattgttaaagatccagaatatgatgaattgttcaaactgatgagcacatgtggtcgcctcttgaatgatgttcagacttttgagagggagtacaacgagggcaagttgaatagtgtttctctcctcgttcttcatggtggctccatgtccatatcagacgccaaaaggaaattacagaagcccatagacacatgcagaagagacctcctaagtttagttcttcgtgaagaaagtgttgttcctaggccctgcaaggaattattttggaaaatgtgcaaggtgtgctacttcttctactcgacgacggatgggtttagctcacaagtggagagggctaaagaagtggatgcggtgatcaatgagccactaaagctacaaggaagtcatacgctggtgtctgatgtgtgaaaggaactaagcgtcgatgtgatgtgttcttttgatttattagtagttgtgttttctctatatggtggtttggtaggtgactgtataatgtaaaggagttggcacatgttgtcagtgtcgtaacatcttcttgatctattcagcgctctcttgggcttgcgttatggcgatgttgttgggtatgatgtagttgataactagtgtagactcatgtacatgataatacttcatgttacactaacatgcgcacgtgtggctatatggttgaagctca

SEQ ID NO: 17302 - DNA, 3761 bp, Zea Mays
accacaagcagcagcacagcgcagcgcaacgcaggtatggaaagacgaaaaggaaaacaaatcatttcacggtgctaggatttggtattttctatatttcctcaagttaagcaagagtggtatctggtggttttgtttttcaaaagaagacagaaatgtcttccttgaggcctgcccagtcttctagttcatccagcaggactcggcagagctcccaggcacggatactagcacaaacaacccttgatgctgaactcaatgcagagtatgaagaatctggtgattcctttgattactccaagttggttgaagcacaacggagcactccacctgagcagcaagggcgatcgggaaaggtcatagcctacttgcagcatattcaaagaggaaagctaatccaaccattcggttgcttgttggcccttgacgagaagagcttcagggtcattgcattcagtgagaatgcacctgaaatgcttacaacggtcagccatgctgtgccgaacgttgatgatcccccaaagctaggaattggtaccaatgtgcgctcccttttcactgaccctggtgctacagcactgcagaaggcactaggatttgctgatgtttctttgctgaatcctatcctagttcaatgcaagacctcaggcaagccattctatgccattgttcatagggcaactggttgtctggtggtagattttgagcctgtgaagcctacagaatttcctgccactgctgctggggctttgcagtcttacaagcttgctgccaaggcaatctctaagattcaatcgctaccaggtggaagcatgcaggccttatgcaataccgtggttaaggaagtcttcgaccttacaggttatgacagggttatggcttacaagttccatgaagatgagcatggggaggtctttgctgagatcaccaaacctggtattgagccctatctaggcctgcactatccggccactgatatccctcaagctgccaggtttctcttcatgaagaacaaagtcaggatgatctgtgattgccgtgcaagatcggtgaagattattgaagatgaggcgctctccattgatattagcttgtgtggttcaactcttagagcaccacatagctgtcaccttcagtatatggaaaacatgaactcgatcgcatcccttgtcatggctgttgtggttaatgaaaatgaagacgatgacgaacccgagtctgaacaaccaccacaacagcagaagaggaagaaactgtggggtctcattgtttgccaccacgagagccccagatatgtgccgtttccactgcggtatgcctgtgaattcttggcccaggtgtttgctgtccatgtaaataaggagtttgaattggagaagcagatacgagagaaaagcattctgcgaatgcagacaatgctctctgacatgctattcaaggaatcatctcccttgagtatcgtatccgggagtccaaatatcatggacctcgttaagtgtgatggtgctgctcttttgtatggggacaaagtatggcggcttcaaacggctccaactgagtctcagatacgtgatattgccttctggctttcagaagttcatggggattccactggcttgagcactgatagcctccaggatgctggatatccaggagccgcttcccttggtgacatgatctgtggaatggcagtggctaagatcacgtccaaggacattcttttctggttcaggtcacatacagctgctgaaatcaagtggggaggtgcaaagcatgatccatctgatgaggatgacagcagaaggatgcaccctaggctgtcctttaaggctttcctcgaggttgtcaagatgaagagtttgccatggagtgactacgagatggatgctattcactcgttgcaacttattcttagaggtacactgaacgatgccttgaagccggcccagtcatctggtttagataaccagattggtgatctcaaacttgatgggctcgccgaactgcaagcggtgacaagtgaaatggttcgcctgatggaaacggcaactgttccgatcttggcggtagatggcaacggattggtcaacggatggaaccaaaaggtggcggacttgtcggggttgcgagttgatgaagctataggaagacacatacttacacttgtggaggattcttctgtaccaattgttcagaggatgctatacttagctctgcagggcagagaagagaaggaggttcgatttgagttgaaaacccatggctccaagagggacgatggccctgttatcttggttgtaaatgcttgtgccagccgtgacatgcatgaccatgttgttggggtgtgctttgtagcccaggatatgactgttcataagttggtcatggacaaatttacccgggttgagggggactacagggccatcattcacaacccgaacccgctcattcctccgatatttggcgccgaccagttcggatggtgctctgagtggaacgcagccatgaccaagcttactgggtggcacagagatgaggtgatcgacaggatgctccttggcgaggttttcgacagcagcaatgcttcctgccttctgaagagcaaagacgctttcgtacgtctttgcattatcatcaacagcgcattagctggtgaagaggcagagaaggctccaatcggtttctttgaccgcgatggcaaatatattgagtgccttctgtcagtgaacagaaaagtgaatgcagatggcgtcgtcaccggagtgttctgtttcattcatgttcctagtgatgacctccagcatgcgctacatgtgcagcaagcctctgagcagacagcactgagaaggctgaaggctttctcgtacatgcgacatgccatcgacaaacctctctcaggtatgctctattctagggaaacactcaagggcacagacctggatgaagagcagatgaggcaggttcgtgtcgcggataattgccatcgccagctaaacaagatactcgccgacttagatcaagataacattactgacaagtcgagttgcttggatttggacatggctgagtttgtgctgcaagacgtggtggtgtctgctgtaagtcaagtactgataggttgccagggtaaaggcatcagagttgcttgcaacctgccggagagatccatgaagcaaaaggtttacggggatggtatacggctccagcagatcctctccgacttcttattcgtttcggtgaaattctctcctgctggtggctctgttgatatctcttccaaactgaccaagaacagcattggcgaaaaccttcatctcatagacttcgaacttaggatcaagcaccaaggagcaggagtcccagcagaaatactgtcacagatgtatggggaggacaatagagaacagtcggaggagggcttgagcctccttgtttctagaaaccttctgaggctcatgaatggcgacattcgtcacctcagggaagctggcatgtcaaccttcatcctcactgctgaactcgctgctgctccttcagcagctggacattgaagccgtcactgcaaacaagtgccaaatgctgcccagctccctcagagttcattcggaaagcaacggtggttcgcggagaatgggaaatgctgcagcctgtaggatcaccgaatgcataagaaataagattgacttgtatggttgtttgttaggcggggaagttgtgcaggcataagttctctgaacttcagtttgccgagaggcttcgtg

SEQ ID NO: 17303 - DNA, 80 bp, Zea Mays
cctttggcacaaggtgtggtgactgttgttgcctttgcagattgcttggatcttgagtctgttataatggataatactgc

SEQ ID NO: 17304 - DNA, 1460 bp, Zea Mays
gagagaaaaaagtacaatatgctaatatgatattcaaaggttcttcagcccacttgggatggttcccgtggttgcactggtggggcttggacttttcgagagaggattcccagtggttgggaaatgcgtggagattggtcttccaatgcttatcctatttgtcgcgctttcccagtatctcaagcacgtgcatattcgtcatgttcctgttttcgagaggttctcattgctgatgtgcatcactcttgtatgggtatatgcccacatcctcacagcaagtggtgcatacaagcacacagcacttgtcacccagatcaactgtcggacagaccgtgccaatctcatatcttcatcacaatggataagcattccataccctttacaatggggtgcaccaacattcagtgcagaccatgcatttggtatgatggcagcggtgatggtttctttaatagagaccacgggagcattcaaagctgctgcacgattggctagtgcgacacccccaccagcatatgtcctgagcagaggcattgggtggcagggcattggcaccctactagatggcctgtttggcactgggactggttctactgtttctgttgagaacgttggtctcctaggatcaacgagggttggtagcagaagagtgatacaaatttctgctggtttcatgatcttcttctccattcttggaaaatttggagcactttttgcctccattcctttcacaatattcgctgccatttactgcgttatgtttggaattgtcgttcaccaacatgaactcgatgcgcaatctcttcatcatcggtgtctcactcttcctgggtttatctataccagagtacttctctaggtattccacaagttctcaacaaggcccagcgcacacaaaagctggatggttcaatgactacatcaacactagcttctcatcaccacccgccgtcgccctcattgtagcagtactccttgacaacacacttgatgtgagagatgcagcaagggaccgaggaatgccatggtgggcgcggttcaggacattccgtggcgacagcaggaacgaagagttctacactttgcctttcaacctcaacagattctttccaccgacttaagccaaattgccattgagaacacgctgcatgtcaagtggtccactcaagcaagcattgcctaacaatgaggtctgcttctgatagagtagaacaacaaaaggctcgacaaaggaagaactaattccctgttaccaatcgattgtacataaaacaaaactgtttaggttgaccaccggtgtcgaatcagaatgccatattttgatgtaatatgagtttagagatcttatgaacaattttcaagccttatatgcaagctagcttttaaaccgtgttttcatggcttagtggcatggtctggtgtctgatccccaaaaagctatagaaggtatattgcaagaa

SEQ ID NO: 17305 - DNA, 382 bp, Zea Mays
agaagagcccctgtttctctagtaggggtagagagaagaggacgacgctgctgctcgttactgttggaaagggctgctgcatatggataggagcatcatgaactaatggtgaacatcatttgcaaattttacttgaccaaggatcattctatacaacggaggaagatcacgagaagtaaaagtgttgtctaagatgtacattctttggctgtggagtctgtagactatacatatacacccattgttctggcgaggctgtgtacactgtacatcaaatgaattttacgatacttcttgttgcgttttacgctacaattatctcaaatcacttgttgtattgtacactacattttttgcctcgcatggaaacttaactactgga

SEQ ID NO: 17306 - DNA, 1767 bp, Zea Mays
cgagctgtcccgcccgtccaacgcctcacgctgcggcacactagccgttgccctccttcgctttttctcctttcaaattcgctcccttccctttcccttccctctcacgctgcctcgccgcatctagctaggctgatatccctgctccaaagaacaaaccaaaaacaaaataaaacccgctctaaatctttccagtactccctctctatctctctcatccttcgaatcccaaggaggaggccagagaggagagagtgtgtgggacactgggactagactagagagacgttgccgttgctggttgttgttattaacgccgccccctgcattcctatgctcctcgttctcccggggctcctccgtccgtaaggcaccgccgccgcgtctcggctggaccgacaggccggccgatccgtctcctcctcctcctcctcctgcgggtcggcttcggggacgatggcggcgagggcggctgatgagaacagaaggccgggggtggggaggcccgcgccatgcgtccgagacatggggagccggcgcgcgctcacggacatcaagaacctcgtcggggttgccccgaacccctgcgccgtcgccaagaagcccgtgctgcagaagagcagaagggacgaaaagaagacagcgttgccaagcagccggccgatgacaaggaaattcgtcgcctccttggcgagcaaagggcaacctgaatgtcagccgaccggagctgatccagaacccggagttgatcaacggaaggaaccaatcggcgatggcatcattgatatcgacgtggaactggacgagccggtcgacgatagtgattgtgacgtcgacatgggtgatgagacagagaacaaggacattatgaaccaagatgaatcgctcatggatattgatagtgcagactcggggaacccgcttgcagcaacagaatatgttgaagagctttacaagttttacagagaaaatgaggctaagagttgtgtaaaccctgattacatgtccagtcagcaagatataaatgcaaagatgagagcaattctgattgactggctgattgaggttcactacaagtttgaactgatggacgagacgctatttcttacggtaaacgtaatagatagattcttggaaaaggaagtggttccaaggaagaagctacaactggttggaatcacagctctgcttcttgcttgcaaatatgaggaggtctcagttccagttgttgaggaccttgtgctcatttctgaccgtgcctacacaaaagggcaaattctagaaatggaaaagttgattctgaacacgctgcaattcaacatgtctgttccaacaccttatgtcttcatgaagaggtttctgaaagcagcagacgcagataaacagcttgagctagtgtcatttttcatgctggagctctgcttggtagagtaccaaatgctgaattataggccttcacatctggctgccgctgcggtttatactgcacaatgtgctattaaccgttgccagcagtggacaaaggtttgcgagtcacatagcagatacactggcgaccaactcctggagtgctcgaggatgatggtagactttcaccagaaggctggaaccggcaagctcactggcgtgcacaggaagtacagtacctacaagttcgggtgcgcggccaagattttgcccgcgcagttcatgctggagttaggagggacagcaccgcctccttcaggaaacaacaaattcagagtctgctggaaacacggacagctc

SEQ ID NO: 17307 - DNA, 361 bp, Zea Mays
gagctacccaggttcctttcgttttgccgagttggtactggcctctctgatgaagagcgtgatgctcttgtcaccaaactgaacccttatttcaggaaaaatgagtaccccaaaaaaccaccaaaattctatgaagttacaaataactcaaaggagagaccagatgtttggattgaaagtcctgataagtcagtcataatatctgtaacaagtgacattcgtacaatcaagtctgaggtatttgctgctccatactgtttgaggttcccccgtattcagcgagtgagatatgacaagccatggcatgagtgccttgatgtgcagggttatatctcgaagatgatttctctataacacgctg

SEQ ID NO: 17308 - DNA, 2766 bp, Zea Mays
gaagtgcttgtttaaagagaagtttattgctgaattactggagaaagctaattcagcgctcaataatgaaatggaggtgaagatagaaggatcaaaatgtccctgcttcactgaatccggtgacatggatgatggtatatcacggaaatcatcttgcagggagaattcctgtgataactacatatattgcccaaccgctacagatgtccaaaatggaagtttagaccatttccaggagcattggttgaagggtgaacctgtaattgtccgtgatacacttgcgttgacttctggattaagctgggaaccgatggttatgtggcgtgccttacgagaaaagaaagagaaagttgagaggctctcagttcttgctcttgaatgcttgggttggtgtgaggtcgatgtaaatattcatatgttttttgcggggtattcaagtgggcttgttggtccagacgatttgcccctgttgcttaagcttaaagattggccaccacatagttcttttgaggagcggctcccaaggcatggtgcagagtttatgtctgcattgccatttcgtgaatacactgatcctaaatggggacctcttaatctggcagtaaagcttcccgataatgttaataagccagaccttggtccaaagacttatattgcatacggtgtttccaaagagttgggaattggtgattctgtcaccaagcttcactgtgatatgtctgatgcggtcaatatcctcacacatactgatgaaataaaactcaaagcaaaaaggattgccgcggtggaaaagaagaagcggtgtttaggaatgaagattctatctaccaaggaagcaagtggaggccttcaacggtgtgcagattattttggtatgccaacagctcccagtgaatctaacaaggagccaaggcctgaagagtgtgtaaatgaactgggcattaaacaaccagtacagcatgttgcttccgaggagcaggaaggagttcaagatgatgccaaggcagatgcaaatgttatgaatgtttcttttggtaagggaaaatcagaagattcttttggtacaattaatggtaccaacagtggagataaaatagaatctcctagtggtttagcagaaagaacattgactcagcctaccactaagggttgcagtaagcagcgtggccgtagttctaatggtagaggaaacaggactaaaaaaatagaagaggggaatgcgtctggactaattgctgtggctcccgagtcagaagatgatgatgatgatgccgcatttatagatggaaaccaagcagagggtggtgcactgtgggatatttttcgacgggaagatgtgagcaaactgcatgattatctaatgaagcatgcacatgagtttagacattgcaactttgagccagtgaagttactcatcctatacatgatcagtgtttttatctaacaattgagcacaagagaaagcttaaggaagaatatggagtcgagccttggacatttgaacagaagctaggtgaggcagtatttatcccggcaggatgtccccaccaggttagaaatttgaagtcttgcataaaggttgcactagattttgtttctccggaaaatgtccgagagtgcatcaggttaacagaaggtttccgtctgctgccgaagtggcataaggtgaatgaagataaactggaggttaagaagatagctcttcatgcattcaatcaagctattaaagatatcactgatgaatcatctaatagcaatgaaagcaaatggatccggagataatgaggatcatgaaggccattgaatccatgcttgatgtcatggaagttagcaccacccgcattcgacatcttgctatcgagaacctgaatgaaaaccgtagtggcttatcggatgccgacaagataacaaaacctgattttagtgtactatgcatgatattagtaccttatataatacgtagcttggagaaaaggccattcaccgtttctcattgttgggaggttctaaagaatgaagccaaatggttacacttggagcagggctcacaaaatattgatgtgctggtgaacaaaggtgtagggttttctccaagatgtcggatttgacactgaagaagattgagtattggaagaggtccgattgaacatttggcactgacattcaccaacttgttcaaatagaggaaaagaatatggaaatggagaaagagcgcatgtatgcatgtgtaggtcagggagtggctcggatcagccttgagtcaatttccactgcgttttcttcggttatggatgagcacgaggagtaaaagaaacagaagaaggctgagtgtgattctcatatgcttattttcttgtcctgtgtaatggatgtgtgtatgtgaaccatatgcgaacttaaacgtctttgtttgtaccggtcaggccattctgagtgagggttccgtctcttctttttaggactccactgcgaggtgtcggtgtgtgagaaatggtgcaaacgtgtgtatgaaactctacgaggcatactcttatctagtattgtgtctagtgaagaatgggacacatccgatgctactgtaaactcacttgttgcactcactttttgagttggatttttctttcaaacttttttgtatgctctcttgagtttatctaacactagatttcataagtgtgcaccattgtccataactagactcacttaggtaaagctatccattccatgtcctctttataatgtgacataaataaggattttatcact

SEQ ID NO: 17309 - DNA, 3594 bp, Zea Mays
cttgtagagttgaatctgcttcaaacaaataactacaaacctttaaataatattcaaggctgcaatgaatttgagctgtgcaattcacttgcagattatcgaagtgatttaatgataaccggtattatcacaaaggatattgagtctactgttttggctttggaactgaagcaacacaaactacagctgcaagagcaacgagttatgtttaccgatgtccttgaagaattgatggcactggcagaagcaactctatggaaagtgaaccagcatttggagaatattgcaatctgcactttacatgaggagaacaatgaggcaagggttgatttggagaacctgaagcaaaattgtgaagaaattatgaaaaaattgcatgccatgaacgaggaaaacacaacacttaaatgtttaatgtcctccttccaaacaaatttggatgcaaaaaacaaagctttgatggagttggaatgctctcatgcaaccatatgtacggagctggaactgacaattgatgccatgaatcgcagaagtactagagaaaattatttcatttctgaaaatgaaacgttgaagcaggaaattcggaatattttgtgcaaggatcagtgcatggttgaattaatggataacattgaagcagataagttattttccaccattgaaggtcgcttgcaattggttactgatcatgtgcacaattacattactgagcaaataaacacgatgagcaagttatccaatgacttagacattatcgaagtatcagcccaggagttaagcacacagaattcacttctcaagtccgaattaatcagaaaagaggaattaacaaagggcttatcatttgatcttagcctgttacaagagtctgcatctgtagcgaaagatcaagcagctgagattacagggttgagaaaagtaataaaatctttggaactagagcttgcatctaagtcgcttgaacttgatgatgttgtttctgataggcaacaattggaagcaatgattttgaagtgtaatcaaaatgttgctgccctagaggaggagctgggaaagaagattgatgaattaaacatagtttctatggagaatgctgaactaaaatcgcagatccagcatattgaagagattagttgcactatggaggagttagctgataaaagtgaagtaattagaagacttgaagaaaagttgattgaatcaagaactttaattgatgaaaggagtgtctgtcttcagagcttgcaaaatgatttctccaaactctcagatgaaaagacatcatgtgacactgagttgcttatcttgaaagagaagctggagatggctcaggcacttgcagaagaaagtgaagcaattgctacagaatctcggcagatagctgaggagcataaggcatatgccgaagggaaggatgaagaagtaaaggtattggagaggtcaattgaagaacttgagaatactgtatgcgttttagaaagcaaagtggaaattgtcaaggaagaagcagagcggcaaagaatgcagcgagaagaactagaagtggagctgcagaaagttaggcaacaaatgctagctgtaccaccctctgggaaagcaaggagatatatggaagatggaatgattgatttagctgactcatccaggcacccagtagatatgcacaatgagctcctcagtgctcaagagactattagaatacttagaaaggaggtttctgagaaggaatcagagattgctcagtgcaatgcacatatctcagaactaaacattcatgctgaggcagcggcacaagaatacaagcacaagttgatggagctggagactatggcacaacaggttaagacagacaattccacagcacatgcttgctctgggagacaagagaagattaactcaaaacctcggggctcaggttctccatttaaatgtatcggcatcggctttgtgcaacagatgaattctgagaaagatgaagagcttagtgctgcaaaacaacgtattgtggaactagagggcatagcagctagtagacaaagggagatattcatgttgaatgcgaaactagcaacaacagagagcatgacgcacgatgtgattcgagatatgcttggggttaaaatgaacatgacaacctgggcggctctagctgacaaccagcaaaagctggagacaaaagagcccatcacttctcaagcacaggaaatcaaagactccaatgagctgatgaatttgaagcggcagcttgatgaattcattgaagagagacagagctggcttgacgaaataaaccagaagcaatcagagcttggagctgcccgcattactatagagaagttacgacaacgggaacactttatggtagctgaaatagagttgctaaaggctgagaattcaaactacaaaaccatcatccttaaccttgaagccgaagtgaagaaccttaccagacaacagaacctccagctccgaataaatcaccacgttaaaacgaaggaagagaacatcctgctgaagaggcagaacgaagagctaagtgcaaagctgaaacagctggggggcatccttacccgtacgaaggaagagctcgcccgctacagggtttcaaatggaagagatccgcacgaactgatcgaggaggaggagcttctgaggaagaaactagacgagagcgaacgagatagaagccagctggcggaaaacctatcaagcctatgctccagcattctgaaggtcgctggagtttcggactcagaatctgacgctactcttttgaaagcatcggagtgcttggatcagctccagtgccgtatcgcttctttggaaggccaagttgaggatctaaatctaaagtgcaaactagtgcgtgaaaaggcccgcctgtgcgagctccggagcaactcgtcgtctctgcgcacaggggcgaagggcaatctgacatcgcccagtccggacacatcgccaagcatttcgtccttccgatgacacaagcggacggatacatcgccgagaagctagtgtacattagtacgtacataacacattccgtgtaactattctagtgcagccgggctgcttagggaggattagttcagtccaacaatctccctttgctgattttatatatatctgctgtacaatatatataccgtgtgtgtacttgatgcagttccattcaacacttgtcttctctcttcgtctgtcgttttctttcttctaatgtacagcaggacttaaaaattggaatacacatgcaatcaaagcagtgccatgtttatgcagttcttttaggggtgtttggtttgaagaatcaatctgctatagatggggtggtgtaatacccaaagatttgagaaataaagtaaccctttagacaaagtgtttgagcgattttgtttattttttagcatctcaacaaatacaaggcctgaataaagcaattaataaataattaaataaaacaaatatgtattcatgctgataatcttggctgttgcatttatatgtgaacggttaaactgggatttgaatttggaattggatatttaaactagaacaaaaataggaaatagaaacaaggaaagaaaaaaa

SEQ ID NO: 17310 - DNA, 1508 bp, Zea Mays
cgggattggataagagttggccaataagattatgcaaaggaggtgaactgctggacagaattttggctagaggtggcaaatattctgagggcgatgctaaggttattattcaccaaattctaagtgttgcttcattttgtcatcttcagggtgttgttcaccgggatctgaaaccagagaattttcttttcatgtcaaaggatgagaattctgccttgaaagtcatagactttggtttgtctgactttgttaaaccagatgacagacttaatgacattgttggaagtgcatattatgttgctcctgaagttctccatcgatcttatggcacagaggctgatatgtggagcattggagtaattgcatatattttgctttgtggaagccgccctttctgggcacgaactgagtcaggaatttttcgagctgtcctaaaagcagagcctagttttgatgaaattccatggcctaccctttctgctgaggcgaaagactttgtaagaaggctactcaataaggattaccgtaagcggatgactgctgcacaagccctctgccatccatggatccgtggcacacaggaagttaagattaatctagacatgataatctacaggcttatgagggcttacataagttcatcttctctacggaaatctgcattgagggctcttgcaaaggcactgacgacagatcaactcttctacctaagagagcagtttacattattaggtccaaacaagagtggccatatatcattgcaaaatatgaagacggccttgattaaaaattcctcgggtgcaatgaatgattctaggattcttgactttgttaactcaatatgcaatatccaatatggcatgattgattttgaagagttctctgctgcggccattagtgtatatcaaatggagggcctggagacctgggaagaacatgctcaacaagcatatgaattgtttgacaaggagggcaaccgaccaattgtgattgaagaacttgcatcggaacttggacttggcccttcgatctcacttcatgttgttctcaaagattggatcagacattcagatggaaacctcagtttcctcgggttcataaaactactgcatggagtttcttcacgcgcaatcaccaaagtataagataaccatttgcatcgagcaatccctgatctctggctagtgcatgccatggctggttgtagaagttgcatgaaaccaatacaaagattaacagatcatcttagcgcaataggtactctcagtaggtgtatatttgccctgcttttcgcaacatggatcgacattgtcctcaagatgttgagaggaatgtacagatttgatttgggaagaatggaaaccctgaaggatttgaggctgttattttgtttgttagttccagtaatgcaggcattgccttcatttgtgttgtgcacctatgccgcttaatgctccatttacatatgctattgttgcatttattatataaatattctagaatgagag

SEQ ID NO: 17311 - DNA, 6440 bp, Zea Mays
actagggttacttaacactttgtattttacgcctcgtttccccctccttccattaaaaaaaaaacacacccagacaccctccccccaactccacccgcttccttcgcttcccttcacccccactccaccaaaccctcacgtcgctgggactgggcagcgcagagcagagtagcagacagagcacagcggagcagaaggtggcgagtggaagcaaatggggaatgagtggcggcaaatgggcaatgagtggcggcggcggtagtagctagcatagcatcctcctcgccttttcttctccccgccctctcgcgctctggttgttgcagccagtgggagcgagaggactcgtgctgcctccgtcgcttctccggcacgcctccctcgcccggatctgcgccgctcgcgtgggatcctgagctccgggttggagagctctcgcgttccgggtcaggtgacggtgatggagcccgcggtggctacggcgggtgaagggcagcggttcaagcggatttcgcggcaggcgtggtcggggaacctggaactggatcctttgcttaatgaaagcttagatcagtggccacatctaaatgatctggtacagtgctacaaggctgattttgtgaaggatgactgcaaatatggacgctatgagagtgttgcaccaccatctttccaaaatcaaattttcgagggacctgatacagacatagaaacagaattgcagctttgcaacgcaagacatttcaagcctgaagatcctaccgaagatgatatgccaagcacctcagggaggcaaatgtatgaaaccgaatcatctgcttcatcttcaaaagtgcactgtagtctgtcaccactgccagcatatgagcctgcatttgattgggagaatgagaggtctttgatatttggccaaagggtgccagaaagtataccagcaataagcaacagtggcttgaagataactgtcaaggtactatctttgtcattccaagctggattagttggtgagcaaaactagaatattttagatagaagagaaaaactgtcagaagacttctactttcacatacttccaacagatatgcaggatgctcagggttctttggatcgtcgaggcgttttttcattggacacaccttcaccatcagtctgccttttgattcaattggaaaaggctgctactgaagaagggggagtaacaccttctgtttattctcgtaaagagcctgtgcacttagctgagaaagagaagcaaaagctgcaagtatggtctcgaattatgccttgtaaagagtcatttgcatgggccatgattcctctgtttgaaggtaaccatgcgggtggtcttagtgatgctgcttctcctagcagtcctttagcaacaagtttaccaggatcaacttctcaagatagtattgtggaccctattttaaagcttactttagatggaaaagtaaaccattactcgagtggaagctcagttattgtagagatatcaaacctaaacaaagtgaaggaaagctatatagtggactccctccaagatccaaaacggaaagtacataaaccagtgaaaggtgtattgagattagaagtggaaaaacttcatggtggccacaatgatgtggataacacttctgaaggcggaagcatggccaatgatttgaatgatgctggtgacatcaataatggcagaagcaacagaagtagctttgatgggattcacagttttgtgaattctattgccattgcccagaaagatgctcatcacaatggaatcatttctaatgctgagaatggtgacaattttgaagcttttgactttcggatgctgacccgaagtgagccgttttcacaactttttcattgcctctatgtgtacccattgactgttagcttgagccgcaaaagaaacctgtttgttagagtggaactgagaaaggacgattctgacatccgaaagcctccattagaggctgttcatcctagggagcggaatatgatgctacagaagtggggccatacacagattgctgttggaacaagaatggcttcctaccatgatgaagttaaaatcagcctacctgctcttttgacaccccagcatcatcttgtgttcacatttttccatgtagatcttcaaatgaaacttgaagcaccaaaaccagtgatcgttgggcattctgtacttccactgtcgacacatattcagttactttcagatgtatccttgccaattttgagagagctcgttccacattacctgcagggaagtggaaaggagagaatggactatctggaagatggaaaaactgttttcaagttgcgtttaaggctctgttcttcattgttcccggttaatgaaaggataagagacttttttgttgaatatgaccgccatactctacatacaagtcccccatggggttctgagcttcttgaggccataaatagtttgaaaaacgttgaatctactgcattattacaatttctgcaaccaatacttaacatgctgcttcatcttattggcgatggcggtgagacccttcaggttgctgcgtttcgagccatggttaacattttaacccgtgtgcagcaggagtcatcagatggggctgagagaaatagattccttattaattatgttgattttgcttttgatgacttcggcggtcggcaagcacctgtgtatcctggtctgtctactgtttggggaagtcttgctaggagtaaggcgaaaggttatagagttggtcctgtgtatgatgatgtgttggcaatggcttggttttttctggagcttattgtaaaatcaatgggattggaacaaagtcgtctcttctaccacaaccttccattaggtgaagatgtcccaccgctacaattgaaagaaggtgtcttcaggtgcatcatgcagctctttgattgccttctaactgaggttcatgaacgctgtaaaaagggtttaagcttggcaaaacgcttgaacagcacgcttgctttcttttgctatgatcttttatcaataattgagcctcgccaagtttttgagctggtttcgttgtacatggacaagtttgcaggagtttgtcaagcagtccttcatgactgcaaattgacattcctgcagataatatgcgaccatgatctattcgttgagatgcctgggcgggatccctctgatagaaactatctctcgtcagttcttattcaagagatctttctgaccttagaccatgatgatttgtctcaacgagcgaaggctgctcggattctggttgtccttatatgcaaacatgaatttgatgcacgctatcaaaaaagtgaagacaagctgtacattgctcagctgtacttctctcttatagggcagatccttgatgagatgcctgttttctataatctgaatgccatcgaaaagcgtgaagtgctagttgtcattttgcaaattgtaaggaacttggatgatgcaactcttatcaaagcatggcaacaaagcattgctagaaccagattgttcttcaagcttcttgaagaatgtataacccattttgagcacaacaaaacaggaggcagcatgctacttggtgctagttctcggagcccagatgttgagcgccctgcacccccaaagtactctgagcgattatccccatcagtcaatgcatatttgtcggaggcttcaaggcatgaaataaggcctcagggaacaccagaaaatgggtacatgtggaacagggttagccctcaattaagttcccctaatcaaccctattcattgagggaagcacttgctcaagcacaatcttcaagaattgggtcaaccgccagggcattgagagagtctctgcatccagtactgagacaaaaattggaactttgggaagaaaatctcagtactgctgtgagcctcgaagtgttgagaataaccgagaagttttcagctgctgcaggcactagaagcatcactactgattatgcgaagctagattgtgtaacatctatcgtaatgggtcttttatctaggagccaacccttggcattttggaaggctttccttcctgtggtctacaacatatttaatcttcatggtgcaacactaatggcaagggagaatgaccgcttcttgaagcaaattgcttttcatcttttgcggcttgctgtttttcgaaatgattctattaggaaaagagctgttgttgggttgcagattctcgttaggaacgcattcaactatttcaagaacactacaaggttgagagtcatgttgacaattactttgtcagagttgttgtctgatgtgcaagtgactcaaatgaaatccgatggttctcttgaagaaagtggtgaagctcggcgccttagaaaatcactggaggaaatggctgatgtaagaagcaaggatctgttgaaagattgtggcctccctgttactgcattggaggcggcccctgatggttcctctgataatatgtggtcttgggcagaggtgaaacatctctctaaatgtctagtccaggcccttgatgctggtctggaacacgccctcttggattctgtagtgactgtagacaggtatgcagctgctgagggtttctataaactagctatggcctatgcgcccgttccagatcttcacattatgtggttgcagcatttgtgtgatgcacaccaggagatgcaatcatgggctgaagcagcacaatgtgcagttgctgcagctggcgtgatcatgcaggcacttgttggaaggaatgatgctgtgtggagcaaggagcatgttacttcgctacacaagatttgccctatcgtcaacactgatgtgagtgcagaagcatctgcagctgaagttgagggatatggtgcatccaaattaacagtggactcagcggttaaatatcttcaacttgccaataaactcttcacacaagctgaactttatcatttttgtgcaagcattcaggaactcataattcctgtgtataaaagcagaagggcttatggacagctggccaaatgtcatacatcactcacaaacatctatgagtcaattcttgaacaggaggcaagtcctataccattcattgatgccacatactaccgagttggtttctatggtgagcgtttcggcaagctcaataaaaaggagtatgtatttagagaaccacgagatgtacgtcttggtgatattatggagaagcttagtcatatatatgaggttaaaatggatgggagtcacactttacatataattccagattctagacaagtcaatgctgatgagttgcagcctggcgtctgctatttacagatcactgctgttgatcctgtaatggaggatgaggacttgggtagcaggagggaaaggattttttctttatctactggtactgtacgtgcacgtgtttttgaccgttttcttttcgatacaccattcacaaaaaatggaaaaacacaaggtggtctagaagaccagtggaagaggcgtactgtgctccagacagagggttcctttcctgctttggtgaaccgtctgccagtcaccaaatctgaatctctggagttctctcctgtcgagaatgcgattggaatgatcgaaacaagaacagctgcattgagaaatgaactagaagaaccacggagttctgaaggtgatcaactcccaaggcttcaaagcttgcaaaggatactccaaggaagtgtggctgtgcaggtcaacagtggggtattaagtgtgtgcactgcattcttatctggcgagccagcaactaggctcagatcccaagaactgcagcagctcatcgccgcattgcttgaattcatggctgtctgcaagcgtgcaatccgtgtgcatttcagattgataggggaagaagaccaggaattccacacccaacttgtcaatgggttccagtcactcaccgctgagctatctcattatatccctgctatactctccgagctatgatagaactgtaacaagccagaaattaggtagcatgtgaatgattcattctttcagttgcaggttcccaccaaatgtccatatttccattagttttggttgtatagttgcaccgattcctgattttggagtgtaaagtttgtataacctagtgttatctgttatgcaccagttatatgctgagtgccatgttttttgcggtttgctactgtatcacagcgagccgacattttacaacagttatatgtaatgttctgtagtgatacaatagtgcctattctgggtgatatgtatttttttccctgtaggaaatttgctgctgtcgagggcatcctcgcaatttgtttatgcacgatttgaagccttgtgttattgaagtcgttcccataactgtagtttgtttattgttcctagtgtataatgacgccttaaattgctcatgttccatggttgaacaagatttggaacatttcaa

SEQ ID NO: 17312 - DNA, 386 bp, Zea Mays
gtccagtacttctcctcccgtatggtttagatcttgttgagtttaaatctgtcagttcctgtgttgatattattaaccattcagataccccagctccgcctagacgcgaatcctccgccactatggtggcagcggtgtccctgccgagccaagcacaggccgtgcttcggagccggctctgcgacccggtcttcatccactccgccctcagtagctccctggacactaattacagcaagctgaagtacctcgtcgccagctcggtctccgaggcctgcaacaattctgtcctcctcttgggtccccgcgggtgtggaaaagcagcggtggtcgacatggttcttgatgatctgaaggaggagcacccagatgcgatttccgtggta

SEQ ID NO: 17313 - DNA, 1382 bp, Zea Mays
aaatattattcaaaattaagatgctttcactttttaaaaaaataaaataacttgtagtttgaaacaggccggaaagtatttgcgtagcacacgcgatattctcctctgatctcctcctattccccacatattgcaagtggcatgcacgagtggtgggggaacccctgctggactgaatcttgagcgatgggcgatctatagtgctgcttttgcttgacgccagcagtagcaccatacaacaaggatcatgcgcggacctagcttatcatcatacacggcgcgaggcatggcatggcatggcatgggggaggtcgatctcacgcatcaaccaagcctgcaactagcaaaagaaaaaggaaaaaaaaaaagaggatgccaatgcatgcctaccgatcgacgatatccctctctaggcacccgtggtcctcgaattaattggatatgcctgcaattacttgaaccgtgttgcgtgcagcatagtattgcaaagcatagtattgcatatatccgccttaattattcacgggatctccaagattgggggccgtgtcgctcacacatgcattgccacaccggagaggtcgagattgtgccgccgtcccttctttctaatcattgttaccgacacctgatcgccacataattgttcggtcgttcgtagtgggacgttgccagcccaccaacgtccgtaccagcatgcagatgcgcgggaaaaagagtacaatctgcgcaaacgtgaatttcagttaggtgcgtcgtgtgattggcaggtacgtactaccccgcctacctacgctacgccacgttggcgatttcttcatgcacgagcagcacgacgactggacgtgccacctgcagcgccgtcgaaccgaacaacctcgcgtcgctcgtcgtccaaacatgcatgcaaaaaagagaaaagagcctgcgaccgacctgccaatctgcgatgcgaggcacgcacgtttcccaggcgaggaggaccacacgttacctaaggcgacaggccatgcatggggttggttcgcgtctgtctgtctgtgtggctcgtcggcgcgcacgttgtccgcgcaccgctcggcggcgcccgtgccccgtaccagtggcaggcagtgtgtgcccactgccccagtgggcggaacggagccgggagccgggagccgggcgccggccggcggatggcgatccgcgcgatgaaaatgccgcgccggtccgtgtgcctcgctcgcgctctcgttacccgccgcaggccactactttgctggtcaagtggtcctcctccgtcctttccgatctcctcctttccttccctgcctcttcttttttcggcgcgcgggagatccgcctgggccacccacgaccacgagtgtcatcgcggctac

SEQ ID NO: 17314 - DNA, 1656 bp, Zea Mays
ggttctgttgctgcatattagcaggccctaccttctgcgtgatgcttacgacgacatgatgcttgatggcgtgaagcctgagcgggaaacgttccacacactcatagtcggtaccatgaaaggcagccggctacaagatgcgctttacttccgtgatcagatgaaagaaatgggtttgaagcctgatgttaacctttacaacttcttgatctccacttgtggaaaatgcaagaactcagatgcagcaatcatgcttttagaagaaatgaaggcacatgatgttaagttgaaaggagaaacctacatttgtctactgaatgcacttgcatcaacagggcaaactgatcaagtttatgccatagttagtgatatgagtgctgctggacttggattaaacaagttttgttatgctggattgataactgcattcaagaacaagacaccaaccgctgaggaaactatggcgaagattcttgacttcgtcgggcagtcgaaaggttggcaatatgttgaaagagtatcaaaggacattgctgagaatataatgatgaatgtgtcagaggaagaactgtacaacctcccaacagcagaatatgtaaataggcgaggaggatttgtctttaaacaacatacagtttatcatgttgctctccaagcttgtgcagaattgcgaagcaaagagacacttgaagcacttctggaaatgttcaataaggataatagagatggatctacttatgatgcctacatggtgatgcaagctatgaggtgttacctacgatgtggagatattgattctgctgttaagatgtttgaagagtattcaagctcgaggtccccacccgctgagttgtatgcgacacttgctgagggagctatgattgggtacactccaagaggaatgcaacttgctcaagaaactatagagaagatgacttcaagaaattttttcttgaatgccaagatgggaactgatctcctacttgcagctgccggtgaaacggctggtggatatacgactgcaaattatgtctgggatctcctgcaaagccgtaaaatcactccaacacttcctgctgttgaggcataccacaagggtctgacggcgcgagagattccttctgacgatccacgacttctcaatgttacccgtgttttggacaacctgaagctccgatttggaccaagaagaaacactcagtaacttagaaacaatattgtccctgatacgatgcaatcagtaatttgtctttgttaggtttctggatgcgaaggcatgtttacagtccgaaaaaccaaggaagttcatcaggatgacgtaaagcagaaccaccaggcatttgaggggcatggcaggtgtgggaatcaaggtccggaaacggaagccagttgtttccagggttttctcgagaaatcttcacctgccaagcctgaagacctgaactcggatgcactgggttttgatttgaaatttaatgtatcctatgttgcctaccattgtttgacaaccatttatccgaacttttgatctagaagacagcgggaatatagttgtgcgcgagtcaagctgtaggtcgttcgttttgacgcttcctctatgtactatctattagtactagtctaatacccgtgtaatgatattgattagatgactaa

SEQ ID NO: 17315 - DNA, 1446 bp, Zea Mays
cgattttttctgtaataaagtccatgagttcatccaaaaacaacacaatacaaagatgtctaacctccgagactggttggacctatcacttaatcatgctgtgccatcttcacttctcatactttcaagagcctttactgtgtctgggagaatgaagccagaggaggctgttgtagcaacactatcttctttaccagacgaagttgtggatacaattgggacagtattgccatctgaagattcagtttctgaaaggaggagaaaattagaattccttgagatgcaggaagaacttatcaaggaggaagagaaaaagaaagagaaagaagaaaaggcaaaacaaaagaaagaagaggcaaagatgaaggaaccagaaactgctgaagaagatttagctttgaaggaaatgactgatgctactgctagggaagaactgagaaaagcaaaagaacatgacaaagagaagctctgtaatatcagccgtgccttggctgtgctcgcatctgcatcttctgttagcaaggagcgtcaagagtttctgagcctcgtcaataaagagatagagctatataactccatgctcaaaaaagagggtactgaaggtgaagaagcagctaaaaaagcatatatagccgctagggaagacccagacaatgatgctgaggctgctgcagaagaaaaggtctcgtcggcgttgattgagaaggttgatgctatgcttcaagaattagaaaaggagattgatgatgtggatgcacaaattggaaaccgttggcagctgcttgatagggaccacgatggcaaggtgactcctgaggaggtggccgcagctgctgcctatctgaaggacaccatcgggaaggaaggcgtgcaagagctcatcaccaacctttcgaaggacacagaaggaaagatcctcgtggaagatatcgtgaggctagcatcgcaaacagaggaacacaacgacgacgaagagcaatcacggcagtaggtggaaacagcccgagtatctagatgggtggcctattatttcaggaagaaaactaccaacctctcagttacttgatggctgtgcctggttaatcagaaggcagtacaggcgtttttggtgcccctagtcagagaccccggtagaataactcgttgctgtaaagatggtgtgactgtgacatgcatacaagtgatagggtactctacagagttgtggttcggcaggtagttcgcaaccgaaattttgactggttgctgtgaaagtggaaatacagttcggttttgtcttaaagctaccctcaattctaaaaaaattgtcttctcttgagtctaaaagtagacgggtgactaatgtggaaatgaattaggatgtttatgtactccccctgtttaaattatagagcattttaactttttggagattcagtatcttaaatttgaccagatctatctcca

SEQ ID NO: 17316 - DNA, 405 bp, Zea Mays
ctggcacaagctaagaaaaatcttgctcaagggagaaggtgatgatggtgacatcgagtccgtggaatttccaaagtgtgtggtggcaagtaattgcacatggtcacatactcacatggaggagatggaggagagggagagataggacccgagagaggagacatgagaggcacatggtcaatatattttgttggctgtaattgtaagcctgtaattgttggttgcaaccgttgctaacctggcatattttgttggctccctacaactttgtcctgaactcctgaacctgaagtcctgatctataattgttggctacatcactgcgtgtattttggttctagaactgaaactctgaaagtatgaaattatggattatggaatggaactattatgaactataagtct

SEQ ID NO: 17317 - DNA, 1572 bp, Zea Mays
gcgatcatgcgaaatgccacgaacttcccttcactaggagtggagcaccgcgccgcaggggatgatttggacgggaaggcagaggttcttttggatccaaatactctaagcaaggatgggacggttgctctttcaacatattctatcagcgaggatggaaactacattgcttatgggctaagtgaaagtggtagtgattgggtctctattcatgtgatgagcattactaacaagcagcctatgcctgataaattatcctgggtaaagttctcatctatcagctggacgcatgacgggaaaggttttttctatggtcggtatccagcacctagaggaggggaagtggatgctggaactgagacaaacatcaatcttaatcatcagatatattaccatgttttgggatctgatcagtcagaggatatattgtgctggaaagatcccgaacacccaaagtattcctttggtgcctcagtcactgaagatggaaagtacatcatattgggcatctatgaaggttgtgaccctgtcaacaaattatactattgtgaaatttcttctcttcctcaaggaatagagggctttagagggacacaggatttgcttccgtttgtcaagcttattgacaattttgatgctcaatatcaagttgtggccaatgatggtgatgaatttacatttttgaccaataaaagtgcccctaagaataagctggtaagggtaaatatcaaaaatccagagctgtggactgatgttctctcagagcatgaaaaagatgtgctcgaatcagccgacgccgttaacaataaccaacttttggtgaattatatgtcagatgttaagcatattctgcagataagagaccttagaactggaaactttattcatcagttgcctttggagatcggttctgtttcagagatctcgtgcagacgagaagacaaggaagtatttattggcttcacaagctttctttctccaggcattattttcaggtgtaacttagcatctacaatccctgaaatgaagatgtttcgagaaatttcagttcctggatttgatcgcacaagttttcaagttaagcaggtttttgttcctagcaaggatggaaccaaaattcccatgttcataatgtcgaagaaagatatcgatcttaatggatcgcatccaactttgctatatggttatggaggattcaacataagcataacaccttcatttagtgttggtcgcgttgtgctatgcaagaacatgggctttgttgtctgtgtagcaaacattcggggtggtggagagtacggggaggagtggcacaaagctggagcacttgcaatgaaacaaaattgttttgatgactttgctgcctgtgctgaattcctcatttctaatggttacaccagttccagacgtttatgtattgaaggcggaagcaatggtggtcttctggttgctgcttccattaatcagaggcctgatctctttggatgtgctctcgctcatgttggcgtcatggacatgctccgttttcacaagtttacaattggatcccacatgctgaactgctactaagaa

SEQ ID NO: 17318 - DNA, 3470 bp, Zea Mays
ccaccatctacgccgcgccgcccgccatcctgagccgcccgagatgtaccacgcgatgcggctgcgctgcctcctcctgcaccctccgatgtggagtaattcgagctccctcggcatctctgccagcggcgtcagtagaggttccttcgtcaggaggttcagcgcgctcggggcgccgcggccgcctggtcctgcccgacggctgtgtcggttttacggctccaagggcggcgtcgggagcgctgaggcgaggggcgccgctgcgtccccggcggcggcggggagcagcggcaggtgcttcgagcaggagcacgcgcggctcggggaaagggaccagcaggagtggctgagcggcgagaggtttctcaccggctgcaagcgacgggagtcgacgttcctcaccaggcgggagaggttccgcagagagttcctgcgccgcgtcgtgccgtgggagaaggggtcgctctcgtggcagaatttcccctactacgtcaatgacaatgcgaggcagctgctgagtgagtgtgtggcgtcccacctgcgtcacaagagtgtcacatcagaatatggctcacgtttggaatcctctggagggcggatattgctccaaagttctccaggaactgagctttacagggagagatttgttagagctcttgcacatgagttgcaagtgccgctattggttctggacagcagtgttcttgcaccatatgattatggggaggattactcagaaagtgaggaggaggatgagcatgctgagtcagaggatgaaggttcagaatctgaaatggaagacgatggtgatgaagattggacaagcaacaatggaaaatctggtgaaagtgacgatgaggatgctctcaaatctgtggaagatctgaagaaatctgtggatgacctaaaaaagttggttccttgtactatcgaggaatttgccaagagaattgctggtgctgaagaaagtacggcgtcagaatcttctgaaactcctgagtcaccagaagaagagaaaaggcctttccaaaggggagatagggtgaagtatgttggaacctctgcagtcgttgaagcagatcagaggaaggtgaagcacaaagtcaagatgaaccattggatgaggatcattttggggaaaatacctactcaagatggctcaaggagtgcctatacttttattagtggaaggggtctatcaaatggacagcgtggggaggtatatgaggttaatggggatcaggttgctgtcatatttgatccttctatagagaaatcacacaatgcccatgaagatgtaactaacaaggaggaaaatggatcagcaactgtttactgggttgattctcaggatattgcacatgatcatgataccgaatcagacgattggcatattgcacttgaagcactttgtgaggttttgccatctctacagccaataattgtctactttccagacagttctcaatggttatctagagcagtttcaaaatcagatcgcagagagtttgtgcaaagagttgagaaaatgtttgaccggcttaccggaccggtagtattgatatgtggccagaacttactggcagcagcacccaaggataaggaacaacctgcactgatgttccacaatctctctcgcctgtcttcactgccatccccactgaagcggttggtagggggcctgaagggagaaagatattcaaggtccagtgacatatcaaagctcttcaccaatagtctaactgttcctcttccagaggaagatgaacaactacaactttttaataatcagattgaagaggatagaaaaattatgatttcgaggcataaccttgttaaattgcacaaggtgcttgaggagcatgatctttcttgtgtggagcttttggatgtgaagttggatggtattgttttaacaaaacaaaaagcggagaaggccgttggttgggctagaaaccactatctgtcatcaacaactcttccttctatcaaaggtgacaggttaatcattccccgtgagagtctggatatatcaatcgagaggctgaaggaacagggtataacagctaagaaatcctctcaaaatctgaaggttttggctaaagatgagtatgagcgcaatttcatttctgctgttgtgcctccgaatgaaattggagtgaaatttgacgacatcggtgcacttgaggacgtgaagagaacattggatgagcttgttacacttccaatgaggagacctgaacttttttcgcgtggaaatttgttaaggccctgtaaaggtgttttgctttttgggcctcctgggacaggaaaaacactcttggcaaaagcccttgcaacagaagctggagcaaattttatcagtataactggttctacactcacatcaaagtggtttggagacgcagagaagctcacaaaggcccttttctcctttgcgactcgactagctcctgttatcatatttgtggacgaggttgacagcttacttggtgcaagaggtggtgcatttgagcatgaagcaacaagaaggatgcgcaatgaattcatggcagcttgggatggtctcaggtccaaagagaaccaacggatccttattcttggtgcaacaaatcgtccatttgatctggatgatgctgtgatacggcgtttacctagacggatatatgttgaccttccggatgcgcagaaccgaatgaaaattctaaagattttacttgcgaaggaaaaactagaatctgattttaagttcgatgagcttgcaaatgccacagaaggctattcagggagcgacctaaagaacctatgtgtagctgcagcatataggccagtccatgaactactagaagaagagaaaaagggacgtgtgagtaacgaaaacagttatctgagacccctttgcttggatgattttatccaagcaaaagctaaggttagctcgtctgtttcttatgatgcaacaagtatgaatgaattgagaaaatggaacgagcagtatggggaaggtggcagcaggactaaatcaccatttgggtttggcaactgacactacagtagagatttaccaatactgtatctttgtaacatttaggctgcctcttgttggtagattagggagtcagttccatttttttaccatgagcttatttgaacaacctcgtaatcacctcgtgcaaacaaaaaagaatctagttaaacgccaattttgcctactagttaatggtcggaaataccagtgtagaatcagaaatcggctacacactacaaaataatgtatctgagctactctgggtaagcattaagctttaacaagatgtaaacggcttaagaattttcagttaattcatactagttctcagcatggaattcagtagaactaatttagtattgatagctagtcgatggctggaatcttcaggatgtctcctattgcccagaaactttgttcgtatcaaaagaatggaagagaa

SEQ ID NO: 17319 - DNA, 4344 bp, Zea Mays
atggcctcacccacggtcgcctccccgatccgggcgagccccgtcgacaaccccaccgtcgcgccctcactggcctcctgccgctgcgccttatcgctagatgctcgacatccccatccgcgcgctcgaggcagaggccagggacaccaagatgagcccgaccgcgaccgcctagccatcagctccaaagaagaagccaggggaccgatggacgtcagtgttccgtcgtggtggcccgctagatccatattcagcaagaaagatatctcgccatgccggcccagggccgcagcccgtcaccttcctccccccgcacccgccgtgacagccgcctccccacgcccgcttacccgactggccgcacaagatgcccacagtggcccccatcgcgcccacccgctccccccatccaccgcgacctcagccgccacgccgacgccatccccgtcctctagcgcgttgtcgccgtcgtcacaccgccaaaggtgcctgccccctgctaccgaggtcgacgaccagcagcggcaagctgccgagctcgacgacacgcacgccatgcttggccatatggacgagtccatcgcctgctacgagaaggggctccagatccagatgtccgcgctcgatgagcgcaatccctgcctccctgagacctgcaggtaggtgacaatgtcatcaagggcccctccccctttgtcgcttctcgatctagatctcgcctctccctaaagcacgggttgcacctccccccgtcacccactccttccttggcttctcccgggaaacgaccttcagtctttacaggtatgaggtcttattgtgtgccatcattttcttttgctattcattcccgaatccccactgtgccctccagtgatgatggggtatgagctctgaataacaaacaaggtaaatgtttactcttttgagtagctgaattttgctatgatgtagtaaattatactagtaaattatacttgtactgaatatgaatataagaaaaaaatactgcactaattatttttctacgctctatattgtaaaataataggaatataataaaaagctgacataaaagctaatttacaacatccctttattttactatgttttatgataaataccttgattttccttgtaagttgtatcttttagtgattttcaaagaaactcctatttgcttggtgctttttctgtaagcatatgttgattaaatctttgtgtattctttctgtacactaatttaacttatcattattctgtcatccagtatgttgtcttatttgaatggttcatttccttctttaggtgattgacaaggtttaggaggaaacttccaaaagccggtcaagtatggagtgcttaacatcactttggcaacttatatttttttacatgtttgctttgtttgttaacaacataatttatgggctgacaatgtgatcatgtattctttctggtagtcttcgtgtcactgcttgcagttgcaggggagggatcatggctttcttttattttccatgtgcaatgtttaatttaggtgatgaactccaaagcttatcccattgttttctagcaagagctaagcaatactggatggagaacatttatctttttaataacgagtaaaagcataatggcatgcttgtgtttagttctctgtttgttgaccaatcgctatatttaatcttgattttttttatctataacttgaatttcaaagattcaatattttttattcagacattttctcttctctagatattcttttatgcaaataacgcggttacactagatcagccaacattctgggaaataagctatatggtcagagtaagaggttcaagagttgatagttcaacaactttaactgagagcaaatctacaagaaaaaggaaacaagcaacctggaacctacaactgcaggagcttgcttgaaagtgaacaatcaaggttgtgtgtatatattatgcccgacatttttgaaggatattgcgagggccattgtatctgctggaaaaatcatttcaacttgtcgaacatggtattaggatacgaattggagtggtcaacagaaattctggacagatatgtcaaatttcagaatccacgatggtcctccaagaaataaagatgctcttgatcatctattgagaagtggaatactaattttttgctgcagcgtgatggataaaggtttttgcgtattcttgggtttttttcctttcctttttggctacacacaactctttttaaatatacattcagtaggtggcaatgcctcctatttccctaaaaatatagcgccaaagagttcaaaattgaattctcataatctgctattaggaaaagaggtcaacttctatattttttacatcaggtaatttggctataatacaacggcatgctgaggtcaacttctgtatttttttctgcaagtaacttggctataatacagcggcatgctccattctgaagctggtcaagaaataaatatagcacttgcaatattttccagtagtcaaacctctccattacttcaattctcgttctcatttttgactatgttcttcatgtcagttcaacataataattaagaggtcgcttgcccctgagacggcttcatggtattttatttgttttttacaaagtattttttaagcgctaaacttacagtgcactttctctattcgttttggtgctgcttataagtcttttgtgttttagatccatcgaagatggcgcttaatctcgagagctagggagatgaaatgccttttgtacatgatggaaggaaacaaattacgtacatgtatatgtggatcgaattgactgttgcattctgcctgtatttaagcaacggtttccacccaaaacgtctataatttggtccttcctagatgtgtcaaatgtgtttactgcactgcgtttgcttttgtggcagcgccctaatagttgtttataaagtctgatgttaacaaactattgtcatgctatgtaatatatagtcttaacatgttggtttgttgagtgttcgaatatcagttttatattattatgtcaggtgttattagtgttcaattttttaagttcttgttgtacatcctatcattacatgagacaatgttgtgatgtttacaatattgtgttatgtatgttatatcattttggtattatagtataatttaatttgtatcagtttagttctgtattggttgttgccaaaaaaaattatgagatattaaggtcgataataatgttcgtttttatataatcgttttgcactaatattttgttaatttttttgtataccgttgcaacgcacgggcacctaactagtatgagactatgagtacatcaagtgcattcccttagaactcttgttgtgtaaaaaaatgtgtaacatgtcttggtacagagattaatttggtttgtgttttttagactgcaattatatctgggttctcagccttgccatggttagtcaagcccctctatgattttatcaggtttcaccaaaatactgaatagccttcctatcatccctttctttctgtatatgatatatgcatttaattgcaatgatgtactgttgctatttccgtacacagttgattcaggtggttgattatatggtggttcagagagctcgaggtgaatcacagagtacatatagatctctccactccagtcactatgttgggaatcctcagcctttggaggaatcatgagtgcatacttcagtggttctccagtcacttatggcgtaagatttgtctttggtgttacagcacttttgccactgttccgagtagcagagaaggacaactctggcaaactgtgaagaaaataaaagattttcacaagcggaatcttcagaatctgaataaaggagttcgtgggaatcagttgtaccaaaaactggttcagttttcgtattccaagcatactactggaagttcacactgatcggcgacaaactctcgcccaaggagaagttgaaggaggatcagcgtgaacacccactgaaagagagatggagttgaatgagaaatctgaaaagaatacgcaagaggtagatgagaagttccaaaacacaaacttgtatctcaagaacttagagatggagcttcgggagttacaagtgcttcataagcaatcagatagatctgaaagttttactgtgccaacacatgcacacactggtggtgcctgcatctagctattcagatcaaagcctgacaggtaccatagggcaaagtgaagaagaaacagaagagttgagcaagatcacgctagagaataaggatattcagcttgatatcaatataagagaagaatcta

SEQ ID NO: 17320 - DNA, 898 bp, Zea Mays
ggcaaggaaacaggatctgtcacggaagtgtgttgttctgaaacagtcacaaagagggcctaagaagctgatggaatcctcattcaccgccgctaaggagtttgagcgggatcggagaggagacgcgattcccatttctcagtgatgtcgatgtcctgtactcctgtatatttggattcaacaatatgccattagtatgctgtcaagcgtcctatttgcaagagataaatggcttacgcccgaggggcttattcttccttatcatgtgcattggtgccacaacactggatgagtataggaagcatatagagaaagatcctgccttggaaagaaggtttcaaccagttaaggttccagagcctactatggatgaaacaatacagatcttaagaggacttcgtgagagatatgaacttcatcacaaactgagatacacagatgatgctttaattgctgctgcacagctgtcttatcagtatatcagcgatcgttttctgcctgacaaagccattgacttgattgatgaagctggatctcgtgttaggctgaggcatgcgcagctccctgatgaagccaaagagctggacaaagagctgcggcagataagcaagcagaaaaatgaggctgtacgtggccaagattttgagaaggtatactgttgtttggcacagcggtgacaaagccgatccgctcccacctctctagcaacgtcgatatggttaataccaagcattatgttgtttccttttgagataaatattttgttactgattttaccttttgtctcctcttcttgttttttgttctagaatctgtagcaaatggctaacgatgaggatatccattactttgtttatgacaataaaactgatatgttcaagattccgtagcaacgcac

SEQ ID NO: 17321 - DNA, 1127 bp, Zea Mays
caggacctttttgtggcgggggggcctactcatattggtgcagaaacagaccttcgctttgtatactgtgcagctgcaatctgctcaatgctagatgactggacaggaatggacaagttaaaggcaaaggagtacattcttaactgccagtcatatgatggaggctttggtatggttcctggttctgaatctcatggtggaggaactttttgtgctgttgctgctctccatctaatgggcttcatccaagttgattttggcatctgacttaagagattctacatcaatcgacacatgcatgctcctcgaatggtgtcttcagagacaagtcactgatggagggtttcaagggagaaggaacaagctcagtgatacatgctatgctttttgggttggaggcgtcttgaagatcttgggtgcataccacttgatcgacagctgtgctctgcggagtttcttgctcacctgccagtcgccttatggaggcttcacgaagttcccggatgatcggataccagacatctaccattcttactacggcctggcagccctctccttgttggaagaggaagggctggaacccctctgcgtcgaactggggatcctctccgctgctgcattatagaaacttgtgtttctaccgaatccagttactgtacaatgtttgtgggggggggggggggggggggtaatccagtacttaacacaggataaacagctgagaaatcgaagggagtaatttattgatagagtgagttggtccgtgctgtcagtgtgctgcgcagatcgtgtaacattacttcgtgagttcgaaaggcgtgtgacaattttgtttgcaaaagtgcgatgggcaggctaactgagccagtcttcttcccagttggttgatctgattgttgacagttgagttagctgaacgctttgtatgattgtatcgtcacttggaaaggtactcgaatgtttgacgtttctgtttccgtctgtttggcataactaaatggcttgtgtctgctgccgtgaacaactttacatattgcatgcttcttcacaacattttgtttcagttaacactctctttaggcatctgcatactcatcgcttttctctcagaattcaggtgagtgaga

SEQ ID NO: 17322 - DNA, 793 bp, Zea Mays
atctaattagtgacgcgcatgaatggattaacgagattcccactgtccctgtctactatccagcgaaaccacagccaagggaacgggcttggcggaatcagcggggaaagaagaccctgttgagcttgactctagtccgactttgtgaaatgacttgagaggtgtaggataagtgggagcctccgggcgcaagtgaaataccactacttttaacgttattttacttattccgtgggtcggaagcggggcaccgcccctccttttggctccaaggcccggcctcgccggcccgatccgggcggaagacattgtcaggtggggagttttgctggggcggcacatctgttaaaagataacgcaggtgtcctaagatgagctcaacgagaacagaaatctcgtgtggaacaaaagggtaaaagctcgtttgattttgatttccagtacgaatacgaaccgtgaaagcgtggcctatcgatcctttagaccttcggagtttgaagctagaggtgtcagaaaagttaccacagggataactggcttgtggcagccaagcgttcatagcgacgttgctttttgatccttcgatgtcggctcttcctatcattgtgaagcagaattcaccaagtgttggattgttcacccaccaatagggaacgtgagctgggtttagaccgtcgtgagacaggttagttttaccctactgatgaccgcgccgcgatagtaattcaacctagtacgagaggaaccgttgatttacacaattggtcatcgcgcttggttgaaaagccagtgg

SEQ ID NO: 17323 - DNA, 1492 bp, Zea Mays
gcattcttgggttgttttcctttgccgttggggagagagagtactatgagaaacaatttgccacattgaggtcctttgaggaagttgactcactagaagaatccaatgaaatcaacgaggatgaggagcttgcggagcaaatccagagtgaatttgctatgaagatatcaaattatgcaaacattgttctcttagcgttgaaggtatacgctacaataaaaagtggatcaattgctatagctgcctcaacactggattcactgcttgatctcatggctggtggtatcctttggttcacacatctgtcaatgaagagcatcaatgtctacaagtaccccattggcaaactgagggtacagcctgtaggcattatcatcttcgctgctgtcatggccactttaggcttccaagtatttattcaggctgttgaaaagctggtagtgaatgaggctccagataaactgaaccaagtgcaattattgtggctatattcaatcatgatctttgcaacaatagtgaaattaggtctgtggctctactgccgaacgtctggtaacaagattgtccgtgcttatgctaaggatcactatttcgatgttgtcacaaatgttgtgggtttggctgctgctgtccttggtgatagattctactggtggattgacccaattggtgcaattgttcttgcagtgtacacgatttcaaactggtctggaacagtgtgggaaaatgcagtatcgctggtaggtgaatcagctcctccagaaatgcttcagaagttgacatatctggctatcagacaccatcctcagattaagcgtgttgacaccgttcgagcatacacctttggggtgctttactttgttgaggttgacattgagcttccagaggacttgccacttaaggaggcacacgccattggagaatctctccaaatcaagattgaggagctacctgaagttgagcgagcattcgttcacctagatttcgaatgtgaccataagccggagcattcaattctcaacaagcttcccagcagccagccttgatccgaacgaatcctgtgtggtagattgtcgtgcagaatctgctgcagttcttgcattggcgtcttgtgctgtatgacaaaactaagagttcaattagttttgtggcggtgagtttaagatcaggcgcatctaagactacgagagatgaaggtgccgaatgcagagatttctcgagtgtggaaccctttgtggttctgttggtatggtcttcgttttgagcgaaattaagcattttgctgttggcatcatggcatgtgattggcggcgatctagctgtgtgctatcgactacggtgatgtttagacatggtttcgagaaagagagtagatccttgatttctttaagcaaatctcagtgcctttttattttagggctagtttgatatcagtttctaagtgatttctattttttttattttttagaaaataaagtaattttacttgaaa

SEQ ID NO: 17324 - DNA, 285 bp, Zea Mays
aacttgccacacgatcagccaattccttaacaggaatgggttctccatagaccctagtccattaaattttcagaacagtcatataaaagatctcgcatcccatggtctcaaagacaaggtgtttacttttcataactggcagcttctgacttcgtccttgaaacaatttgcctgccatctgctgctaaaccagcaacagccagccagagtgccggtgcactgaatggatcctccggtttgacccttccagcatcatctttgaggttaccagcttctcaacaccct

SEQ ID NO: 17325 - DNA, 3526 bp, Zea Mays
ggaagagaacacaacgcacgccgctgctaagaacgaacgagggagcgagcgagatggatatggcaggccgcagcaggtgcaggtgcagcagccatggacgactcctctggctgcttctcgcgtgctcgtgggtggcagccgcgagaggccagcaaacagcacggactgatccagccgaagcggcggcactgagcacgatcctggggcgatgggggctgaaggcgtcgccggggtggaacatcagcggcgagctctgcagcggcgtcgccgtcgacgacaccgacgtcgacaacagccccaccatcaacccgagcatcaagtgcgactgctcctacgacgacaacaccgtttgtcacatcaccaaactgagagtgtatggcttgaatgttgtcggccagataccagccgagctggagaacctcacctatctcagtaacctgaacctgatgcagaattatttgacaggtcccgtgccttcattcatcgggaaatttcccatgcagtatttatctctggctatcaatccgctatctggaacacttccaaaggaacttgggaaccttactgatcttatctcactgggcattagcttgaacaactttactggtgaacttccgcctgaactgggcaacttgtccaaactggagcaaatatattttgacagctctggcttcagtggtccattcccttcaacattctcgaagcttaagaacttgaagatcctctgggcatcggacaacgacttcacaggaaaaatacctgatttcattgggaacctgactcagttggaagttctgagatttcaaggaaattcttttgaaggcccaatcccaaaaagtctgtccaatctaaccaaattgacaaccttacggatcggtgatgttgtgaatgggagctcttcattgtcctttatcagtaacttgacatctttggatgtcctgatattaagaaattgcaggatatctgatactcttgcaacagtaaatttttctaatctagctggattgaccttattggacttgagctttaacaatctcacaggccaaattccacagtccatactgaacttggacaaccttggattcttgtttctcggaaataacagcctttctggaagcctgcctgatattaaaagcccttcactaaacaatttagatttttcttacaaccagctctctggtagctttccttcttgggctacccagaataatttgcaattgaacttggtggccaacaacttcattcttggtagcagcaacaacagcattctgccttcaggcctaaactgtctccaacaagatattccttgtttccgtggctctccggaatattcctccattgccgtagactgtggaagtaacaaatcatttaggggcttagataatactttttatgaaatggatcctacaaatattggagctgcatcatattatgttactggtcaaacaagatggggtgttagcaatgttggaaaatttaatgaggccccaaatggaagttatacaatagatagttccgagcagtttcagaatgcactggattcacaactgttccaaacagcaaggatgtcaccatcatcgctacggtactatggcattggacttgagaatggaaattatactgttgagcttcagtttgcagagtttgcttatccagaatcacccacctggcaaagcactggaaggagagtttttgacatatacatccagggtggtctgaaagaaaagaatttcgacataaggaagacggctggtggaaaatcatatgttgcagtatataagaaatacaatgcaactgtgtccaaaaacttccttgagatccatctcttctgggcaggcaagggcacttgttgcattccaactcaagggtattatggacccatgatctcagcattgagtgtgacaccaaattttactcctactgtgcgaaatggtgttcccaaaaagaaaagcaaagcaggggcaattgttggaatagtaattggtgcttctgtcttaggactagccgccttagctggaatctttatgctggtacagaagagaagaagagcagcacagcagcaagaagagctttacaacatggtgggaaggccaaacatcttcagtaatgctgaactaaagttagctacagataatttcagttctcaaaatattcttggagaaggcggatatggaccagtttataagggtaagctacctgatgagagggtaatagctgtgaagcaactttcccaaacatcacatcaggggaaaagccagtttgtgacagaagtggccacaatttctgctgtgcagcaccgcaatctagtgaagctatatggttgctgcattgacagtagcacccccctgctggtctacgagtaccatgagaacggaagccttgatcgagcactctttggtgacagtggtacgatccttgactggccaactcgcttcgagatcattttaggtattgcaagaggcctaacctatcttcatgaggagtccagcgtgcgcatcgtgcatagggacatcaaggccagcaatgttctacttgacaccgacctcacgcccaagatttccgatttcgggcttgccaagctctttgatgagaagaagactcatgtcagcactaaaatcgcaggcacgtttggctacctggcgcctgagtatgcaatgagaggccatctgactgaaaaggccgacgtcttcgccttcggggtattggcaatggagactgtcgcaggtcgaccaaacactgacaattccttggaggaacacaggatctatctctttgagtgggcctgggagctgtacgagagggaccaagcacttggcatcctggacgcaaggatcgaagaatccgacggtgaagaggcagtcatcagagtcatcaatgttgcgctcctctgcacgcagggttcgcctcaccagcggccaccgatgtcgcgtgtagtgaagatgctcaccggagacatcgaggtgcctgaggtggtgaccaagccaagctacatcactgagtggcagcgcaggggtgggaacagcagctatgttaccagcggctactctggcgacacgaccggggagttcagcgtgcagagggagacgactgcgcctctcaccccgtcgccggcgatgactggagtcatcgacgacgggcggtgatttgatcgcaggctgatgcatgctgggtttggtttgatctcaagggaaaatctttgaaccatagttgataaagcgcggtgcgcggagaataagagtcagctttacatgctacttggctgggttaatgatagatatcatataacataacgtaatgtaatgtaatatgctacttagctaggttagtgatagatacgatatgatatgccatcacagccttggcgttcaccgcctctccacagtggcggatctaggttttttatacaggatgtaccgtaataaattttttatatgcaactgtatatacagttttatagtagatttgataaaaagtttgataaatagatataatgtttagcaatcaacagttaagtacgaaagttgca

SEQ ID NO: 17326 - DNA, 1390 bp, Zea Mays
caacacttaggagtatgtttcaaacaatagcctcactgacaacattagtatcgcgataccgtgcgtcagttcatcaaaggcacagatggatttgctggtgcttttgctgaatgcctatgtggaagtccacagttataccaggcaggggggaggaagccttggcacagtatcaactttgtatgtgcacacgatggatttacactggctgatttggtcacatacaatagcaagtacaacttgtcaaatggtgaggacaacagagatggggaaaatcataatcttagctggaattgtggggaggaaggagaatttgcaagtctgtcagtccgaagattaaggaagaggcaaatgcgcaatttctttgtttgtcttatggtttctcagggagttccaatgttctacatgggcgatgaatatggtcacacaaagggagggaacaacaatacgtactgccatgaccattatgtcaattatttccgttgggataagaaggaagaacaatcctctgatttgtacagattctgccgtctcatgaccaaattccgcaaagaatgtgaatctcttggccttgaggacttcccgacttcagaacggttgaaatggcacggtcatcagcccgggaagcctgactggtcagaggcaagccgattcgttgccttcaccatgaaggacgaaaccaaaggcgagatctacgtggccttcaacaccagtcaccttccggtggttgttgggcttccagagcgctctgggttccgatgggagccggtggtggacaccggcaaggaggcaccatatgacttcctcaccgatggcctgccagatcgtgctgtcaccgtctaccagttctctcatttcctcaactccaatctctatcctatgctcagctactcctccatcatccttgtattgcgccctgatgtctgaaagaagcagatacaatagagtatactatagcggttgttctctaggctgtagcatgcagtggaaactggaaaatgttggggttgctctgttgtcggtagtttacatgcgcatgtcggtatgtgtagctaaagctggtggatctcagttctcagatcggactcgagacggggaaaaccattgcccagttggctggttctctgaagttttgtttggtgtaaagaaatggtggtccatcatctactcaaatttttttctcttttttaatgaaataagttgactcaaaatcaactcattcttcaacttaataattagtatatacacaaggaataaattaattctatcaaatttatgaaatgaaatccaacattattcgaaggactgacgactactaacacggcactgctcccggagaaagaggaaaacctggcaaatggattacgggtacgagggtcggctaaagtaaaga

SEQ ID NO: 17327 - DNA, 1829 bp, Zea Mays
cttctccgaccgatccccacctcacacgatactttccccctccactagggttccccgtccgttccccctcggccgcatcagaattgtagctgtttgaggcggcaaccaagggccgcggaagcatctgtgtcgagccatggataaggggatcttcaccaacgatggctccttcatggagaggttcaagcagatgcagcaggaggcgcaggagaagaaggccgctgctgcctctgcctcatcggctcccaagcatgcgaaccccaagcaggggtttgctgttgcggcaaacaagaggccattcgagctgaagaacgctgctccggtagcctcagctggtaagctggcctttagtctcaagaaggccaaggtcgccgttgcacctgtgtttgcagccgacgaggaggatgaggatgctgtggatgttgagagggaggagcccgccaaacgccagaagtctgtgcaagctgatgctcctgcggcagctgccgcgtccggggctgttgccccacccccaccaaatgatatgacagtgagacaagtcgctgacaaactggcaagctttgttgccaaaaacgggagacagtttgagaatatcacacgacagaggaatcctggagatacaccattcaagtttctatttgacaaaaactgtccagactacaaatattatgagtttcagcttgctgaagaggaaagggctcttgctcagtcaaaggaggctgaagcatcgaaagctaactctggcactgcaagcttcaaggcaccaggtggtacttatagaagctcatttgaacagaagtctaactatcagacacctgcatcagctttgtacggggcatatgagggtagttcttcccaaggaagctcttctagttatggtgatcatacagctccaccatcagatcctgtagcattgatggaattctatgcaaagaaggctgcactggaagaacggaagaggccaccaaggcagtcgaaagatgaaatgccgccacctccttctcttcaaggtcctcctaagaagggacaccacatgggtgatttcattcctcaagaagaacttgaaaagtttatggcacggtgtaatgatgctgcagcacaaaaggctaccaaagaagccgctgagaaggctaagattcaggcggacaatattgggcacaaacttttatctaagatgggttggagggaaggtgagggtcttgggagcgagagaagaggccgtgcagatcccgttatggctggagatgtgaagaaggatcatcttggtgttggggcagtccagcctggtgaggtcacatctgaagatgacatctatgagcaatacaagaagcggatgatgcttggataccgctataggccaaaccctctgaacaatccaaggaaatcatactactgatgtgggggagttcgtctgaggggagatgtaaggcgctgctttgctgcaattttgctcacagaactaatggttaggggatatcactaacagcattgaaagtttttgttcatcaacagaaatgtcaagaagttcgttattcagcatatttcttggaatgccacagatgcaaggcttccgggggttctacaaagctttgttctttgtgtagtgtgtttatctttgtgggtttaaatgtctgttcaaacgtgtatcatgtttcagactgttgtattgctttcttggatcacccttttttctgatctcatttcagttacaagttggaaccataaggtacaaaatttgtgttgggaggggttatattttagaatggagtgtgaataactatagctagcataaggctatctccagcagattagccatcctcacatctaac

SEQ ID NO: 17328 - DNA, 877 bp, Zea Mays
gggattcttctatatcatgactcggtcatatgcttacgttgatgttggattatttttattaaagcgattctcacataaaccaattgaaaaaggtactgtatttgagaatgtacagcagcttctggcaacgataatcagaaaaaaaaacaaacaaacacggccaatggacgggggccacggggcttccattggaagcgaagagataacgtgggtccaaccggaactggctcactattctgttcggttccttccgaaaacacaacaggaaaacacacgcacaaaattgccgtttccgaatggccacggccgtgctccgccgcccattcctcgccgcgctcctcctccccgccgccggaggggcgtccgggacctcctcctggttccgtccccggagacgtaggtcctctccttccgtgcgcgcggtgtcttccgactcccccaagcccgtcgcctccacttcctcccccaccggcggtgacagccccgacgaggaaccaccggtcctaccgctcctccaggagcttgcggattgcttgattcttccgcccaagctcctcgctcagctcccgagcgaccttcgtctcgacctcaatgacgctgcgtttgatctctccaacgggccagttctcgacgagtgtggccaagaagtgggtgatctgctcctgaacctggcaaaagcatgggagttagctgatacgtcaacatcaaatagcattgccaagcagctgccgttgatggagccctacttgacgcgcagcgccaaatcagcgtttggcaagcggctggtgtcagctggaaggaggtttcagtcaatgggacagtacaaccagggagaactcaaaaagagattaaaatggttccacgtaccttcacaaat

SEQ ID NO: 17329 - DNA, 1305 bp, Zea Mays
cagattcattaacatgcctatcctaccactataaaggtacacaaagcttccgaagggaagaagctcttgagaagatactgcaatgatggctcctctgtctcctagactggtagtgcccgtagacgtgaagaagctgccgcgggagcaaaaggtccctctccacaaccgctggcacccggatatccctcctgttgctgatgtaaccgaaggggaattgttccgcgttgagatggtcgattggagtggagggcgggttagggatgataactctgcagatgatctgaaattcatggatttcacaattgctcattatcttagtgggcccctaagaatagttgattctgaaggggttccagcttcaccaggtgatcttctcgcggtagaaatctgcaaccttggcccacttcctggcgacgagtggggttacaccgcaatacttgaaagggagaatggaggtggattcttaactgaccacttccctagcgcaagaaaagccatctggtatttcgaaggaatttacgcatgctccccgcagataccaggtgttcgttttccaggattgactcatcctggtgttgtgggaactgcaccgtcacttgagctcctaaatatatggaatgaaagagagaaaagtttgtctgagacaagcctagagactattaaactgtgtgaagttctacaccagaggccccttgctcatttaccgacccctgaaaattgcttacttgggaaggtccaagaagggactgctgaatggcacataattgcaaacgaagcggccagaactattgctggaagggaaaatggcgggaattgcgacataaagaacctaagcagaggctccagaatttatctaccagtgtttgtcgaaggagcaaacctcagcactggtgacatgcacttctcccagggggacggcgagatttcgctgtgtggagcaattgaaatgagcgggttccttgagctcaagtgtgagatcataagaggtgggatgaaggaatacttgactccagttggtccaacaccactccatgtgagccccatctttgagataggtcctgtggagccacgtttctcggagtggttagtgtttgagggcatcagcgtagatgagtctgggaagcaacattttcttgacgcatctgtggcctacaagcgtgcagttctgaacgccattgagtacctttccaagttcgggtactctaaggagcaggaacagtctggattggggtaaaaaccccgtggaccaaatccgcttggatgaaatcccggcccacacgatagcagcgttcgtttaatcccgct

SEQ ID NO: 17330 - DNA, 3629 bp, Zea Mays
gagttccacagatatttctctccatccgtcgggtgtcgcttcctctcccagttctttctggcttttcctcctctctgctttctcgcttttcctcctctctgcctttctttgctaccgtcggcgtcaggcgtcaggaactccgcttccacacgaatatttcgtctattgtcagcttgctcagtggctccgtttgtttggtgagatgtgttttcccctttatccttcgtcgtgcgtttccattcggtggatatctttttccatattcctttgtggattagatccaggcttctctagtcgagatcctcttgctttttaccgagatgaaaattgggaccgaaaaggcaagtatttttctttgatagctttggcatgtgcagacatataaggaagtgttctacctcattgaactctattttggagattgagactgaaaaggcaattatttctttttggtaaagtctttcgcatgtggacatctggttccaattccaatctattgttttttgtcgtatcctcttgctttggtacatttagatctgcaagtaaatgttttttatttcattgaacttcaataagggcaggttatgttctgtttgtactttattgaacttcattatactattttcttttggtaaagttgttcgcatcaagtgcatattgcattctttttagttttttaacggttttgctgtcatcttattttttggctgtgtttccattcttccaactgtgtttccattcttcctttgtcaactatttcaatttcgttaacaactaatttcctttgggtaaaataatctactcgaagttgagatttcgctttcttttgtttatgaacgcaccaagattccaacacgccactatttttcttctctggtttagtagtgaggaaatccctttttacggcctaattttgggtttagggttttaactgatattttgaaggaaaaaaaaagttgttcctctctgtcccgactcttccatctactctctgattgttctgctccagactatggtgtgtaaatctgccgcatcatttttttgttctggaaagctctaaaaacaaggaaattatttgcatcgttttcttaaataaagatagcatcttgcacagttgctttttggagaaagaaaagtaacccggtttgattttgtttgtccaaattagtttcaatttaataccttctcgagttttgcttcctgtttttatcctttgggtttactaaattgcttagactatttgtggatctgtacatattaacttaacacctgcaagcacactgttgctaaatgttgatatatggtggtcgaatgctacttaggccccgtttcaatctcatgggataaagtttagcttcctgctaaactttagttatatgaattgaagtgctaaagtttagcttcaattaccaccattagctctcctgtttagattacaaatggctaaaagtagctaaaaaatagctgctaaagtttatctcgcgagattgaaacagggccttagtacgcattgtagtctaaattcactctataactggtatcagctattacatgttgcaaagtgttgatatatggtggttgaatgctacttagaatgttttgtagtctaaattcactatgcaactggtatcaactatattacataaaaataacgttatatgcttacattttgtttcctgcctacatattatataatcatattatatttaaatttgttttacatggctgggtacttacaccaaactcttaagacatatgtgctcacgcgcgctgggcgcgcgctaaacactagtatagagtagtagagattgaatggctgttcagggcagtgtgttgctacagttcctcgtttataccattactggtcttcctatctctgtcattgctggcactaatagcagatcatatctgcatgtacttttatagactgtatcaattaggctagattagaggacattaggaggatagctttgattctttcctttgcatgtacagtccttcgcataaatccagcctttgcatgtataagtacagcctacacaatagagaattcgttccacctaatcgcctatcttctttcactgaggtcctatcacttgacggaatgcaatcgtgttgggcaggtctggatgagatttcatcgaaacatttgtcaaattatgccatgggagcatcttaggctgttgcattgatttggctgatggctgtagttctgtattcaaatgttcccaatgagccacctttttaaatgtgttcagtgcctcttagaatatgcacagatgagtaacatactaccgtgctgtagtgctggactcgaactactataaatttgcctttctggttatctggtataagttaagattaaatgagccacaccagcagctcccaatctttatgaaatgaatgcaaagccaatggcaagcgaacctgcatggatccatgttttgtattgtggagtaaatcatatttgtttgtgcaatacatgttgtctgagagaggtcgcggaacaagggctgttcgggtgtgagtatccaaaaaaataaatgaatttgttaggtttcaattacttcttttccctgcattttacttagttatactggtagcagcggtggcctgtatgttgtcctggacccgtagaataccagatctaagaataaaaaacgtctgcagcggtatccagtacctcgtcctgtattatccaggggggcggctccatcccgtagatatgggggacaagagagcgtccggcaagtcctccagctcccggctcctcctctcattcgcgtgattgggcatggacccgtaggacatagaggatatgccttataggataccgttgcggataaaatttatttacgggaagaaatcttttggaggaatctttaaattagtatttaggggatgcaatatacaggctaccgttgctaccagtcttagggctagtttgagaacccttttttcccaaaagattttcatttttcaaagaaaaattagttcatttttccttgagaaaataggaatcccttaaaaaaatagtgttttcaaactagcccttaatgttttttttcatgaacagaagctgcggccgtcagaaaagcttgacaggtttcttgagggtagaaacttatatgaagattgtttcattgaggcttatacggtaaaaattcttctgctagtgagatcaagattaagggtacaggagttgcatggacccactagaaattggtggccaaagtaccaaacgagttctttgaaacagcttcagtttttcttgttatgtaccaaatcggtctgccactagtgcaatgaccacagaaacaaaaccagggcaggttcccacttcccaccgtgtaaatagagatgcagtcgtcatttttctagctgtcatttttctagctgggttctagtctttggacgacaaatacaagagtagggttgagattgaccatccgtacgtgcttttcttttttttcatggctcccaatctatctttggttgtatttgaatcttgtgctggggtccaatgcgtaatcttctcgttttgtgagggattctaaagctttgatctctgaagtgacttttctgcacaaatgtatgattagctttacatctggactgatcactgatga

SEQ ID NO: 17331 - DNA, 799 bp, Zea Mays
ctgctgattcctcgtcgccagcttctctttcccccaccacaaccccccgccggcgcggctcccggtgtcccttccactctccaccctctccttcccttcggcgccaagtccatccgcccctccgaatctccgattgccgccgtccagttttggcaggtgccggccgacagttgagaatgggactgaggcgcctgatgagatgctgctgctgcattgcaaagcacgcggacgacggcgacaagatcgatttcggaggtggcaatgttcatgttgtcacaagcaaagaggactgggaccaaagaattgccgaggcaaacaaggatgggaaaaccgtggttgcaaacttcagcgcttcctggtgtgggccgtgccgtgtcatcgcacctgtctacgccgaaatgtcgcagacgtaccctcagctcatgttcctgacgatcgatgttgatgacttgatggagttcagctcgtcgtgggacatccgcgcgaccccgaccttcttcttcctcaagaacgagcagcaggtggacaagctggtcggcgccaacaagcctgagctggagaagaaagtggccgccgtcgccgacgcggccggcagcaagacagtgtagtgtaggcaaagacccgcctagcttgttgacctggccctgtacatcgttatatcctattgttgctgtgtgtttctttcttggcaccgtgcgcatgcgtcgatctgtcggcggtaatgtcttccgccatgtgctgattgtaagagttgcccggtaatggtaatggtaatggtaatggtgtcttacggtttctg

SEQ ID NO: 17332 - DNA, 1408 bp, Zea Mays
agcaccaaccagcgacctgacgactttaaggctgcactgaagactatcggtgaggaagacaagtactttaccagagtctcattaaggatgctatcatatggtatgaaaagtagcacgtctcagaaagatctccaaaagcctaatgcttcagagcttccttcacaaggaaaagctgcatcagaattgacacttgatgggtgggatagtattgctctggaatattctattgactggcctctgcagctcttcttcactcctgatgttctgtccaagtatcgcaaggtttttcagtatctcatccgattgaagaggacacaaatggaacttgagaaatcctgggcagctgtaatgcataaagaccatgctgatttttctgattattgcaaggatcggaaaaataactctgcaacacaactgcgtcgacaacggtctaagcctttgtggcgagtaagggagcatatggcattcttgatcagaaacctacaattttacatccaggttgatgtaattgagtcacagtggaatgttttacaatctcacgtgcaagattcacatgattttacagagctagtgagctttcatcaagaatatttgtcagcgctggtttcccaatccttcttggacatcggatcagtctctaggatactggatagcataatgaagctttgcttgcagttctgctggagcatagagcaatatgaaactcggccaaatatttctgagattgatcacataactgaggagttcaacaagaagtccaattcgctgtacactatcttgaggagtagtcgcctcgcgggtagtcagagagcacctttcctgaggcaatttctgatgaggctaaattttaactctttctttgagaccaccgcaaggggagtgatgaattcaggaaggctgcgaccaatcactgcaggtgctcagctgtaacggtgatggtatgtttgggggtagtgctgcagcaagagacaagggaggagtttctgtagtttatgtaaattatgatcggatggtggttgtctgtcatggaaaaatcgattgcaggtgattcatgcttgtgccgttggtattgtgtttttctgtgcttccgtttgttaatgctatccagttcctgtggcctgaactgtaccttcgcaaattatacgctcgttcaccgtggggatctggctgacagatagtgaactgctgccactctttttttttttactaaggccgctgccacttctgagctgtgagatgccatgtctatcaataataacggtaaggagtattctaaaagattttgagctgtgggcagatgaatgtttaggacatatggattggaggggattgaagattaaatcctctcctatttaattttaactagtaaaggattttatccatttaaaagcctttagattagatggat

SEQ ID NO: 17333 - DNA, 790 bp, Zea Mays
tccgcacagagggtagacgttaactgtcgatgcttagagttcagatcttcctaggcatgtgtgtggacctacaaaatttttgtgatcttgaactttccagcttccttctgcttgtgggcacaaaccctccaattgcaatccgacacctcgcacacaactctatcgttcagctcctggtggtgctacgggggtgactgcgggggcgactgcggctggtggctgttgtcctcatcgaccatctcggcgacgtcctactcgagcgagatctcgctgcagtccctcgagatctggaggagattgacaaggagattgaggacaagaagacagagctggagcccaaggtcgtggaggcctacgaagcatctcctcctgaggtcaaggctctgttcaaggataagaagccagtcaaggtcatcaagaagaactcggctgcagtcaccaagttcctcgatgagctggctaagattggccatgttattagtcttgacctgtctaggcatgtaccaatatttcatggcaaatcttatatcccaagttttttatatgctcaacaggccgcacttgaagaaatcttatatcagtttgaggaaaaactccaagctgaaaaagtggaagctgctaggaagcaggaagagttgcaatctgtttgatgccttttctagaacatatctgtggttagaactttgtcagaactacgtgcaatctgtttcaatgcttcaaacctttgtggtggaacctttgtatgtttgaacctctgttgtggaagaactagtgtgctggaattgtgtat

SEQ ID NO: 17334 - DNA, 861 bp, Zea Mays
aggaatcaccaaattcaatgcagttaaatcatgcaaaggaactgtttattggatggcacctgaggttgtcaatccaaagaagacgtatggacctgcagctgacatatggagtcttggttgcactgtcctagagatgttgacgcgccaaataccctatcctggcctcgaatggacacaagctctatacaggattggtaagggggaatcgccagcaattccaagttctctttcgaaggatgctcgtgattttataagtcagtgcgtaaaacccaatccagaagacagaccatcagcaatcaaactgttggagcatccatttgtaaacaagccaataagatcagtatggtctttgaggacatcttcacgctcgaattcatctacacgtggcatcaattaatgggtcgttgatcatctattggacattggaagaatgatgttggtccgcgcaaatcatgcggacctggccgaaagggagggttgttttgcccggagctagtattgtcaacgctcagcagcattgtcgtcaacctcttagtgtttcattagttgattctttggcatacgttcgcgaggaagatgtcctcgttgagccgccggctaatattcatattcttctgcctggatagggaatagtgaacgtgcatttgagtgcatgagttgtagagtgagaacgggctgtgtaaaacagactgtcctgatgccaatgatatggaaaaaagaaagaaagaaagaaaaagttcaaagctttggaactgtcaacgacagttgttggattgggattgctgtctgcttttgtgccaagacaggaggcatacggctatgtgcctatgttatccttttctttttcaatcaacggaactt

SEQ ID NO: 17335 - DNA, 288 bp, Zea Mays
gtgaatcctatgttgacttgattgccacaggctcagacgattcaattcaaatagtgaacgcattactagaagttacttctcttctcgaatttgccatttcctccatgacgtttaatttctggcattgccttaagcgtaacctcattcgaagggactctgatgtatcatatggattagatgtgacggttgaaattgagaaaaacagaagattacaaatatttcgtccaaagtttgaaactctggtgtctctgttttcgagttgaataccctgaggactaccacaccttt

SEQ ID NO: 17336 - DNA, 1679 bp, Zea Mays
tgactgtgctccacgacaactcatgtttatccagcccggcagatatctctctgagaaagcaatatcgctggcaactggtgttataaatgagctggttaaggaactgaaaataaaaattgtgccaattgttcttgcttccttttctggcggctcaaagggatgcatgtataaggttattcagttactagatggaatatgtgaaggagatgcaatcatgaaggactatcggttagtgaggaactgtatctgcgggcaaatttatgactctagccctgtagattttgtcagtgatgtgggcgcccagtttgtccaaaagcctgctgatggaaattcatctcagccaactatattgcattcatggatggcaaaggctctagcttctgtcatggatactctcttcccaagcaggattgaagctcagcgtgcagagtactggcacacactgtactcggcagcaggattgggcccagttcttctattttgctcagaagctgataaccttgctccatgctatattatctgtggttttgcacggcgtttgattgaactaggcacagaggttaaacttatgaaatggaacagctcccaacatgtcggtcattacaattcacatgaaactgaatacaggacagctgtagatgatatgttgaagaaggctctccttaccttctgccaccgaagccaactatatgactcaaatatggctggtgaccgggagtacaagatagcgcactcggtctgcagtctacacaatgctgcagccaattcaaacgagagtttaagaggggttcctaacagtcctagcgatcacttcttcttgccaagttcgaaggatcacgatgagtctcaggaacccgggtcccacatgtcccatccaccctgcatggagcctaaaggagtccttggccaaatcctgtttgatgtttgtgttccgagaaatgttgaaggatgggacatcaagccgacagtgtccccgaatggacggccaacatttgcttctgcccgtcaacttggtccattcaatcccatcaggtacttccgacgttcaagactatagttttctgtaggagttgagattattattttttgtatatataacggaggcaaggtgtctaatgggcactctgagcaagattttacctatgtaagctccctgtaattgtttctgttttttacttttgcgctgcttggcgagagaatgtacatatgctttgtataccatattagggcttgttcggttagctctcaatccatgtggattgagtgagattggatgagtttgaatcccaaacaagtcaaacttcttctcaattttttccaatctcatccaatccatatgtattgggaataaccgaacaagcccttagtgtgtactagaaggtggatcgtggacatagtttctaggcgggttgtaaggtgcacgctaacattgaatagccaagggaatgcattattatgctcctgtagtctcctctatatttcatgttcgtcaaatctaactatcggaaaaatcttctcttcctttttactggtcatagctgatgttagtattttaatgttggtctttctttttttttcccgcttggtgtctttcgtttcttcgagtaccgttttgtgtttagtgctgtcactgactgtatttctggttcacctcaaagtcaaaacattcagtattcaga

SEQ ID NO: 17337 - DNA, 926 bp, Zea Mays
acagtttttcttaaaggagtgaggacgtatggttttatacttacagtgaaagacctatcaccaaatattggtgttttgtggtacttctttgctgaagttttcgacttctttagaaatttctttcttatggtattcaatatgaacatcatttttatggtcttaccattggccatccgattgaaacatcgtccgtgctttcttgcatttgtttacacggcaattgtggcaatattgaaatcttatccatcggctggagattcagccctgtatcttggtcttctgggcttatttgtcaacgaattagcagaaatgcagttcacattcttcttgttttttggatatattggagtctccctacttagccctgtcatgcataatctgtggatctggaggggcactggtaatgcaaatttctacttcgccactggtttggcttatacttgccttcagactgtgttgctggtagagagtgtaagttcaatgataaagcacgacagaaagttaaggctacttgttacaagctaatttggtcctcataatcagaagctcaagtggtggacagctccgatgcttgcaattccctacatggtgctcttgattcttgaacacaaacagctcctcatcttggagttcgtagatgtaggtcatattcgatgtagcatgttgtactgtagaccccacacttgtacaatactaggaccgcaactctttcaacaaagacaaggaacacggtagggctcgtccttggtgactagtacgtagttgtgttcgctaccgagaattgttgtggatcctggctgtgatgttcagtgatccagcttggttgaactgccctcacgtacatttaattccgtcagtctgatggatcaacaaggaaaccaacatttgaacgtttaaccaaactgatatctaattttcgtttcttc

SEQ ID NO: 17338 - DNA, 643 bp, Zea Mays
ttatcttgcacttcctcaacttgttcaactgctgcaattccactgctatgcgtgcttgaaaatggcagagtcatggagtttaccttacctggatgctttcggtgctgccaagaacatgcatgtttatgaggtctcatttatagattcttgggtattatcattgagtcctatgaggcgagcatttctgaaggcgatgaggaaatctaacaatccacggagacatgttgtgtatgctttcggggaccattatgacttccggaagaagcttcaaattataaaccttctcactggatacatatatctggttgatggcctgggaagaataagatggcaaggctctggatctgcaacacaagaagaactgtcgtcactaacagcgtgcacctccattttgttagatgaaaaatgagatggggtggctaatctttgctattttgtaacttctggtacaagatattttgcttttcactaagcaaatcgagtttttttcccgtgggtaataagtattggatggttagtttttttcactaaacaaccttgattttctggtggaaaatgattttggtatggtattatcgttgtatttaactgctatcctaacttcgtgctataataagactgaattagtttaaatctttccaaa

SEQ ID NO: 17339 - DNA, 3494 bp, Zea Mays
cagccgttctcctctcagccgtcgccgtcgctctcctctcctccacactgctctcctctctcctccgagccgcagctcttctctctccctctcccctgcgcgccgccactgcgggcatctacaccgctgccgctcctctcttctccgagccgcagctcttctctctccttctcccctgcgcgccgccgctgcgtggccctacacgccaccgctacgggtgccctacgcgccgccgtcactgctccagctctcctctgtttcccagccaatgccgccgctctaactccccaaggcatcgccccgacgacggctcaacgacgccccgtcgacgcctcgcggacgccctgcgccgcagcgggcgctttacgctccatggcaaggcgcgttagatgcctcaggttccacgcgcgccttagcccctaagcgacgctaaggcggcgcttcaaggacgccttgataagcatgattgggaggtgaaaacatggattacgactttggtggcacctcacccgatccctatgggggtggaagcatccacctagtgtgtgatcattgcggtaccagtgacaactacaccactgacgacgctgatgatggccaattcacgtgccgtacatgctctgccgtgcacactacacaggcaactgctgctgatcctcatgacttccccgccactggcaacatctctgtccgtcgtgttgccacccagcccacccccaagcttggtgcccgcacacccgcgccttacctgaggacccctcaggctgctcccgtgcctgctactgccgcttttgatgacttcacagagctgagtgagccgcgggactttgtgtctggatctggcacgtgtggggagcctgaggatctggcagtgcaggtccgctggcgctatgtacggggtctccaggtgatcctgcagcggcagctggaggtgctggtggagcggcaccaggtaggcgcgtttgtgtgtgctgttgccggcattgtctgggtgcggtgggttgctgcatccagggtgtttgatggaatctgggcccgccaggtgcttgaggaccacaaggccgtggggagacagaagtgttatgatgacaagaaacctgatgagatgaagtatgaatgggatgatgatatgtcgctccaacgaaaagacaggcacaagctggagtttgcctttttgcgttcgttgaggatgatgctgccggtttactcaacattggctgtttgtttcttggcctgtcatattgcccgtgaagccatcttgccaagtgacatttacaggtgggcaatggaggggaatatcccatatgtggctgcttttactgaagtagacaggttccttgggagctctttccaagactgccctttggatgcaaggcagctgttcaggccggtgcgagttatcggagcatggcaactggaagctgcagctggatccatagcacaaagagtagccttgaggcttccttcagttaacttctatgcaattgctcaacgttgtttgaaggacttgttactgcctatagatagaatcctcccccacgcatgccaaatttatgagtgggcaatgcctgcagaattatggttgtctagtaatcctgctagagtcccaacacgggtttgtgtgatggctatcctaattgtggccctacgacttctttataacatcaacggtcaagggatatgggagaagatttgtgaggaaggaagaaacccaagtgaatctcactatgatgcaaattcatctacttccaggaagcttgaggctagtaacagtgaggagtttggcacaagagaactgttgtgtgctatttcagttgcctatgataaaatcaatacgtcacatgactactcgagtgatctccgctcttatctcaaatactgcaaggaagttgtttttgctggaattacatcttcagatgaacagactcatctaatagagatcttttgggatatgtacaaagccagggaggatgataatatagaagatcatgtaaaatcccagtcccattctatggcagacattccaattacaaatggagtgaggaaacactaccgagatggagcttttgttaaagcaagttccttttctgcatcttcaggtcatgatgcaatgcaaatgctcaagtcagagatgcaagatcatggatttcattatatgccacctaggaaaccaaggaaatcagatggttatcttcgttataggcggcggcggctaagtggtggctttatttttgttgcacatgctgattattacttgttgctacgtgcttttgcaaagcttgcagaaattgatattcgtatcatgcatattagtgtgttgaaacttgagaagagactcgcatgtattgaggagcgaattgaaagaagcttgaacaccttacataacttttctactggaacagtagatgagctaagatctgtatctgactgaagttcctagtgtagtctcatactctgctagcatggaataccccctccattccttctggaaaaaaacatgtggtgccattgcgtaactgtggttttgaagaatatacgtagcttgatacctcaggaattgagggcttctttctgtggcctcttggcattggtaagcaacctgagcacaaggacagggcaggatgtgggtctgtatttgctgaagcaatatgtaccaagaattatgccccccttctttagaacggacataattatatcagggtcctaatcagtactgtggtagattcagcaacagttccagtagtagacctcagtgcttggcagcaatggcactggggatctgcaatcatgaggcagtttcagtttgggaactggagtggcaagaggaaaaaggctggaacctgggctttttaaagaggctaatcagtactgtggtggattcagcaacagttccagtagtagacctcactgcgcggcagcaatggcactaagggatctgggttctgcaatcatgcggcagtttcagtttgggaactggagtggcaagaggaaaaagcatggaatttaggctttttaaagaaatgctatcagtattgtggtcgattcagcaacagttccagtagtggattcagcaacagttcaaggttagtacaattggtcttgtcaaagctgccgacagaactaaaaagatatccagcatagtgtaatgcatcttgatgtactgccgacatttatttcgttccagcttctgcagcaagagctgatcgtttcaaaggtgacgagaaattggtcgtactagagatgtactgtctattcgctgtatttgcaagtttaaaccaattattcgaactactgcagctgtaatccagagacaatataatatagaaaaaatagaagtcggtggttaaagccgtaacaaacatgctaacaaacatgctagtaggcttcaattgttaagggcttctttgtttcagcttttttgatgaacttttatgagaatctaactatggtgaaaatctgagtatcatgtgtattacatgcgtagaaagataaaa

SEQ ID NO: 17340 - DNA, 1771 bp, Zea Mays
ctaccacttccgccgaccagctgtatctctctggctttccccttctcttcgtcgccgctcatcacaagcctgtcgtcgtcgtaaacacagagagggagctcgtccatgtcctcctgattcctcttggcgatcgagggagtggccgaccggcgataatctagctatagccagcctcgccatgcctcgccagaggaccctcacctccgaggcggccggcgggcggctgctgctcgtggtggtcgcggtcctgctatgcctgtccgtgcctctggggcgtgcggcacccccgggcgcggaggtcgcggagttccctgggttcacgggcaaactcccctccaagcactacgccgggtacgtaacagttggtcaacatgagcaacgaaagagacacctgtactactaccttgccgtctctgaaaggaacccaagcttggatcctgtggtcatctggataaatggcggtccagcatgttcagggtttagtgcatttctgcattcatttggaccttttcgaatggagggctcccaagttcatatcaacgacggtccacgagtagccgtgaacccttactcatggacaaagatggctagcctcctcttggtcgactcgccagcaggtgtgggctactcgtacgctgatcatgaagatgactacaccacagatgacacaagcagggtagcggacctgtatgactttctgtcaaagtggttcgctgaatacgcagaatttctgtcgaatcctttctacgtagctggatgctcgtacagtggagtgatagtacctgtacttgcacacgaaattataaagagaaatgaagaatccggtggggtcaagatcaacttcaagggatattcactatgtaatcccgctattgatgttgacatagagaacaatgcacatgttccatatgcatttcgaatgggtttgatttcagatgaattgtttcagagtttagttactacatgtaatggaaagtattggaataactccaatccatcatgccaagagaacatggagcaattttatactcaaatcaaaggtattaacatggagcatattctatgtccgccgtgtcgatacaagatggggataaccaatcaattcattgaatatgattctggtcaaatgtttgagagcctttcgaaaacctccaagcatggtttagaatgcaatgatcaagagttggcccttgagaaactctttgatacaagatcaggtagagaaaaattgcatgccaaaaaggttgaagtatcaggaccatggaagaggtgccccaagcgtgttctgtacacgagggatattctaacattgatagagtatcacttgaacataacatccaaaggatatagagtgtttatttacagtggagaccattccttgcttgttccttttacttcaactttggagtggctaaagaaactaaactacaaggaaatcgagaaatggcacccttggtacttggagaatcagattgctgggtactcaattaggtacgagaacaatatattgtttgcgacaataaagggggctggccatgttccatcggactatctgccatttgaagtatttgctgcctatcaaaggtggatagacggggctgcttctctctgatagcgcttgtcgtactcttgtgctgcaaaatctttgcataataattaataaatccgaatagagtaccgaggccaactgggagatcacctctgttgttgacattgaaaaccaattgttctgttttacttgtttggttcctcgattcgtctgtcatgtggg

SEQ ID NO: 17341 - DNA, 2970 bp, Zea Mays
acgggtcgcggctagccggctagagtctcttttccaagcccactcttttttctcctctccacttcgttacgcggacagtgggaggagccacagccattataatagcacgccatacgccaaaagctccactggagccgagcagctactcctcccagtcccaggctcactgtcgctcctcccaagaacccgcccaaagaatcctagaaatccaagaaagggagcaaccaaaacaggaggaggtctgcaggaggaggagcaggtcagcaggaggaggtggtgctgaaggggaagatctcacaagtgtgtgaagaccacacagtctcgcgcactcgcaaacccagtgcgcgctgcggtcttcctcttcgcccaccttcttggagcggggaggttggccatgaggaggtggtggccggctgccctgctgggctgcgcagtggcggtgtccgttctggtggccgccgtggaatgcgctgtgacttacgacaagaaggcggtgctgattgatgggcagaggcggattctcttctccggatccatacactaccccaggagcacccctgatatgtgggaagggctgattcagaaagctaaagacggaggcttggatgtcattcagacctatgtcttttggaacggacatgagcctacgcctggaaattactatttcgaggagaggtacgatttagtcaggttcataaagacggtccagaaggctggcctgtttgtacatctccgcatcggtccctacatttgtggcgagtggaacttcggcggcttcccagtttggttgaagtatgtaccgggcatcagcttcaggacagacaacgaacctttcaagacggccatgcagggtttcactgagaaaattgtgggaatgatgaagagcgaaaacctctttgcatcccaaggtggcccaattatcctctctcaggcaagtataatcttttccttagatttgattgagaatgagtatgggccagaaggcagggagtttggtgccgcaggtcaggcatatatcaactgggcagcaaagatggcagtcggattgggtactggtgtgccgtgggtgatgtgcaaggaggaggatgcacctgatccagtgatcaatgcatgcaatggtttctactgtgatgcattttctcctaacaaaccttacaagcccacaatgtggactgaagcttggagtggctggttcacggaatttggtgggaccatccgccaacgaccggttgaagatcttgcatttgctgttgctagatttgtacaaaagggtggttcttttatcaattactacatgtatcatggaggaacaaattttgggcgcactgctgggggtcccttcatcacaacaagctatgattatgatgctccaattgatgaatatggacttgttagagaaccaaagcacagtcatcttaaagaactccacagagctgttaagttatgcgagcaggctttggtttctgttgacccagcaattactacccttggtaccatgcaagaggcccgcgtcttccaatctccatctggttgtgcagctttccttgcaaactacaattctaactcctatgcgaaagttgtgttcaacaatgagcaatacagcctaccaccttggtcgattagcatccttcctgattgcaaaaatgttgtttttaacagtgccacagttggtgttcagacatctcagatgcaaatgtggggagatggtgcctcatcaatgacgtgggagaggtatgatgaggaggttgattctctggcagctgctccattgctcaccacaactggtttgcttgagcagcttaatgtcacgagagacagcagtgattatttgtggtacatcaccagtgttgacataagctcatctgaaaactttctacaaggtggcggcaagcctctgtctctcagtgtgcagtctgctggtcatgccttgcatgtctttgtcaatggacaacttcaaggttctgcttatggtaccagggaagatcgaagaatcaaatataatggcaatgctagccttcgagctggtactaacaaaattgcactgctgagtgttgcctgtggattgccgaatgttggagtgcattatgagacgtggaacactggtgttggtggtcctgttgtgcttcatgggctggatgaaggttcacgagaccttacttggcagacttggtcctatcaggttggcctgaaaggcgaacagatgaatctgaactccatagaaggctcaagctcagttgaatggatgcaagggtcattgatagctcaaaaccagcagccattggcctggtatagggcttactttgagactcccagcggggacgagccattggctttggatatgggtagcatgggcaagggccaaatctggataaatggacaaagcattggacgctactggacagcatatgcagatggggactgcaaagaatgcagttacacgggaaccttccgggcacccaaatgtcaatcaggctgtggtcagcccacgcaacgatggtatcatgtgccaaagtcctggctgcagcccaccagaaacctgctggtagtcttcgaggaacttggtggggattcatcgaagatcgccctagtgaagaggtcagtctcaagtgtctgtgctgatgtatctgaggatcacccaaacatcaagaactggcagatcgaaagctacggcgagcgcgagtaccacagggcccaaagtgcacttaagatgtgcacgtgggcagtccatttccgcaatcaaattcgcaagctttgggacacctacgggaacctgtggagatttccagcaaggagattgccactcagctaactctcacacagtcctagagaagaaatgcattgggctccaaagatgcgtcgtcgccatctcccccgagagctttggaggagacccctgcccgagcgtgacgaaaagggtggcggtccaggcagtatgttctcccgtcgcgtagccttacttctccaagcaat

SEQ ID NO: 17342 - DNA, 1136 bp, Zea Mays
tctactcagcacaatcactttgaaaagaatttgcggttgcatgtaggattctacacaatttgctacagaagttcacaacatcaatggctaactatattaaataccaagcggacaatggggcgcaggctgtccaaattttcgattcatgggctactgaactcagcccggctgattttgaggagtttagcctgccttatctaaagcagatagtggatagtgttagggaaacacatcctaacttgcctctgatactctacgcaagtggatctgggggcttgctggagaggcttcctttgacaggtgttgatgttgtcagcttggactggacggtcgatatggcagagggcaggaaaagattgggatctaacacagcagtccaagggaacgtggaccctggtgttctttttggatccaaagagtttataagcaggcggatttacgacactgtgcagaaggctggcaatgttggacatgtattgaaccttggccatggcatcaaggttggaactccggaggaaaatgttgctcacttcttcgaggtcgcaaaagggatcagatactaaagaaccttgcatggttctttcctttctccaaatcggcagaagttgtagagtcggcggtcgaggatagatgcagaaagccatgtgcagtatagagtgcctgaaaacatttttgtgactgattctgtctgtcgcatttcaagttccggtttcagtgtaatattgtaagcagatttgagtggaggcgtaatgaagtgcctaattgtttatagcactatagttctgtacaaccagtagccttgtctatgagactacgaagcagaaatactgatcatgtgttgacatgatagaagaaagaaaaaaaatggaagactaagatatgctcaaaagaagaaggaaaaaaaacaaacaaacttgtcagtggctagctcagtgccgcgcttagaaacctggatgtttatctgcatttgggctttgacgctatcctgacgctcacagcatgtaaagtaaagcaaacagtggatttaggaggtgacactagaaaaggaaactgcagcttttgctacggtggcggcgctcgcaagccacagtggaggaggctaaaaggatggagaggaagagcaacgacggaggaag

SEQ ID NO: 17343 - DNA, 743 bp, Zea Mays
gttcacagttggacttgcacggatggacccgtcccaccctacttctcctccaccctccgcccagaacccacaacgccgccgcgttcgtctgccactgcctgcccgagccgccgctccccttcctcggtctctcctcgcttcccagtcccagtcctagcccagcgcgccgcggcgctaactggccagctggtagtgatggcaaccgagccgccgccggcagcggagaagaagaaggcgccgctccccaaggtggtcacgctcaataaagccctcaagctggctcggtcttggtgctaaagcggcacctggtgtgaagcgtgtggttcccactgacccagttgagaggaggttgcttgggaaggtgaatgcgcagaagaggaaggccttggaggatgatgatagaaatgctcaggtggcgaatgaggctagcgacgacgatgagcctgaaagcaggaccagtgcctttaacaagaagaggccagtgccttcagttacttctacacctttagggaagaaggctaagtgacaagctatatgcatagactacctgagtgatctgcttgttttgatcacgtttcgtactaactcccagactgatgctattttcataaggcatagtataccttctcatactccagtttgtgattcctgaatttaaagggatagctgtgcttgatattgttaaggctcattgccgattcagaaattcacatactctctgtttaaagctaaatacactgtga

SEQ ID NO: 17344 - DNA, 97 bp, Zea Mays
ttgctccaagttttatggaggtttacgtccgtggtcaccgtggccttgatccggcgaaccctgatgtgctatgcagcgaggcggcaagggagaaaat

SEQ ID NO: 17345 - DNA, 3678 bp, Zea Mays
atggatctgctcccgccgccgacggacgcgccggatgccggcggccccagcgccggcgggtcaggccgggggctgcgccgcgggatcgggttccggtcgctgaagctggtcagcgttgccatggacgagaccctgcccgtcgaccccgtcggcgccacctacggccgcctcgccaacggcctcacctactacgtccgctcaaacccaaagccacgcatgcgcgccgcgctctcgcttgccgtcaaggtcgggtcggtggtagaggaggaggacgagcgcggtgtggcgcacatcgttgagcacctcgccttcagcgccaccgcgcgatataccaaccacgacatcgtcaagttcctcgagagcataggggccgagttcggtgcctgccagaacgcgctcacctcatcggatgagactatttacgagctgctcgtacccgtcgacaagccaggcctgctctcccaggctatatctgtcctcgcagagttcagctcagaggttagggtgtcagcagaggatctggagaaagagaggggtgctgtgctggaggagtacaggggtggacgcaatgcagcaggccggatgcaggactcccactgggcactgttgtttgatggttctaagtatgcagagcgcctgccaattggtactgagaaggtgatacgaactgttacacatgagaccgtgaagcggttttatcagaagtggtaccatctaagcaatatggcggtatttgcagtgggtgatttcccagatacacaggctgtcgtggagttgataaatgagcattttgggcacaaagctccagctccccaccctcctccagttataccagaattttcagttccatcgcatgaggaaccacgcttttcatgttttgtggaatctgaagctgcagggtcggctgttgttatcagctgcaagatgcctgctggtggaattaaaacagtaaaggactacaaagattcactggcagagtccatgtttcattgtgcgctaaaccagaggctcttcaaaatatctcgtagaaaggatcctccttatttttcttgctcctcagctgcagatgctctcgtctgtccagttaaggcttacattatgacatctagttgtcgggaaaggggaacagttgaagctctcgagtccatgcttcttgaggttgctagggtacggcttcatggattttctgaccgtgagatatccattgtacgcgccctaatgatgtcagagatggaatctgcatatttggagcgtgatcaaatgcaatctaccagcttacgggatgagtttttgcagcattttcttcgtgaggaacctgttgttgggattgaatatgaagcacagttacaaaagactcttcttccccatatttcttctgcggaagtggcaaaatttgcagaaaacttttcaacggccagcagctgtgttatcaagatagttgaacctcgagctcatgcttctttggaggatctgaaagcagttgtgctgaaagtcaacagtatggaagaagataaatctatttttccatgggatgaagaacaaattccagaagaaattgttgcccaagctccagagccagggactataattgctaaagtggagcacccaggcataggtgctactgagatgatactttcaaatggcatgcggatttgttacaagtatactgattttcttgatgaccaggttgtttttactggctttgcctatggtggtctgtcagaattatctgaagctgagtatacttcatgctcaatgggttcgaccatagcaggagaaattggcacttttggctacagaccttctgtcttgatggacatgcttgctggcaagagagccgaagttggtacaaaagtgggggcctacatgagaacattttctggcgattgctcaccttcagatcttgagacagctttgcagcttgtttatcaactatttacaacaaatgtggagccaagggaggaagaagtaaaaatagtgatgcaaatggcagaggaagcaatctatgctcaagagcgcgatccatacacagcatttgcgaatcgtgttcgtgaaataaattatgggaactcatacttttttaagccaattagaataagtgacttgaagaaagtggatccaatcagagcgtgtgaatatttcaacaattgtttcaaggatccatcagcttttacggtggtaatagttggaaaaatagacccagccatctcacttccactggttctgcagtacttgggtggaatacctagggtacaggatgctactcaaccacttagtcgtgatgatctaagaggattgccatttaagtttcctgcaaccatcattagagaagttgtccgcagccctatggttgaagcacagtgctttgtacaactagcatttcctgttgttcttaagaacacaatgatgactgaagatattcactatgttgggtttcttagtaaacttctggaaacaaaaatcatgcaagtacttcgcttcaaatatgggcagatctattcagttaatgtagctgtcttcttggggggcaacaaaccctcaagaactggagatgttcgtggagatataagcgtgaatttctcatgtgatccagacatatcatctaaactggttgattttgttctggaggagatatcatgcctacaaacagaaggtccttctgaagaagatgtattgtccatcctcgaaattgaacaaagagctcatgaaaatggattacaggagaattacttctggttggatcgtattctacggagctatcaatcaaggcttttttctggagatattggatccacctttgcgttccaagaggaggggcgtataaaggttagggatgctttgacaccacagagcatgcaatcagccttgcaacgagttatacctttcccttgcagaaagcagtacactgtggttattcttatgccaaagtcatcctgttgggcgtcagtgaagtcaatgcttagctggagttctaatggggtcagcagagatgctaagatcctcgctggcatggctggtgcactggtgttggcagtgagtttgtggaggtactctcgtagttcgttaaaatcttagtgtttgatacaactgaccgctttttggggacttccagtcagatctgaaaatggatcaggttaggaactgatacgagctgtcggtagatagatatttgttctacctgagcaccgacccggtgttcggagatctggtaacaaaagaggccatactatgacaaatttggtagctaacagattcgttgccgcatgtgtgcgtgcagtcctgtaatctcattcgttgtaccgcggcacatgtgcattagtcgtcggtgtatagtaatgactatcctcccatttgatttcataggcaggactgaagtagtggtcactgaccaccgtggcgggacggtcgaaactggaaacccaacattgtgatagctttactggtccaatttctgtggacggctttgtacctgtacgtttttccgtttcctatgacccagaacgaggaaaaatctataatgagcaggaaatgtgatattcctttatgctgctccgttggttttcatatattggctaggacagcgtccaagggtagcgttgggaaccgcgacgtccaagaaaggatagtgttgaaacttgtgacgtttaaggaggtgtttgtttgagattataatccggc

SEQ ID NO: 17346 - DNA, 1952 bp, Zea Mays
aagagcacacggaagaagagtagtgagcacggaaccccaccaggcagaggcagtaagccaccagctgcagccgccagcacagcgcagggcagagggagagggagggcaccggcacaccatggccgtggggggccttctgcggggcctcgtttcgccccccgcctggctaccctgccatgagctcttcgcctcctggcaccactggcttccctccctcccgcgcctccgcccgcccgcatccgacggcttcaagcttctcttggtgctgctgctcttctccgccgctctagccgaggtccgctacatcgcctcctcctccatggcgcccacgcttcgtccaggcgaccgagccgtcgccgagaaggttacatacttgttccggaggccatctattggggatatagtgtttttcaaagtaccgactgctgtgcagaattatggtgtcaataaggatgttgtctttattaagagagtattggcaacaccaggagacttcattgaggtccgacaagggcagcttattgtaaatggtgtcgcactaaaggagcattacgcagcagcaacgtcattgtacacaatggaagcaatggtccagagatctttaaaagtcacaagaaagaagatgatcaaaaactggactggctgctccatgttgttgacttcttgagtgccccgttgtaatcaatcgatcaatgggcctcagatggtggatgatctttttcttattggatggatgggtgggtacctggatcctcagtcagctgaaagtaagtattctcgtactcctgcagcgccttcctgaaggtcacgtatttgtcatgggtgacaaccgcaataacagctgtgattctcgtgcctgggggcctcttcccgttgccaacatcgttggaagcgtcttccttcctgccggcgccgatggcgagcatggcagccgtcttcggcgaggccaagccggacaaatccaacaaagatgccgatgctctcctgcgccgacccgtgctcttccacgcccactcccagggcggcctccgcgtcgtcgccaccgacctccactccttcgcttggcatcgctccctcgacctcgacggcctccgcgacctccaagatgacgttggcatcgctggctcctgctccgacttcctcgactacctctattcttccttgtcttccgaccaagtcaggctcttcttccctgccgcggccctaggtcctgatactgctgagcttgtggctaccaaggcaaagggactacctcgcatcactctctctctcgatagagttgccgcatctgcgctcaaagatgtcattgctgatttctcccttgcgctctatgaatcttacaagaccaggcaggaacatgcatccagagaacaagaacgagtgtcacagctcatggaaaatctagactctgaaagagaaaaaaacgaagtaatgcaaaagcaacttgaagccctttcattcctcgacaaaagaaaggctacaaagccaaagcttgtgactgataagtttccaagtgtgtcgggtgcacctccaagctctgatcaaatgattgttgctgtacagcagcaaacaccagtggctttacctagcaaagttcctcctgctaaaggtacgaagcgcgtggcccctttgcctcggagggcaagagtacgaggagctttgttgcaagatactgaagaaaatgctgatgataatacttagatattgctgatttatcagcattgattaactctttggcatgtaaacttattagtacatttctgctggacttatgtcaaacttgtggaattaaagtacacgcagctcatggtgtagaaaaggtatgagactgtgttcctacaagaaaggattgtttccctagaatattgtggcttttgaactcgtctgtgatgctgctttgatctcgatgagcttagggtgcctatcaatacacatctatagctgtttcagtg

SEQ ID NO: 17347 - DNA, 551 bp, Zea Mays
atgattccagttcatgccaacctcgccgccgtggaccgttgccatctgtgcatctggattccataaaggcacgcgtgccctgacctctccacaccccgcgtcccaccaacttccattccctaccgcccgcccaccccactccactccgctcctcccactcgagccatcatggccctcgcctcccgcgccgccgcagccgccgtggcgtgcgtcctcctggcgctcgccgcctccgccgcgggggcgggctccaactcccctgcaccggcgccggcggtggactgtatctcccaggccgccagcctgatcgactgcatcgactacgtccagaaggggagcagcgcgcgccgtccgtccgctgcctgctgcggcgaggtcaagaccgcagtggccagccccgtcatcgtgggctgcctctgctccctcgccggctccaactccagtaacctgggctttcccatcgacatgaagcgcgtgctggcgctccccggcgcgtgcggcgcgtccaacgccgccttcagcaagtgcaacattccactcttttgcttgca

SEQ ID NO: 17348 - DNA, 2829 bp, Zea Mays
taatttttgtttatttcttctaaacactaagatactttccaagaggtaaagagcaagcgcgacaagaagaaagagattaaagaggttcctgagacaagatatcgatcggcaaatagttctactaatcgaagccttagaagtggtgcagatcgtggtggacgtagcaattctgtgcactccagctctactgataacatgacctcaaggccaccagtctcagggtcttgtacggcatcagttaattccaatcaaatgcagacaattgcaagttcctctgcaaacaaacatatggttactgatggactagctgtatcattgcaatcatcgtgtgggtttcagcatggtggttggtctgggacacctggtcagttgtcgatggttgacattgtgaaaatgggccgccctcagggaaaggcttctagcaaacctgtggtcacagctgacagaggttatgctggacagtacccatctttgccaagcacaaaccagaacctcaaacaatctggaagcatggtttccccagcagagcttgacaaggggttacaacctgcccacaatttggttcaggttaagaatcatggtcattttactgctgatagcaagctcccatatggtactgattggtctccacaagacgacccaacatctgagaaccaatcttcccagcctgagacgtctggtgatccatctttgtatgaatcatcatttcagtcatctacattggttactgatgtagttaattcacatgaaaattcacacttggagttggatgaaaacagcacctttgcaatgagatcaacacctgcctctgagagacacttggaacctagtgacagtattcctgaatacaatgatggaatattaaacaactcaagttcatatcagcctcataattactcttacacagaacaagatgttgaggattccagtgctgatgtatcagcagcagcagaaaatttccagagtttaagcctacataatgatgagttagctgcaaaaaagactgctgaagataaccctgcagtgataattcctgatcatttgcaagttaccaatacagaatgtgttagtttgagctttggcagttttggatctggtgcattttctgggctactcccacaaaagaccactgatagcaatgtggaattccttgttcaagaggattctgcaacagtagatccaatagatgccaggaatcaagattactatgaaagtggtgcagtaacttcaccagcagaagaaaatcttgaggccatgctaggaactaacatggagaatgtcgatgcaccttctgtttcacaggctaatgagctcagtcaggacgtacttgatccttctgtacttaaatatgacgtgtcatcagtttcaagtcatgcttattcgaacatgaacactccacaacctagcacaatagaggacccacaaggaaacaaccaagcacatacgctttcccatttgtcaaacatgatgcaagcaaatcctttgagcactagcagcctattggcgtcaaatcaaaatcatccatctcttcatggcttagagtttgatttgccttatcttgaagcaaaatataacgcaggcacgactacaaatcctagaccagccatatccatgcaggaggccctgaaagcaggggttttctccaacgctcggtctacgcagtctcttccaagtactagcattccgacggggcatcctctccctcagcaattagcacatcacccttactctcagccgactttagcacccatcacacatttcccaaatatcgttggctatccgccgtatttgccacaaaactatgctgcttacctatcttcgggcaccttccagcaagcatacccgagcaatggagcattccatcagtctgctgccgctttgctcggatctggtatgaagtactcggcccccgagtataagaacaacctgtctgccacaggcttacaacagcaacatcagccacaaccgcaaccaccttcatcagtcatctctggttatggaggccttggaagctcaagcaatatacaaggaaattttacccttaatcagagtactggcactggatcaactcttgtgtttgatgatgcattgggcagacagtacaaagacaccagtcaacacatagctctccagcagcccgacaactctggaatgtggcttcatggctctggttcaagagcggcggcgcttccgcctaaccacttttatggttaccagggacagagtcagctgggtggctttggtcaggcgcagcagcaacagccttcccaattcggaggccacgggtacccgactttctaccagtctcagggtgggctgacacaggagcaccacccccagaaccttgctgagggcagcctgaatggcttccaggtcgcaccgtctcagccgtctcatccgagctggcagcatcagcacacctactgagcattgttctcccttgttatggtctgtctctttcgccgtcacaagccaagtttcgcgtgcttgtgcccttactcgatgcagagtaagctgctcggattttagctgagcttgtaccttcagcgctgagaagggtcccaggacccaggcatacaacagttagagcgttttaacatgctgcgtgcgtgcgtgtgtgtgtgttgccagaccgatgccttgtggtttttcgatagcgagttatatgtgcggaggcgcagtcatgtataactgagacatgataacataacaaccaatcgtttcgcttgcatttttttggtcatgcacacatgcggttatcgcttcaggaagaaaaaaaggagcacctctgactcagcttatggattataaatattttcaatctcacca

SEQ ID NO: 17349 - DNA, 2007 bp, Zea Mays
ctagaagaggtaccaggggcaagcagggcagaagaaactcagagccatgtccacagaatgtacttcatgggacctaatactttccgagagccctggcatctcccctactcacctcctgatgcgataattggaattgtttatgaagatgctttcaaccgttttattgatgagatcaatttggtggctgcatatgagtggtgggaaggatctatacatagtatactttctgttcttgcgtatccttgtgcctggtcttggaagcaatggcgcagaaggaaaaaaaaccatcgtcttcaagagtatgttaaatctgaatatgatcattcatgtctccgctcctgcaggtcacgggctctctataaaggcttgaaggttggttcaactccagacttgatggttgcgtacatagatttctttctcgggggtgatgagaaacgacttgatgtagcatccaccattcagaagaggtttcccatgtgtctaatttttggtggtgatggaagctatatgtccccatactatctacatagtgatacattgctatcaaatcttcttggccagtatgtatctactgcgatctggaatagattagtcgctggtttgaatgctcaattaaggacagtaagacaaggaagtgtccgttctactttgggccctgttgtttcttggatcaacagtcatgggaatccccaacttgagagacatggtgttcgagtggagttagggtggttccagtccactgcttctgcatattaccagcttggtattatcgtagctgtgaatgagaacttctacaagaatctccgccaccatgagcatgccacagaattttgtgaacgctcaaggaagaacgttgcagttccacttcaggatttcaatcaggcaaatctggatcagccttgcacaagctatgctgtttctagaaagcgattgacaggtggagtcaatggtgggatcataaatgagggaacgctcaagtcactgcactataaaagagactatctctttccattctcattgttattgcgtaattccaggcctctaggctatgcggaaacattgcaattgctcatttgtattgtacttctgggtgatttctccatcaccctgcttatgcttgtacagtactattggatatctgtcggagcttttcttgccatactgctcatcccccctcttgctttgctttcaccttttcttgctggtctcaatgcactttttagccgaggactaaaacgatcttcagtgacccgcatttttgcactttggaacattacttctgttgtaaacattattgtagcaatcatatacggctctttgtatttttggctctcttctttggcggtgtcctcagttcatcaagtatacaacacaaaaagcttcaagagtagagaagacaatgaatggtggatactgcctactatcctttttctcatcaaatcactgcaagctggactagttaactggcacgttgccaatttggaaatccaggactactcgttatttagcccggacccagatagattctgggcaatgtagtcgcctgcagcaagctaagaattgcagaaagcatggtttagtgatcgcaagaatggcaagtattaattattggatgctgaatatttgcgttttgtcccttgcaacgtcatcagcccaatacaatctctgaatctgaaggggtctaacacgctggctggaacttccttctatttatgggaagcgctcctgcgtagtgcactagtgcagatatgttcattttctttttctcagtttttttcccgtcttggtcgtgtgcctagaataggtctgtcgctcggtggggattagatttgtgcattttctttggttcaaattaaaccgttgattcgagtgtacagcaagaaactattgtgattgtcgctctagatgtacatcactgtaagtataatagtagaaccatttcaactgtatacaatcctcaaaggaaagtatgtttctttctattttctttttcctattgtcatcgtt

SEQ ID NO: 17350 - DNA, 1945 bp, Zea Mays
accgattctagcgtagtctacgagccaggccggcgtcccccaaaatcaccggcaggttttcctcggttcccgttacgtatgtggacacctgaactcaacgcaaagaccacgaactgccgtcagagaagacgctagtaaaccgcccgccgccccaactcacgaatcggcaccgccacccaacggggctgaaggcccagccctccaccctccgggcaccagtgcgtgcgccgtcgacttcctctcaccttctcgctcctcgagaacgactccatagcgcaccacaccagcgcggcgacagacagcccgcgaggagaaaaggtagaagaggaggggcagggagagccatacatactcaccggttggattcggtccaatccaatccagccggccgcggcgtgaccagccgatccagagggcgccgaatcgatctgcgggggcggcgcggcgatgcggagggctaccgctggggatcccggtcgccgcgggggatgcgcatgagggcgtccggcccgcgaatcttctggtttggcgggagcccagggggcgcgcaccccggatcggcggcgcgcggcgcgggcaggatcgtgtcggtggggctgcggcagtgaccgcgggcgcgggggagggtgagaagcggcaactagcacttcgagtcgagcgggcgcgatggtgagcggccacatcttccactgccggaagaactcgtggccggcggaggagtacgtcggccggaccgcgctgcagctgttggatttcgatggcggggcgccgccggagcaggcgtggcggaggcggctcaacagccacgcgaacatcctcaaggagttcagtgtcactttcatggaggcaatgaggatgatgagccttggcctgagactatggtcgtatgttcgggaggaggcgtcacatggacggaaagcaccgatcgatccgttcacaaaagagcgctgtaaaccgtcagcttcccagggtgtgccacttggtgggatggggagcggaagcatttcgagaggtttcaggggagagttcaagaattggcacatcatacctggtctttgtgaaagttcgccggtcatggagaaccagttctctatatttgtatctcgagacgggggtaataagaaatactcatcagttttggctcctggacatcatgaaggtctgaagaaaaatagtgactctggaatttcttcatgggactggaatttaagtggtcaacactcgacctatcatgcattgttccctcgggcatggactgtttatgatggtgaacctgatccagaccttaaaatctcatgtcgtcaaatatcacctttcattcctcatgattacaaggatagcagtcttccaacatctgtatttgtgtatactctagtaaacactgggagagatcgtgcaaaagtaagcctgttaatgacatgggcgaattctattggaggtttttcgcataattcaggaggccactacaatgagcccttcattgcggaagatggagtatcaggagtgcttctgcatcacaaaacagccaaggataatccacctgtcacttttgctgttgctgcctgcgaaactcagaatgtgaatgtgacagtcttgccagtgtttggtctttctggagaaaaccatgtttccgcaaaggaaatgtggaacaccatgctacagaatggtcactttgatcgggaaaatttcagtgctggtcccagtatgccttcttctccaggacagaaactctgtgcagctgtctcagcctcaacttgggttgagccacatggtagatgtactgttgtgtttgctctggcttggtcctcacctaaagtaaagtttcaaaaaggatgcacatataacaggaggtacacccaattctacggaacttctgagaaatcggctgttaatttggtacatgatgccttaacaagggggcggggtgcagacccagtgctagaga

SEQ ID NO: 17351 - DNA, 2454 bp, Zea Mays
gttttcttttgtttccatatgagatatgactcattaatgccatgccaggtatgaaattctgcatggtgagaaaactaaggattcttgcaagaaagggactgagcataatgtcaaagtggaagatttgtactgtgacaaagatttggatgcagcattggattcttttgacaatctcttctgtcgacgatgtctagtgtttgattgcaagctacatgggtgttctcaagatttagtatttcctacagaaaaacaaccagcttggagtggcgttgatgacagtgtaccctgtggtattcattgccataaactggcatctgaaccagatgctgctgctggtgctgatcacatgctttttgatgttgaggagccaactcactcatcagacaatgtgatgaaccagccaggttcaaataggaaaaagaacggctccagtggaaggaagactaaatctcaacaaagtgaaagctcttcaactgcaagagttatctcagaaagcagtgattcggaagtacatccaataagcaataaatctccacaacactcccctagtccctcaaaagttaaaattgggccgaaaggtggaatcagaaagattaccaatagacgaatcgctgagagaattcttatgagtgtgaagaaaggacaaagggaaatggcatcatctgattctaattttgttagtggatatcttttggcaagggacatgaagcttaggtctgatacacgaaatggaaataaggaattaattgtatcctcacaacagagttctccaagcacaagaagttccaaaaagaagagtacacctcaaattgggaacagctcagcttttgctgaggctcataatgattcaacagaggaagcaaataaccgtcattcagcaacagatggttacgatagttcaaggaaagaagaattcgtcaatgagaatttatgcaagcaggaggtgtacttgagatcatggaaggcaattgagcagggacttcttgtgaaaggattagagatttttggaaggaacagttgtttaattgctcggaaccttcttggtggaatgaagacgtgcaaagatgtttttcaatatatgaattatattgaaaacaacagtgcctctggagctcttagtggtgttgattctcttgttaaaggatatattaagggtactgagttgcgcacaagatcaagatattttagaaggcgaggtaaagtccgtcgtttgaagtacacctggaaatctgcaggttacaatttcaaaaggattaccgaaaggaaggatcagccttgtcgacaatataatccttgtggttgtcaatctacatgcggaaagcagtgtccatgtctttcaaatgggacatgttgtgagaaatactgtgggtgtccaaaaatttgcaagaatcgttttcgaggatgtcactgtgcaaagagccagtgtcgcagccgccaatgtccatgttttgcagctgacagggaatgcgatccggatgtttgcagaaactgttgggttgggtgtggtgatggtacattgggagttccaaaccagagaggagataattatgaatgccggaacatgaaactgcttcttaaacaacaacaaagggtcttacttggaagatcagatgtctctggctggggagcattcctcaagaatagtgttagcaaacatgaataccttggtgagtacactggggaactaatctcacacaaagaagcagataagcgtggaaagatatatgatcgtgagaactcatcgttccttttcaacctgaacaatgagtatgttcttgacgcatacagaatgggtgacaagctgaaatttgccaaccatgcccctgacccgaattgctatgccaaggttatcatggtaactggtgatcatagagtgggcatattcgccaaagaaagaatcctcgctggtgaagagttattctacgattaccgctatgagcctgacagagctcctgcttgggcccgtaagcctgaggcgtcgggagcaaaggatgatgggcaaccgttcaatgggcgtgcaaagaagctcgcccaaaacaaccgaggctgaatctgatttgattctttcattgttaggacaaatttggcagccattcaactaatacaaggaacctgtcattcataggccccaatttatttgaactcgtcattgtaactcgtatgtgcttgaattctccatggcatctggtcctgccatccgtagagttaggtcccgtttgttttgtttgttttgaggaactaaaaattaatccctctattttagtcacattgagtctctagattgtcaaacggcgggactaaaacaaagactaaactatttgtctctagttcctcaagccatgacttaaagggaataaatcacataaattttatttttatccttcctttatttcagttacactaatgatgtaataattgtatgaggtattttggtcctcttagagcatctccaag

SEQ ID NO: 17352 - DNA, 2137 bp, Zea Mays
catgtcgggaagcactcaatcgtcaacttgggagattagcagttactgaaatgatcccagttacatgatgttttgtgctcgagtggaccatcgcaaacagatatctcactggactgggcaacccaactttgacctgcagaatgtctcatcgggtcgaaaggatggccctcatctcctgggtagatcaaaggaaataacacacatgaaattaaggagagttgctgtaaggaagaaaatggaagtagtgcagcaggatgatgaagcgttagttaaacttgagaatgcaggtatcgaacgttcaaaagctgttgactctgctgtgctgggaaaatacagcatctggagacgtgaaaatgaaaatgaaaaggcagattcaagggtccgtttgatgcgagatcaaatgatcatggccagaatatattctgttcttgccaaatcgagggacaagcttgatctctatcaggagctgcttgcaaggctcaaggaaagccagcgctcccttggggaagctactgctgatgctgaacttcccaagagtgcttcggatagaaccaaagcaatgggccaagttttatcaaaagcaagggatctattgtacgattgcaaggaaattacccagcgtttgagagcaatgcttcagtcagcagatgagcaggtccggagcttgaagaagcagagcaccttccttagccagctagcagctaagacaatcccaaatggcatccattgtctttccatgcgcttaacgattgattattatcttctctctccagagaaaagaaagttccccaatagtgagaacctggaaaatcctgatctttaccattatgctcttttctcggacaatgttttggcagcatcagttgtggtcaactcaaccatcatgaatgctaaggagcctgaaaaacatgtatttcatcttgttactgacaaactgaactttggggccatgaacatgtggtttttgctgaatccacctggggatgcaacaatccatgtggaaaatgttgatgacttcaaatggttaaactcttcttactgccctgttctgaagcagcttgagtctgcagccatgaaagaatattatttcaaggctgatcgtccgaaaacactctctgctggttcttctaatctgaagtatcgaaacccaaaatatttgtccatgctcaatcatctaagattttacctcccacaagtctatcccaagctgaataaaattcttttcctggatgatgatatagttgtccagagggacctaactggactctgggaggttgatcttaatggaaatgtaaatggagccgtggaaacatgtggagagagttttcaccgatttgataagtacctaaatttctcaaacccaaatattgctcagaattttgatcctaatgcatgtggttgggcttatggaatgaacatgtttgatctggaagaatggaagaagaaagacattactggaatttaccacaaatggcagaacatgaacgagaacaggctgctctggaaactggggacattgccaccagggcttctaactttttacaagctgacacaccctctggacaaatcatggcatgtgcttggcttagggtacaatccaaccattgagcgctcagagatagacaatgctgctgtcatccactacaatggtaacatgaagccctggctggaaattgcaatgataaagtatcggccttactggacaaagtacatcaattatcagcattcctacattcatggatgcaagatcagccaatagaaaccaccctcagatattcttctgtgatgaacattgaagttggatgggactcaaaatgaaatcagtataactatcacatgttctttattcgtgttatattagatttgttagttatcacgtgtatgtagtttcgtcgcccttttgtggtgctttctcccctagctcattgttggttcttgtccctttttgtcatgaaaagaatgatgagctctatgattctcatcagctgataaatgtaatgtctgaatttctgtcggtggcaaattaatgatcccattcaaacggtatcaagtgttcgaacattcatgctagcatttgatggcaggttgagagttatttacgagcatctgttcgttcgtggttgagattgttttttta

SEQ ID NO: 17353 - DNA, 4638 bp, Zea Mays
gcgagcggccgtctcaaaaatcccgcccactctctctctctctcaccaggcacccccattccctccccgtcttcctcccccatttctaccacggcctcggcatcccaagtctcaaacgtcaaacccttacctcatcagcgacgagaggggagccccgcctccgcctcctgcttctctactatgaacaacttccatgtctacgaggccatcggccgcggcaagcactcgacggtgtataaggggcggaagaagaagaccatcgagtacttcgctgttaagagcgtcgacaagttgcagagctccaaggtcctcaacgaggttcggatgctccattccttagaccatgccaatgtcctgaaattttactcttggtatgagacaaccgtacatttctggttagtgttggagtattgcgttggtggagacctgaagggcttgcttgaacaggataaaaagcttcctgaaaattctatacatgacctggcttacgatctcgtcaaagcacttcagttcttgcattctcaaggaattgtatattgtgatctgaagccatcaaacattctgcttgatgaatttggatgcatgaagctgtgtgattttggattagcaaggcgcttaaaagacattgagaaaaccaatcctggagatgtgccacaacccatgaggggaacaccatgctatatggctcctgagttatttcgagatggaggagttcactcatatgcttctgatttctgggcacttggatgtgttttgtatgaatgctatacaggaaggcccccttttgtaggtagagaatttacgcagttggtcaaatctgtaatttctgatcctacaccacctttacctgataatccatcaaggtccttgcaaaatttgattgattgcttactcatgaaagatccggcagaaagattacagtggtctgaattgtgtgaacacaacttctggagaacaagtatcctgatgattcctttacctcctcagcctgcttttgacaacatgattgaactttctgctacaccatatctagctgagagaaatggtgacaaaccttccagacagttgacaccacctaaacatcgtgaaaatattggccttcggaagaaggatgaaaattctactaagccatccatgacacctgttaaaaatgtgcaaagtggcaagaaaaatagtgcaaaaccaaaagctgtgggtttcaaaggggtaaatatcctccgaatgtctcgcattgctaaattgaatttgcaaagggaaagggataaggagaactacaggcgtccgcccacagaaacaactgaaaatgagactgaagttaatatagaaaataatgacatggaacttgattttggtgaaaatccagagggtgatgcacctgatgacaccgatggatcagataatcctggatctgcaggaaatgaaaatcctcaaagcactgacgctaatgaagagaattatatggaaaatcaggttgacatgcttacagatgagggatcagttaagcctgatatcatggtggaaactgagcagaattcttgttcagataacctggatgtggcggcaagtccacctagtagcatgcgaaaagcacatcgtgcaaaggtaactccatgtcctgcaactggttctgagccatctaacatctttgaagcattctggcatccaacagatcttgcagttaaaccagttatgcctattaggaaagcagataaagctgtggacatgatccccacacttccttttgaagctcttacagcaggtgattatactaagttaccaaaggaacagatgaatgcattcaacagtcagatacttcagagtttaagtggaacttatcaggtttcacaaaaacaaaatactatcagatacctggagatgttaagcatgaactcagatgctgcgaacaaaataactaatggaccaattatgttgctactaataaaaatgcttcgactgtcaaaaacttcagtcttgcgtgtccaaattgcctcactcatggggttgctgatacgctattccactgctcttgatgtggagctggcaagttcaggaatttttaatgcactatcagatgggttaagggataaacatgataaactcaggcgattctgtatggcaacactaggagagttattattctatatttctacccagtctgatcaagataacaaggaaatcaatacccaagagtctcctttgaagggtaacaggcctgcaacatcttggcaggttcctagtgctgtaattgcactggtgtcatctatcttgcgaaagggcgaagatgatctagatcagctatatgccttacggacaattgataatatatgtagccaaggaactgaatggacatcccgttttgcatctcaggatgtgattggacatctgtgctacatctataaagcaactggaaagcaagagagtacaaggctcattgcaggatcttgtttggcccgcctctcccgcttcagtccatcatgcattcatttaattctggaaaagatatcattcagggatattgcatccacacttatcaagggaaatggacgtgaacagcagattaatctcaatattctcaattcggcattagttaacagtcacactgtgacaagcatgaaccggtatattctttcattatcagatgacaaacaattggtccctgggctcatttctctgatagaacagggaactgatgttctgcgtgggaaggcctttttgtttgttgctctgctttgcaagaatagtcgaaggtggcttcctcatttcttttgcaatgcaaaattaatatcagctgttgatagatttggaaaagagaaggagggtttcattcatcaatgtacagaagcatttgtgcagttggttgcttctttggtccctggtatccttgaaactgtctccagtgatatacagcagattatgtgtggcaaacgccatggacctgttactgctttagctgggcgagctcatccaaagagcacaattcatctgttccctgtcattcttcgtcttctgggaagtgcatctttcaagcacagagttgtgacaggccatgtattgcttcagttggcaaatcttattaagattttggaggcaccgtttcaggctagggatgatttccaaatgacattgttgcgagttctagaagctgctacagaggagccttctgttatacttgatgaacacacaatattcacaagtcgtatcattccaagcttatctgtcttgtacaacggcaataaagatggtgatgctagatttctgtgtttgaagatactctcagatgtcatgattgtgatcttcagtgactcttcattaacttctgacgaacaaatattaactgatttgaaatcaatctctcagaggcattttctgccactgtacccttcttttgcagaggatgaagatcccatacccatatttgctcaaaaactgctagtaatgctaatggaacatggttatataaaagtctctgatattctacacaaagcaacagtatcccaatgctttgattttttgctaggagatctgtcaaatgcaaatgtaagcaatgtcaagctttgctttgccctggcatctgcacctgagatgaacacccatattctttctcagcttcaagttgttagaaggatagggaacctacttgagtttgtcgctgcaaaagacatggatgattttcttgaaccaaccctggagttttgcagagctttcattattcgtggcactggcagcaacagaagtggtgtcgccctctccgaaaacccagcacttcttgttgacagtgccttcagcatgagtattgctgttgatcaacaaacttgtgtcacggatatatgcgactttggtggcaacatgggtacttttcttgagctagttggcaattcagatccacagataagtaatttagcgtcagactgtgtagtgttgttatccaaggcagcacctcgagaggctacagtgggcttgttgacaaatcttcctaaattaagcactgccatggacttgctgaagcatgagagctccctacgtctgattcgcttattatacggcctagccttctcatgcagacaatacttggcccagggaatgatcctgtcaatatcagtgtcagctttgatgcgagttgaagcacttgtttcagttttcaagggctccaatgatagccttcttgctgatgctgcttcttatttgagcgccgaactgcagcgcttacctcgctgtggttgaagctgcaacttgtccaaggaggcaaggatgcacttgtttttgctgtggttgaagctgcaacatgagctgagcaagtgagcaggacatcaagtacaggtactttatatcagtgactgatctcagttgccacaattgctaagtggtagtttcgctcgtaaatgtgcagccagggtgttttatgctatcatttatgtccagttcggggctgctgtatatggtgcttttgaaccatatttggaaggtggctagaaggaaagaacactttgtttcctcgcgactttggttggcaattaccccagtttcatgtaattctgtaatacctgtaatttctctgagaatactgtagttcaatatcatgtgtaaataaatcatctataaatgcatgtgaagttcatgtacagtagctgttaaagagtt

SEQ ID NO: 17354 - DNA, 1940 bp, Zea Mays
cataccgtacccgtcgtccgcgagtcgcgacccctcgaccgtgcgaacgagcaaaggacaaatatcctcgctcgcagtcgcagctactacgccgccgcacctccgcccgccaccttcttcccggctccagcgatgtcgggggcgatcgggggcgccgaggtccacggcttccggggcgcagcggcgcagctcccgcggtcccgggtgctcgggaggccgatccgggtggcgccacccgccgcggcccggccgggcggtgcgtccgcgggtagcatacgcgccgtctccgcggttggtggtggcatgggaaggacacaccgagtggaaactacattccctcggctggctgatccattgggttatgttccaaaagaagatatattatatgctataaaggccatcgtcgtcacacagagggaaaatggaagaagggatgaccgcaagtatagtaggatgaagtatttgattgaccgttggggaatagataggtttcgggctgaagttgaaaaatattacgggaagaagtttgaaagtttccgaccattgccagagtggcagtttaacagctaccttggctggcaagaacagggtgatgggaaattattctatggagtgcatgttgataatggtcgtgttggtgggcaagcaaagaaaactctacgagagataattgagaagtataatttggatgttagtattaccccaaaccaaaatcttattttatgtgggattgatcaagcgtggagagaacccataactacagctcttgcacaagctggcctgctggaaccgaaggatgtcgaccccctgaatttaactgccatggcatgccctgccttgccactgtgccctttggcacaaacagaagctgaacgggggatcttacccattcttaaacgaattagagcagtcttcaataaggttggtatcaaggattcggagtctgtggttgtgaggataactggatgccctaatggatgcgctagaccatatatggcagagcttggttttgttggtgatggcccaaaaagttaccagatctggctgggtggaacaccaaaccagagtacgctagcagaatcatttatggacaaagtgaagcttgatgacatcgagaaggttttggaacctctctttacctattggaatggcacacgccaggaaggcgaatcttttggaagcttcacaaaccgaacaggattcgacaaattgaaagaggtagtgaataagtgggcagagtcaccatcagccgcatgaagatttcgctttcgttggataaaatcccaggctcgcagcacaattttggccacgggattaattatatgacgaaggaaatccagataagccgagaaatggaaaaaggaagactcgggttgtgagttgctatgtttgttgggttgagtgatcgaatttttttgtgtgtgctctcaaggagacctctgtgaacttgaataaactccacacggagttgtgccaaattagaccgaggcgtccgtgaacttgaatcagttcctcgggatgttgtgcctgagaataaatcccaccgaggcgtctgtgaacttaattcaattcgtcaggaagctgtgccttagaataaattcgacgggtgtccaattttcttgtcattctagcgagatgcctcatgccctcatgattggaacgaagtgaggcccttgtgtggtcggttgagaaactgggacatgggttgtgagcgctattttcaagtcgtctgattaaaacagtcgtccaattagtcagtggttaatcgtccaagtcgatttgaactaattacaattaattgtctaattcggtcagccataacgatcagcaagtccttagacttgaaaataatggttgtgggacgtgcttttaaaaccttagtacgaaagggtaatactccatatgtatgattggaacgaaagttcttggaacaaggaaca

SEQ ID NO: 17355 - DNA, 2127 bp, Zea Mays
ccagaaaaccccaactcccgcggcgcaaaaccctagtagaggttgcgcgggacactgctgtggttccggtgatggagggggaaggcgacgccagtggtagcgatgaggtggtgcagctggaggacgcggtggagctgctggtggagcacctcgtggtgccggtgctgccgcgcggccaggtagaccgggaggaggccctgtcgcctgaggctcaggaggctgtggcgcgtcaggtccacgcgacggttctcctgtacaactactaccaccggaagcagttcccgcagctcgagtttgccaaccccgaacggttctccatgtctgcctccctcagcgtcaccaacaaaaatctgctcatgtacctgaaccaggcgcagaaccgcctcggcaacggagtgggggccgggctctcggtcactgacaaggcaatcgtcgacgcctgcgacatcgctgaggcgctcgaccccacgaaggactcccccgagatgaccacgtggccgatctccaaggtcgctgttctgcttctcaatcggacaaagaaagagtgcgtgctcgagcatggctccgaaaccaagggcgtctggtcgatgtttgagaaagagatcacgacggcattgggtggttcgctcagcagtgacatgccagtgcaggggtcgagtaataaatccgtgggacttccttcggaaccgtacgtgcttcagcagattgcatattcagaggtggaactcaaaacaggtatgaagcatacaaatttgcgctttatcgaagaacatcgggtgtactcactgagtaagaaggggacagctaccatgttgttccttctgcactatgatcagactgtcgatagcaagcttaaggaaatgcctttagatgccctgatcgaaagggactggcctttgtgttcttcactgagcgtgccaaaggagcaggtatttcaaaatgggaaatcttcatttccctctgaaatagaagaaagtttgaaggaacaagaagctaatagtaatagcaagactaaaatgaaaaaaatgccaacagacgtttctactccaaagaaaaataagcaggtagtaaaagcagttcgtgacagtggcaccaacgaaagcagcaccagcaaaaacaaaaaaggcagcaacacgaactgcaaaagaacatctgaagcctgcaagactaaagttgctacctacgcagagcatggggatggtcagagccctacaaaagacttacaagccagtgcccaaatggacaagagcagaacagagaagaacactaaaagtagaaatgtgccccaaaatatctttctgacaccagatgttggtcctgtaaataatgaccatgccttgaaaagccaaaaggagaaagtcactgataagtctggtggcatcacaggtaacatgaatgttcagaagtatgcgactctgcaattactttggaagatgcgagatgatacactccatgagcattttatgcttggagatcgatgtgctgagtacgaaatggacattcaaacaatcttgacagaaacagagatgacacctaaagtaatgtcaatcctaaagaaatatgagaatagttggaaggcgatgaaagttgccaatccaattagctctggagaaggatgccaaaccatgaacataaagaggaagaaactgaaagaagccatacttctacgcaacagatgccaggaactggatgatatatgccgtgagagcaactggattcttccaagatacagagtacttccttcagttaccggtgatatgtaccaggccagtgtccaccttatgggcccagacttcaacttgagtgtagatggtgatgtgagggttacccctcacgaggcacgagactcagcagcgtccaacatgctgtctcagcttcagcagaaggcaagggaaggctaggagagcggcatgtctccacagaacccttaatgctgcatccttgtgggtatcgacttgcatgcgacaggaaagaacagccatcacagctcagaaatgaacatgctggttgtcaaaacaaaattctatctatctatttgaacttaagaattctgcaggtgtggttctgcgttttcttgttgggcaatctggattttcacttgctatcttgacttgaccatgttctttt

SEQ ID NO: 17356 - DNA, 3177 bp, Zea Mays
aacttcaaactatcaagttatatcaacttggtgacacttgcccggcctgttgtaaaaggtgctatggagggcataaatggtacagtttttgcctatggtgtaacaagtagtgggaagacccacacaatgcacggcgagcacaattgtcctggaataatcccactagccatcaaggatgtcttcagcatgatccaagatagtcctggaagagaatttttgctccgtgtgtcgtaccttgaaatctataatgaggtgataaatgatctacttgatcctactggccaaaatttgcgtgtgcgggaggatgcacagggaacctatgtagaaggaataaaagaagaagtagttctgtctccaggacatgctctttcttttattgcagcgggtgaagaacatcggcatgttggctctaacaacttcaacttatttagcagccgaagtcatactattttcacattgatgattgaaagtagcgcccgtggtgatgagtatgatggcgtcatgtattcacagctcaatttgattgatctagctggctctgagagctccaagacagagactacagggctaagaagaagggaagggtcatacattaacaagagccttttaacgcttggaacagtcattggcaagctcagtgaagggagggcaacacatataccctatcgtgattctaagttgacccgtctgctacagtcatcattaagtggccatggtcatgtctcactaatttgcacaattaccccagcatcaagtaacatggaagaaacccataatacattgaaatttgcaagcagagcaaaacgtgttgaaatttacgcctctcgtaaccggataattgatgagaaatcattgatcaagaagtatcagaaagaaatatcctctctaaagcaagaactcgatcagctaaggagaggaattgttggtggtgccagccaggaagaaattatgagtttacgtcagcagttggaggagggtcaggtcaagatgcagtctcgtctagaggaggaagaggaagcgaaagctgctctaatgagcaggatacaacgcttgaccaagttgatacttgtttccaccaaaaacaatattcctgccttgacagatggtcatcagcggcataattctgtcagcgagcaagataagttaagcacttcacaagatagctctacacttgtccaaaatgagggcacaacaaaagaccacctaccagactccttagatgagatcaaccaattaagatctggcagtggtgaacattcttcagctacttgttctgctacagattcaatgcaggcaggattcacggcatcagatcatatggacctactgattgagcaaattaagatgctcgctggggaggttgcatttggtaccagttcgctgaaaaggctaatcgaacagtccatagatgatcctgaagggtcaaaggaccaaatagagaatttagagcgtgaaatccagcaaaagagaagacatatgcgagccttggaaaaacaaatcatggaaagtggcgaggcatcagttgctaatgcatccatggtggatatgcagcagactattacaaaactaactgctcagtgcagtgagaaggcttttgagttagagttaaagtcagctgataatcgtgttctccaggagcagctacaacagaagaatgcggaagtcaacgatttacaagaaaaagtttttcaccttgagcaacaactctccgcaaaagtgggtatatcccctgagcaggaaactgattgcgcacagcaggaggctattgatttgaaatctaaacttcagtccaaggaagctgaattcgaaaagctaaaattcgagcatctgaaaattactgaggaacagtgcgacttgatcaatcaaaaccataaattaagtgaggaagctgcatatgcaaaagaattggcatcttcggctgctgttgaactcaagaatttggctgaagaagttacaaagctatctgtactaaatgtgaagcaagcaaaggagttactagttgctcaggagatggcacattcaagggttcatggtagaaagggtcgtacaaccagtaggggtagggacgaggttgggacatggagccttgatttagaggacatgaaaatagagctacaggccagaagacagagggaggctgctttggaagctgctttggcagagaaggagcttctcgaagaggagtacaagaaaaagtttgacgaggcaaagaaaaaggaactgtctttggaaaacgatctagcaggcatgtgggttcttgttgctaagttaaaaagaggggctttaggcatatccgattttaatgttgatgatcgaactgttaacctagctgatataactaatggcacaaaggaaaacaaaggtgaaaagaattttgctctagttgagaagcaagtttcagaagattctgtgaagtcgctgagcacagaagaacatagaagtccagagtttgaaccacttcttgttcgtctgaaggctaaaattcaggagatgaaggaaaaggacactgatcccctgagcgataaagatgggaactcacatgtctgcaaagtttgcttcgaatctgcaaccgctgcagtattgcttccttgccggcatttttgcttgtgcaagccttgctcgcttgcctgttcagagtgccctctgtgccgcacaagaatagcagacaggataatcacgttcacatgaacggcgtgctagcttcaggtgccaaacacttagatgcttgcatgttggtgctcatgccaacgctatccctctgaaatgtacctaatgatgtgctgtgtatctctgacaggccattctgaagcatggcgcactcttgtaaaatggtcggtggtatatgtttctctttttttccttagcaaagaaggtgccttttatgttccttctgtgttgtatcgccattctttgggttcccctatatggctatatagcttcaccttacgttctttatcaaggagctgcaaacgatgagaccccattggaatgcaggaattgtacaggaatttcacaaaagttcattttcatagaaaaaacacaacaaaaaggcaaaattactgtgttctagtggagccctgacttctcgctctgcaaatctctatctctgcaaatttttcaaaaaaactcctacatttttttataatcaatctgtacttatagtctcttatctactat

SEQ ID NO: 17357 - DNA, 3440 bp, Zea Mays
gacggacgccagcagcaaaggaggaaggagctgaactgctgcaggtaatacatgcatatataacccgaccagcaatcgttctgtgctgtacttgagtcgaggccggcgccgccgccgcggcagcgaggaggaggaggagcagaggcggcgaccatggcggcggggaacgagtggatcaacgggtacctggaggcgatcctggacgcgggcacgaggctgcgcgggccgtggcagcagcagggcggcgcggcttcgctgacggccgcgctgccgaggctgctggcggaggccggcggccagcagggcgccgcggcgtacagcccgacgcgctacttcgtggaggaggtggtgagccgcttcgacgaccgcgacctccacaagacgtggaccaaggtggtggcgatgcgcaacagccaggagcggagcaaccggctggtgaacctgtgctggaggatctggcacgtcgcgaggaagaagaagcaggtgcaacgggagtacgcgcggcagctggcgcagcggcgcctggagcaggagctgggcagccgggaggccgccgaggagctctccgatggcgagaaggacggcgcccccgacgccgcccagcagcctgtgtcggtggcggcgcccgacggccggatcgccaggatcgggtccgaggcccggatcgtgtcggacgacgagggcggggacggcggcaaggacgacaggaacctctacatcgtgctcatcagcatacacgggctcgtccgtggcgagaacatggagctcggccgtgacgctgacaccggggggcaggtgaagtatgtggtggagctggcccgggcgctggcggcgaccgccggcgtgcaccgcgtggacctactcacgcgccagatctcctgcccggacgtcgattggacctacggggagcccgtcgagatgatcacccatcaggccgacgacggcgacggcagcggcggcggggcctacatcgtgcgcctcccgtgcgggccccgcgacaagtacctccccaaggagtccctgtggccgcacatccccgagttcgtggaccgcgcgctggcgcacgtcaccaacgtcgcgcgcgcgctgggggaccagcagcagcagcagcccgacgccggcgcgggcgcgggcgcggccgccccggtgtggccgtacgtggtccacggccactacgcggacgcggcggaggcggcggcgcacctggccagcgcgctcaacgtgcccatggtcatgacgggccactccctggggcggaacaagctggagcagctgctcaagctgggccgcatgccgcgcgccgagatccagggcacctaccggatcgcgcgccgaatcgaggccgaggagaccggcctcgacgccgccgatatggtggtcaccagcaccaagcaggagatcgaggagcagtggggcctctacgacggcttcgacctcatggtggagcgcaagctccgggtgcgccgccgcaggggcctcagctgcctcggacgctacatgccgcggatggtcgtcatcccgccggggatggacttcagctacgtcgacacgcaggacctcgctgagggcgacgccgacctgcagatgctcatgagtcccggcaaggccaagaagccattgcctcccatttggtcagaggtcctgaggttcttcgtcaacccgcacaagcccatgatcctggcgctgtcgcggccggaccccaagaagaacgtcaccacgctgctcaaggcctatggcgagagccgccacctccgcgagcttgccaaccttacactgatactggggaaccggcatgatatcgaggagatgtccggcggcgccgccacagttctgacggcagtgctcaagctcatcgaccggtacgacctgtacggctgcgtcgcctaccctaagcaccacaagcagaccgacgtgccgcacatataccgccttgccgccaagacgaagggagtgttcattaatcctgcacttgtggagccattcggcctcaccctcatagaggccgctgcgtatggtctgcccgtggtggccaccaagaacggcggtccggtggacatcatcaaggcgctgcacaacgggctgctggtggacccgcacgacgaggcggcgataacggaggcgctgctcagcctgctagccgacaaggcgcggtgggccgagtgccggcgcaacggcctccgcaacatccaccgcttctcctggccgcaccactgccgcctctacctctcccacgtggccgccaactgcgaccacccggcgccgcaccagctgctccgcgtcccggccagcccgcgcgccgcgctcgccgagcatggcaccgacgactccctctcggagtcgctccgcggcctctccatctccatcgacgcctcgcacgacctcaaggccggggactccgccgcggccatcatggacgcgctccgccggcgccgctccgccgaccggccgccgagctcggccgcgagggcgatcgggcacgcgccgggccggcggcagggtctcctcgtcctcgccgtcgactgctacaacggcgacggcacaccggacgccgagcggatgaagaaagctgtcgacctggcgctgtcggcggcggcagcggccggcggccggctcgggtgcgtcctgtcgaccgggatgaccatagccgaggccgcggacgcgctcagcgcctgcggcgtcgacccggccggcttcgacgcgctcgtctgcagcagcggcgcggatctctgctacccgtggagggaggtcgcggcggacgacgagtacgcggggcacgtggcgttccggtggcccgggaaccacgtgcgcgcggccgtgccgaggctcggaaaggccgagggcgcgcaggaggcggacctcgccttcgacgaggccgcctgctccgggccttgccacgcctacgccgcggcgggcgcgtctaaggtgaagaaggtggactcgatccggcagtcgctgcgcatgcgcgggttccggtgcaacctcgtgtacacgcgcgcgtgcacgcgcctcaacgtcatcccgctctcggcgtcgcggccgcgcgcgctcaggtacctgtcgatacaatggggcatcgacctgtccaaggtggccgtgctcgtgggcgacaagggcgacaccgaccgcgaacggctgctccctggcctgcacagaacgctggtcctgccggagctagtttgccacggcagcgaggagctgcgccgcgaccaagacgggtttctggcagaggacgtcgtctccatggactccccgaatatcctcaccctcgccgagtaccaggcggcggtcgacatcctcaaggctatttgagagtccgggattatgatacatgatctgctccgacattccagctacgggcaatcaattgaggacctaggtgctcaacaggtggaaaatactgagcagtagctcgttgaaggcaagttgtgcccttgatcact

SEQ ID NO: 17358 - DNA, 2148 bp, Zea Mays
agcctgatgacattatccaccaggaaaaggagaagagcccgtggccgtggcctggccccagctcccagccccagccaacaaaagagaagcccggcccgaactctccttccatcggccgtcgaccgatccgtctccactccaggatgacgccgaacccaagaagatccggtcctcacgcagtaagcaccgccgacgccgtcacagccgctcctcctctaggtccgaatctccgccccgcaagcgctccaagaagaacagcaagaggattcctgacaagaagagcaagaggagcaagggcagccgcggcggcagccttagacgtcggcaccatagtcttagccatagccgtagccttagtagcagcccttcctcagtagcccgacgcagcagctcctcatgtagcagcagcagcgcctctgagaggtcggtgagcccgccacccaggagcaggtccagagatgtaaggaggaaaaagggcagagggaggggcagggagagggatcgtaaggggagaaagttgcggagatcggcaagttcatctagcatctcagcaagcagtggcagtagcaggagcaagagcaggaagcggatgactgttggtggcactaaggatcgcgctacaactacaagggataagatggaaaagggctacactgatcgccgttcttgtcggtctgtcatgaacgtggacgagcacgttgatggggatgaagacaggctcgccattgccaaggtggtggacaatgatattgacaggcacaagaagaatttggaatcggagagctcaccttccaagaatgccaatacaacagaagagaaagtacctgcaagtggtggaaattcagatgcccaggatctggagctgattcttaggcagaaagctcttgaaaacttcagaaagttcagggcagcagcgaccatgggaggcaaaacagacagtggagctgcagggaaggaagcatcaatagacgatagcgtacacaatgctggcatggaggttgctgatgccacacattctcagagtcaggaaaccagtcttggagcgaggtattctgctggatcacctagatcacagaattttgggaatggtgcgaatcgttcttggaagcaggacaacggtgctggcatgagttgtggtggatcacccggattacttgagcctgctgagactggtggcccgactcaactgaagggaagagcagaagaatcaactcgtttggcttctcagtttttgtcaccacgggatgccaggaatggccgcagtgtaatgcaaaggctggcgccccctccaggtagttctgctagtgtaaaccaaatgttaggaagcagtgcagggctgaatcatgtcgatggagctccaagggttagatcagttgtgagcatacccgctagggaaaggcttgatggtagcacacatactacaccccttagccccagtgaggattcttcccctgttgaaagcggcggcaaagttggactccctctgaatgacactaacaaggctgaaggaaccaatggagagaacagaaaaacaagtgaagcttcggcctctgacggttccgtattgtcacctaccgaagacaagagccaggctagtattgagggtaaagatagttttcagaagaagactttctctagaatgcatgatggagagacggtggaggtgagctacaaagtctacatacccaagaggaccccagcccttgcaaggaggaaactgcagcgctgaaaacgccacaattcatcatcggtcttactatctgcaaaaactataggttttggctggatatacctattctgtgaaccacgagtgcccagcatacatgccttatggaatctggatatctgttgctcaactaaataaacagttttcctacagcaaatgtattaattgcctgggattgggtgattgagtcgttgtaatcagcaaacgtgacgtccaatactgatgaatctgtcacctgcatctattgctgttggcatagtagtattttagacatgcagtagctaccttgctgcaagcggacgttggacttggacagacactgcagaatgcagatgtgcctgactgtactctctagtctgagattgttaagcctgaagttcatatttctgctttatattattgtcgttttgatttgtttgact

SEQ ID NO: 17359 - DNA, 824 bp, Zea Mays
acaatcttgccccccggcggcgtgtcgtccctgctgctcctccagcttctctgcctccactttggtcgccgcctcctccatggtgcctgctgcggggattcacggaggcctcggcgttggtgccgaggaatcacagaagcctcggtgttggcgatgaagcgttgtgagagcaagggagcagatttctagcaacgcgacccttgggagctgtcaacggatgcttcgggaaatggctagtcaaggagaggctattcctgtatccgaaattttctgaagaaagctcgattgtgtggagccctgggactttggaaaccatctgcttgtaatcttgtgttggcaaacctcttgacttaagctccggcaagcaaggaatcatatctgttccaggttgctacctctttgtctagcgaatgaagtcttaaatctcagcaaatgctacatgtgctagcagatttatctctgaacttcctgtgaatgtagaaatatatagaggtactaactttgactcacttccgaactggcctaatattataacatcatctggccattcctgttgtttcggccttgttctgctctccagtagtccagtttgctccgttactttgtttctgaacttcaacttcctgtgaatggaactcgtcaaggtttaggccaagtgcactggttctcatgtaatgccatgtaatcttgatttaatagattattatcccttcgaaacgaactgtcatgtaccataggtttgatcttgtgacgatttaatgccaatgcatcataggcgatcttgaagctgtttacttgacctggtatgaggtacacaaaacctt

SEQ ID NO: 17360 - DNA, 1966 bp, Zea Mays
gctggcaaatagccgcccccgcgcccggcggggctgccgcgtgcccgcgtctgcgcagcctcggctgccgccgcctgctcccacactcaccctcacacgcacgcacccccctctgccgcgggtctccccaataaaaatagcaagccacgacgccagtgctctcccggcccgcgcctcgctctctcttgtctcgcccgctagctcccatcccagcctcccaccgcgcccgcctgccccaacatcccccctccccgctccgctccacgcacggctccagatctgctacggcggcggccggtggacgccgcgccgcgcgtgccggaggcggtgacgtgagcggcggatcctgcccggccgtgccatcctggcgacgatgacagcaaaatggcgatgatggtggatccccccaatggcatggcaagtcaaggaaagcattactatactatgtggcagacactgtttgagatcgacaccaagtacgtgccgatcaagcccatcggaagaggagcttacggaatcgtttgctcatctgttaaccgcgagaccaatgaaaaagtcgcgataaaaaagataaacaacgtctttgacaaccgtgtggatgcgctaaggacgctgagagagctgaaactccttcggcacctgaggcacgagaatgttattgctctcaaggacataatgatgcctgcgcatagaaggagcttcaaggacgtttacttggtttatgagctcatggacactgatctgcatcaaataattaagtcatctcaaccactatccaatgaccactgccagtatttcctttttcagctgctccgaggcctgaagtacctccattcagccgggatactccacagagacctaaagccagggaacctcctggtcaacgcaaactgtgacctgaagatatgcgacttcgggctcgcccgcacgaacaacaccaagggccagttcatgacggagtacgtggtgacccgctggtacagggcacccgagctgctgctctgctgcgacaactacggcacgtccattgacgtctggtctgtggggtgcatattcgcggagctgcttggccgcaagccgatcttcccaggaaccgagtgcctgaaccagctcaagctcatcgtcaacgtcctcggcaccatgggcgaggccgacctcgcgttcatcgacaacccgaaggcccgcaagtacatcaagtcccttccgtacgccccgggcgcccccttcaccggcatgtaccctcaggcgcaccctctcgccatcgacctgctgcagaagatgctcgtgttcgacccgtccaagaggatcagcgtcaccgaggcgctggagcacccgtacatgtctccgctctatgacccgagcgcgaaccctcccgcgcaggtgccgatcgacctcgacatcgacgagaacctcggcgtcgacatgatcagggagatgatgtggcaggagatgatccactaccaccccgaggtcctcacgagaatcagcatgtgagtatgtgatgtgaccagacaggcagcaatgaaacatgtggacagaggtctgctgcgccaggatcatcacatgttcgcccttcttacgagcttaactgcgattacggcaccgagtcgaggtatcactacatgtatcggaaccgtcaggcggtctcttgtgtaaatatgcgctgaataagatgtgtggcaatctcttgttttttggttgtacatggacctcgctgttgtacgagtctgtgaagtggaaccctggtactaagacctgtaatttcagaccctaatctgttgtatggaaatctgaaggccttgactcccatctgtttgtgtcacacccagatttaaaacctgtttgtatcacacccggatttaaaacccggaagaacatcacatacaatttgagataaatatcataaatgtcattattacataacaaaagtcttataagaggataaataataataaaacaaactaaa

SEQ ID NO: 17361 - DNA, 1955 bp, Zea Mays
ccatgagatgccaagagttcagaattgacaataaaattcatatgatgtgaccttggaccatgagcattcaaaaaatctgcaactattcaagcaggtgcgaaactccttggaccctactaaaaattggtatcgagttatcgagcatctgtttctagtttcagagagcaagcaagccacaaaacaaatgtaccttttgtgaaggtaccatataaactttgccaaccatttcggagtggaatggttccgacttctccagttgagattatgtatcactgtcctgaagaagagattgcatttggacctagttgttggctatgggattatttgaggcggagtcaagcatcaggatttttgcttccactttctggtggtgcggatagttcatctgttgcggcaatagtcgggtgcatgtgccaacttgtcataaaagatatagagaaaggagacgagcaagttaaggcagatgctcttcggattgggcagtataaagatggggcaattcccatggatagcagggaactggctaaacgtttgttttatactgtttacatgggaactgaaaatagttctgaagatacccgatcacgtgccaaaaggctagctgaggagattggttcattccacttgaatgtacccattgatagtatagtatctgcttttctttccttgtttgaaacattgactgggaagcgaccacgctacaaggttgatggggggtcaaatactgagaatctgggattgcaaaatattcaagcccgaatcaggatggtgttagcctttatgatggcttctctaatgccatgggtccacaacaaatctgggttttatcttgttcttggaagctccaacgtcgatgaagggttacgtggttatttgacaaagtatgactgcagttcagctgatgtaaaccccattggaagtgtaagtaagcaagatctgagagcttttttacgatgggcagcaattcatcttaagtattcttccttggccgaggttgaagctgcaccacctactgccgagcttgagccaatacgagcaaactacaatcagttggatgaaatagacatgggaatgacatatgaggagctgtctatatatggaaggttaaggaaaattttccgatgtggtcctgtttcaatgtttcagaacctgtgccacagttggtgtggaagattatctccgtctgaagtggctgacaaagtaaagcacttcttcaagtactacgccataaaccggcacaagatgactgttttgaccccatcttatcatgctgagagctattcaccagaagataataggttcgaccttcgccagtttctttacaactcaaggtggccctaccagtttcggaagatcaatgagcttgtgcaagagatggacaaagatggcaaatggggaacttctgcagaagggaagctgggagcgcagacaggtgcacagggaactggaatgggagtggtggcagcggggtctgccaatcccagtgccggcttctgaagagaaccatactaacgcgtggaagctagttcctccagtttttcggccttgacagaataatgcaccagccgtccagcccccaccccaggacacgggctgctaatgttaatttgtctgcttggttcccttgtactgcatcacttctccctgctagagagctggaatccccacaaaattttaggctaccagttctgtttcttccatttgtcatagtacgatctacaaagtatcaaccaaagaacatgtgaaaaataagatggaatccctttaatcagattgtttgtccgaagtggcatggcgatgaaaaggaaaacatcagtataaagaactagttactcataattctttgttctgtaaagagtcctttctaaataatgctgtgtgcatgatgatgatgatgtgatgtgatttctaccatgacttcaaagaactcaatatttgcaccttaactctccaat

SEQ ID NO: 17362 - DNA, 1154 bp, Zea Mays
gttcctgtctccgtctccgcgtcgctccctatccaatcttctcctccctcccttccccgcgtcgcggcaagacgacctcgccgctccctgcctccctctccccgccgcaggtgctggagatgcaggcgactgccgcctccttcctcgcccgcccactcccgcggcttcgccgagcatgttccggtgttccctagataccgaatacgagatccctacaagcttcttggtgttgatcgtgacgcatctgaagaagagatccgaggtgcgaggaatttccttattcaacagtatgctgggcatgaaccgagtgaagaagctattgaaggtgcttatgagaagataattatgaagagctaccagcagcggaagaagacaaaaattaacttgaaaaccaagttaaagaagagagtagaggaatccccttcatgggtcaaagcacttcttggttgctttgaggtgccatcgatggatattatctccagaagattgtttttctttgctttcattgctggatggagcatagcaacttctgcagagaatggacctgcgtttcagctcgcgatatcgctattctcatgcatatatttcctcaacgaaaagatgaagaaccttctaagggcatcaaccactgggtttggaatacttgttggcggttggatcattggttctctactggttccactggtcccaacattcatcatcccaccttcatggtctctagagctacttacctcactagttgcttacattttcttgtttctgggatccactttcctgaaatgaatctgtttcaatcttgtaactggaactgttggatcttttgagagggaaattacgatgactgatctctggatttgagttttagaaattttttgcttgtactggcctcttgagattggaatactggcgttgttgtgggcttgtgacataggcttcccttttgggtctttttttcatctgatgtaaacagtttttctccctgtctggtgacggtgcagagacaaatgtggcatcggtacccatatctgggccgtgtttttgacagagatacgaaactggccagaatgcattggtaggcttgattactctgtttatctctgctgttggatattatattttctattattggatcgtcatggttggatttggacttt

SEQ ID NO: 17363 - DNA, 251 bp, Zea Mays
tcatctaattagtgatgcgcatgaatggattaacgagattcccactgtccctgtctactatccaaccgaaacccccagccgagggaacgggcttggcggaatcagcggggaaagaaagaccctgttgagcttgactctagtccgactttgtgaaatgacttgagagggtgtagggataagtggggagcctcccggggcgcgaagtgaaaatacctactacttttaacgttattttacttattccgtggggt

SEQ ID NO: 17364 - DNA, 2029 bp, Zea Mays
tacccatgagcgtttcaacgtttcgtcgttttaataaccttgattaaaagtgtaggcattggtgagtacaaacctaaggttaaaagaagaatattttgaataaaagtgtttgtatttgccaaatggcttatgcttttagttgagataggtagtatatcaaagttcagggcatcacatagataagaacgaatttgctccgtgtgcaacaaaaagctcgtttttacactgactcctcttctattgcagcctatagctgccaaatagttggatgcaactggtccatttatctggaaatatttatatttaaaaaaatatcgaaaaacattacatttaaaattttataggtagtcttctttcattctgtggagatcattttcactgataactgaaacaacaattacttcattatattcattcaaggacaagcaccacacaatcaacatcatgtttaaactcaaatcaagacgtgttgagtaaaccatccttttacatgttaccaggagtctaagaaactatagtttgggttgttccagatttgagtgtcatacctaaatttgggtacttgtaagtccagattaaatgcaatgtttcctttctcggtttttggacatcttacaatcataaattatccttttacattaacttgcagcctttcaaaaacatatgttttcccaatattatttattaaatgcttttagtattgtatcttcattttagagtgagaaatccgctactcaattcacatcaggatattagttgtcaaatattttagtactaatattgagggggatggcggagggcattgcgctgcggggttacatcgccgtcaccttcgacatgcgcgacataggtgggtccacagggcgggtgtcgctcacgtgctccatcaagaacatcgagtgaggtggtgtgctgctgctctaaagaagggaggagaggaagtagcgacaatgtcgccaagaccacctggcgcgatgtctcctaccagatcaccaagatcaacatgtacaaggtgatccagtccgagccctctccctgcatgcttccattgattttttatttcattccaatcgatttgccgtgatatatgcaatgcaggatggtcggcatgtacaagatatgcttaaggaatgagccacaaaatctgagagaacttatgctcttggtgctgctgacaacacaactgttgctattagaaagggatttgccattggttcaggtgctcttgtgtccctggtgctgtttggtgccttcgttagcagagctggagtgaagagtgttggaagtgtcgccctaaagatggtggaggaggttcgcaggcagttcaacaccattcttgggttgatggagtgaacaagcaagcctgactatgcaacctatgtgaagatttgcactgatgcttcttccatcaaggagatgattccttggggtgctctggtcatgctgactccctcattgatggaacctctttggcatcgagactctctctggcgtttttgctggtgccctggtttttggagtgcagaacaaggccatctcagataaaagtagatgtagctttcataggacttaattccagcaaagcaaaggttggcagtgcaccaaacaatagcgtttatacttcattcttatggattggagaagcctatgcaacatgtcaagccagatgacatgcagatgagaaggttctgcatcaatagaaaccagagaaaaatctgtatgtgtctgtatgacatctcagataaagcctgatgatcagcatgatgaaaggtggggagttctatagctggtttaagctggagctagcttctgaagtccggtcaggtgtctgtatgtgttgcccctttttatttcatttcatgagaaaagattgttatttgttccttgaactgtacttggtcgtacttgtgaataaatattttagcatggttgttcgacttctcataatgtttattcgacatcagttcatgatattagtgttacgtgatattttatcatatgaattttgaatatcatagtgatgtttatc

SEQ ID NO: 17365 - DNA, 1887 bp, Zea Mays
  misc_feature (1)..(2): n is a, c, g, or t
nnagtttggtatattgttggaaagaaatgtgaagaagactatattgttgctagaaccgaagaggaggcgattgcagaagctcatgaaaaatatggaaaatcagttgaaatatatcaagaccctgatgttcttgatacttggttctcaagtgctctgtggcctttcagcacgcttggttggcctgatctttccaaggaggattataagcatttttatccttcaactgttctggagacaggccacgatattttgttcttctgggttgcacgaatggtcatgatgggaattgagttcacaggatcagtaccattttcttatgtctatctacatggtcttatccgggatgctgagggtcgaaaaatgtcgaagacattagggaatgtcattgatcccctagataccatcaaagagtacgggacagatgctttgagatttacactatctttgggcactgcaggccaggacctcaatctctctacagaaaggttgacgtcaaataaggctttcacaaacaagctgtggaacgcagggaaatttttgttacagaacttgcctgataaaaatgatgtctctgcatgggatgtcttgttgtctaataagttcgactcagaagcatcactccagaaactgccattgccagaatgctgggtggttacaggactacatgaactcatcgataaggtcagcagaagctatgataagtttttcttcggagatgctgctagagaaatatatgattacttctggggggattttgctgattggtatattgaagctagcaaaacacggctttaccactcgagtgacaagatcgctgctgctacagcccagagtgttctggtgtatgtgtttgaaaacatactgaagttattgcatcccttcatgccattcgtcactgaagaattatggcaggcatttccatacagaaaacaagcacttatggttactccctggcctaccactgaccttcctaaagatttgaggtccatcaaacggttccagaatttgcaatcattgataagaggaatcagaaatgttcgagcagaatattctgttgagccagctaaacggatatcagcttctgttgttgctactgcggatgtcctggaatacgtatcaagggagaagcaggtcctagcattactttcaaagcttgacgttcagaacgtacattttactgaatcagcaccaggcgatgcaaaccagtcggttcacattgttgctgatgagggtttggaggcgtatctacctttggctgatatggttgacgtgtctgaagaggttaagcggctctccaagcgcctctccaagatgcagtcggagtatgatgctcttgttgcccgactcaattccccaagttttgttgaaaaggcccctgaagatattgttcgcggagttcgtgaaaaagcgtctgaggcagacgagaagatctctctaactaaaaatcgtctcacttttctgcaatcaaccattaccacttaaatacagtaatccacggggactctaccaggatgccattttgatcgatgacgcaggacaaaactgattgttaatagtttttggttgaaggatatgatagattggcaacgaagttgtgccttgtccagcagaaacacacattctttctagttcatatctgttgtctcttgaaacttaaaacatacattcggctaggcatataatttatattcctgacttatggttttagagcctttcgggatgcccttagttgaggtaaattttgttctgcctctgaagttttgctgatgccattgttagtaatattcatattttgtaaggtgggcgcacgttattagatatgaatgatctgtaaggtcggtgcacatgtattatcaatgactattgtttcgggcgtcaaaaaaaaac

SEQ ID NO: 17366 - DNA, 1764 bp, Zea Mays
cgcctctactgctgacgagagggaagcgagcgaatctggtgatccgtgataacgtagttctcaacaaaacgaaccggtttcatcgaccgctctcgcttgcaaagaaaaagaaataaagaaattggtccagtagccctggaagaattgttctcctggattgaattcacaaaacaactgtttgttattttcttctcccgttcacttctctttggcccgaaaccgagagctagtgcttgattcggtcgtttttgggcaccgaacacgttcttgggaccgccgccgccgccctacttccagtcccagctgctcaggtctccatcggcctcgagccctttgccggcgacgagcactcacaacaccagttttgtaagaggggatctgtaccagtcaggctgagcagcagcagcagtggtgtgttctggcttgtgtgggacctagaggaagcttacacaacagggaagagtattgtgttagggtgtaacaatgtcttcttcaatggaatcgtcataccttcctgctacaactgagtcattagcccaagctcaagaggctaaggatgcttcagagtccatttcaatcctttaccgtgtcattcaggacccatcttcttctgctgatgcactgagaacaaaagaagttgcaattacaaatcttacaaactacctcactaaagaaaacagagctgaggagctgcgtaatcttttgacccagctcagaccattttttgcagttattcctaaggcaaagactgcaaaaattgtccgtggaataattgatgctgtcgccaagatacctggaacatcagatcttcagatttcactctgcaaggaaatggtagaatggacccgtgcagagaagcgtactttcctccggcaacgtgtggaggcaaggttggcagctctcctgttagagaatcaggagtatactgaagcccttaccctgcttactagtcttatcaaggaagtcaggagacttgatgacaagttacttcttgtggacattgaccttttggaaagcaaacttcacttctccctgagaaatctgccaaaggccaaagcctccttaactgctgctagaacagcagcaaatgccatttatgttccacctgctcagcaaggcactattgatctccagagtggaatcctccatgctgaagaaaaggattacaagactgcttacagctacttctttgaagcatttgaagctttcagtgcactggaggacccgaaggccatctttagcctgaagtacatgctcttgtgtaagataatggttaaccaagctgacgatgttgcaggaataatctcgtctaaggctggcctaaaatatctgggtcctgatgttgatgctatgaaggctgttgctgatgcatactctaaaagatctctcaagtattttgaaactgcccttcgtgattataagtcccagctggaggaggaccctattgtccacaggcatctttcttctctgtatgatacactgctggagcagaatctctgcaggttgattgagccctactcaagggtggagattgcacatatagcggagatgattgaattgccgattgaccatgttgagaagaagctgtcgcagatgatcgttgacaagaaatttgctgggacactagatcaaggtgctggctgcctcattatctttgaggattctaagaccgaggaaatcttccctgccactctcgaaaccatttcgaatgtcgggaaggttgtggacagcctttatgtgaggtcggccaagatcatggcttga

SEQ ID NO: 17367 - DNA, 722 bp, Zea Mays
tttaatgtttggttagggggatggatccgtcctcaagcttgtgtttggctggaaaacatgaatgatcgttccagtttgctcctacatacaatgaatatgtgctctacaatcacaatgagggagacagtgcacaaacaaagtatccctcggggagcaccgccacaagtgggcagggtgtagagttggctggcatcaccgtggcggcctcaaacagtccagtgtcgtcaagtgtatcatccaaccaggcagatcaggaagaaacaatgacaaccccaatcaaggacaaagttgatcctcctggagggctctacgacctcacagaattgcttgatattgatctgtctagctacccagccaagcttcctggaaccaccgatgtaagaaaacaatgatcaagcttgatgagatgggctattggtagggttgttgcgattgggttgggggaaaatcgtgattattatttttttactgttgaagagtgccatagttaacattgtaaaaatgtgtgtattatttgttctgatttttccccccgttgaagggggtttattcattgtcagcagttgctgccacacggcctccctcaccctgctctttattaaccgtgtaaaatgttgtgagcttaaggtgaaccttagtgtcaaggggagtctataccagtacaatattctgcgtttctggtggcgtattttttgtctctctatccaaggggcttgtttggc

SEQ ID NO: 17368 - DNA, 306 bp, Zea Mays
atcctctcccatccacctccctccgcacactccgccgcctcaccttctccccctctccctccccgccgccgcggtccccgccgccacgctgtggcccttcttcgacgccgtctgctccgacaccgccatcaccttcggctcgctcgtcgcgctccacgagtacctttgagaattcgtcgcgcgcccctaccaccgcctcctcctgatcgcgcacctgtcaccgcctccacccgactctgccgctaagcgggcgtcccaccgggtcgtgttcggcaccaaagcgactggatgggctcggcccggacc

SEQ ID NO: 17369 - DNA, 763 bp, Zea Mays
tcatcagacaattgagatgtttctgaacacgatgtgacgcagatctgttcttaaaggctctgaaggctgctggtgaggtttggctgttatcaaacatggactcccaggaggacattgtatacccaaatgatccaaaagcaaagatcaaggttgatgatgacctgaagcaactcttccgtgaaatagagctgccacgtgacatggtcgacatagagaaggagctacagaaaaacggtttcaagcccatgacaaatactgccaaacgacgagcagctgcccagatcaatggcgtaaaacccaaggctaagcccaagaagaagcagcgtgagatcacaaaacggaccaagctcacgaatgcccatctgcctgagctgttccagaatcttaacacttaaacgtgctacagtatctgacgacggaagatggttcattttactcctatttattgctacgttgtgtgtatgtgttatgcagctatgctgtatggcttatggttatgagcgccacaaatttgtttgtcaagattctggatgatatacttatgcattctgacataataggaggcaaaacctcaagattttccttatttttattttatcaattacagcattttctgagtttgcggcattatgtttggttgattttgggtcaattaggttggtgtgaggacaagctgaacatattttgatggattgcttagcttgaaatgataccagaatttaaacctcataattacgagtactgcggatctgcaggtttagct

SEQ ID NO: 17370 - DNA, 1514 bp, Zea Mays
ctgctctgcccctgaatggacctgctagcaattgaaaattctggtggagtattatttcagtgatataaacctggccaccactgaacatttgatgaggtttatttcaaaggatcctgaaggatatgtgccaatatcagttgttgctggctttaagaaaattaaggctttggttcaaagtaactccatgcttgcttctgctcttcggacttcatcaaagcttgtggtcagtgacgatggtgcaagagtaaaacgtgagcaaccatttacagaatcggatttagaagaactccaggcccgaattgttgttgcagaaaatctcccagatgatcattgttaccagaacctgatgaggctcttttcagttgttggcagtgtcaggacaattagaacttgctatcctcagaccccaaatggcactggtccagctactaacagatctgcaaagctagatatgctttttgccaacaaacttcatgcttttgttgagtatgatactattgaagatgctgctagagcgattgtggaacttaatgatgagaggaactggagaagtgggcttagagttcgattgttgagcacttgcatgggaggtaaagggaaaaagggtgggcatgaatctgatgggtatggtgacgaggagaatgtctctacttctgatcaaccatatgataaatatttagaagaaacacctcagatgtcagatgtgcctggagaacacatgactgaggatagcgctggagatatgggacgaggacgtgtccgggggcgtggtcgtggtggcaggggccgggggcgtggttaccatcaacagaacaacaatcaacaccaccagcactaccaaaacagtagccaccacagtaacagtagtagtacccgtccagtgggaaccccaccgccatctggccacccagtcatgattgagcagcagcaacagcagcaggcagctcaaccacagcccctcacagcggctaacaaacagcctccaggtcctcgcatgccggatggctcacggggattcagcatgggcagagggaagccgcaaacattgacgcccaaagtatccgagtctgaacctgaacaatgaattcgaacctcgcagagagactaatgggttccggtttgccatgttgatacatatgctgagagacttgccttttagaagtctgtcctcgaggtcgctttctaatttatgggaccatatacatttctgcatgtgctgtgtgtgtacttccaaagccagcagacactggttcgcgaatagtacggttgcggccattctgtaattccatttttgccccccttatgcagttttgggtgcaatactgaaaatcaaaaactcatgctaaaaaggttgaaaagaatcgagtcgttgtaaaataagattgtttcttcgctgtttgcgggggactgatcatttcgatgcttttaccattttgttgtttattatccattgataatttgtgggcgaagaacggtgaaaaattacacacttgaccaattgaattatcagttcc

SEQ ID NO: 17371 - DNA, 1763 bp, Zea Mays
gagtctttgtcccatccaacatctcgatccatcccagcatcatccccacaattgaggcgattgaagcagaaaaaatcagtcgccgtagcagcgccgcctccgccgccgtggggaggtagcatctaggcccattccgccgcctccatctccggccagcaatggcttcggcggtggagcggcggagggaggagcacgcgcggagatcgcgttccccagcacggggcagggagcggaggggaacgccgccacgcaggcggagttccccagagcggaggaagggttcgcctgctagggcacggtctcctgctgcgaagtcaagtgcgtcgcatagggacagggagaggtcgcctccgagggagaaggtgaaggagcgtgtcaggtcgccagagtctcctgctaaggtcagcctgttgcacaaggggagagagaggtcgtctcccagggagaaggcgaaggaccagcgggtcaggtcgccgaaacgtaagcaggagcagtcacgatcaccctcacctgctaggcgacacttctctaggtcgccctcgccgcgctccaagaggacgaggggagcgcagggtgagcgggaggcggtgcagtttactggcagtgatcgccggaaggcaagtcacagggaggagcaggatacactgaggcacagggagcatgatgaggggagggatgcttcaagagacaggaaagtggatcgggaggcagtgcatgtaacaaatggtgatcgccgcaagccctctcatggggaagagagggactcatggggcaagcacagggaacatgatgaagggagggttgcatcgatagataggaagtcggatcgagaggataccagaggtactgcaaaagataagaaatatgttcgtgatgatgagaaggatcattctagggagaggggggctgggagggatgataagtatggtgcttcaaaggtggcattgccggtctgggatgatgatagacatggaaggcctaatcggggtgactggaaatctgcttcttcaagggagcaaaggctggactctggtgacagaagggattcaacaagagtgaaaccaacagatcatgatgggagcaatgggggatcgggaaggtctttcaggcatggtcgttcaatgtctccagaagagcacaggcatcggggcaggcatgaatctcatccatcatcgagagtgtccagaagtgcagcacatatcgaggatattaactcgagaggaggtgaagcatcccggaatggagatcctgatgctttggcaacaatgaacgcaactgcagaagctcttgaagcaaaagaaaaggtgcaaaagccatcgtttgaattgtctggaaagcttgctgaggagaccaacagagttgcaggtgtaaatctattatattcagaacccccagaggctcgaaagtcagagattagatggaggctctatgtatttaaagatggtgaaccactgaatgaaccactgtatgttcatcggatgacctgctacctttttggaagagaaaggaaagttgcagatgtccccacagatcatccctcctgcagcaagcaacatgcagttcttcaatacagacttgtggagaaggagcaactagatggcatgatgacaaagaaaataaggccttatctgatggatcttgatagtacaaatggaactttcatcaatggaaatcgcattgagcctcggcgatattatgagttatttgaaaaggacacaatcaagtttggcaatagtagtggtggaataaagtatggtggggag

SEQ ID NO: 17372 - DNA, 2042 bp, Zea Mays
tccccaccaccaccaccacctttctcctcactgcctagacggaaaagcatcgcgcgatcgccactgctccccccagagccagtcagccagccagccagcggcgcacgaaggaacgcacggtgcacttccgttccgtctcatcgtcatcagctatgcatcgcccgcgcagccatcgtctctgccgctcgcgcgtcgccgcagctgtttccgccgccatcatcatcggtctaggcgcggcgggcgtcggcgaagcggccaccggcacgttcatctacgccggctgctcgccgtccaagtaccagccgggcacccccttcgaggccaacctggagtcgctcctggcctccatggccggcgcggcgcccaaggccgggtacagcagcttcacggcgggtgccggcggcgttggcaacggcacgacggcgtacgggctgtaccagtgccgcggggacctggcgggggccgactgcgcggcgtgcgtgcgggacgcgctgggccagctgggccaggtgtgcgcggcggcgtacgcggcgtcgctgcagctggagggctgctacgtgcggtacgacggcaccgacttcctgggcacgcccgacgccgccatggtgtaccgcaagtgcagcaccagcagcagcagcgacggcgagttcctcagggaccgggacgccgtgctcgccggggacctgctgcagggcggcgcggccaataatggtagtagtaacgggtacaaggcgggcagctccggaagcgtgcagggcgtggcgcagtgcctcggcgacctcgcggcgcccgactgcgcggcgtgcctggcgcaggcggtcggccagctcaagggcacgtgcggcaccgccctggccgccgacgtctacctggcgcagtgctacgtcaggtactgggccgacggctactacttccgccccacacaagattattcgcaggacgacgtcgggaggactgtggccataatcgtcggaatcttagcagggctggcgatcttcgtggtgttcatctcgttcctcagaaaagcatgctagcttggccactggaaacggcgggcttccacattccctctcagacggtggcacgaggacggcataggggagaaggagggatcgggaacgagattggcctgcatgcaaaatgcttcacaaagcacatgtagtctggttttgttagcaatagatttgggctatcgatcagaggagcactaccttgatttgggtcatcattttcggtccactgattatggcctacttgcgatcacccatcgcaacagcattcacatctgatcttttaatcatttcggtacttggatgaagatcagagttgagttggtattactactttacataggcacgagcacaagtgcatgatatgtacaaccgtcgatgggtccacagtccccagatgatacgagctcgctcacagggacatggggcagcagacctcggggggctttgctatttgatctttaccatcaagcactgtgtccccgagccatcgggctccacctcgccgagttgtagctgctgcaagcgctgatgctcgactccctcattttcatctcagatataccactgttgcagatgtttgcaaacgctctcatgtacttcatgccgtactgagtaagtgaaccacactgggactcgaaaatccgcacctaagcaaaagccaccaagtgaaatgagttaggcagcgcactgacaggatgggaatgtgcgcacagcagtaaggagcttcattttcatgtgcatgccttgtatcaagagtcgaataagaaaaatcaccatactcaccatcctcttcaaacagtcccagtcatcgactaatggttgaccagaggttctaacagcctcaagcatcgaaggccctttctcaaatccgaagacgagcctcccaacgaaatcgatactgctgtcaagatgcttcctgtgctgaacagtttctttaatctctatgagagccctcagcttctcttcggtccccccatttaactgctccgtcactccccttcgccgtcggcatccgtatcagcggctccc

SEQ ID NO: 17373 - DNA, 200 bp, Zea Mays
cttacagcaagcacaagaaaaggaatcacttccataataataagggtggacttcactccaatagcactaaagaatcccattgatcctaaaactgaaagcatcaccagaacaacaccagacaaaccaagcaggacctgaaataaatcttatcaaatgtttgtcatgaccaaatgtgtggaccaagtgaaggcatgttttgc

SEQ ID NO: 17374 - DNA, 1104 bp, Zea Mays
gcggtactacacagtttcatcacatagttgctggcggctggccggcctctttctctttctcgtttctgccccctctgcttgcccccctttcatctcaggcgtcgaagagagagagagagagagagaggagttgcaagttggtgagatggatctgttggagcggaatattaagacggagacggaggagacgcgcaaggaacaggagcgtaaggaggaggaggcggaggcggaggcggaggcgggggagaggaagacccaggagccgccgcagcaaggccagggcctcagcctctcactcgccaacggcagtggcaggtctggaatgttgccgatgtcgaacgtgtccgctaatccttcacagcttacaattttctatggcggatcagtatgtgtgtatgactcagtgccaccggaaaaggctcaagcaatcatgcttatagctgcagctgcagcggcagcggcagctaccaaaagcagtgctgcccctactgttaagcctccaatggtgcctgcagccactgttgccccagcagctgtcgtttctcctgtgcttacacggtctccatcactgcagagcacttctgtagcaactgggcaacctcaggttgttgctgaacctagctcgatatgcaaacttcaggctgatctccccattgccaggaggcactctcttcagcgtttccttgagaaacgccgtgacagggtcgtgagcaaagctccatacagcaccgccaagtcgtccgatggcatggagtcaccgaggattgaggtgacagcggagggcaaggcccagtaacttgaaaggtccccgcggagtcccatcggtgaaggctgacgttgtgggaaggggcagggacgcgctgttgttgccttatgttatgtggcggcggcagcgtggaaccgcactaataatgtggaccggaacctctgttaccgtcgtttgtgctgtcgcgtgctaggtttatgctgaagtggattcctttactccgcacaccgaactgtgtctgttgtacatcacgccgtgacgccggtggtctcgtctgtctgacttcgttacatggatcgtctagtagtaacggaatgcagtaccacgtgaaaaaaaaa

SEQ ID NO: 17375 - DNA, 2087 bp, Zea Mays
gggcttcagtactcagtaatctgatgagaggtttcgtggcttctaattgcaggtgacgggcaggtgtactcctggggcagggggccgttcggtcgcctcgggaacggccgcgaggacgacaagctggtccccaccgcggtggcgcccgcggtctctgccagcgggacaccgcggcccaggttcgtcgccgtcgcggctggtgcctaccacagccttgcgctggacgatgaaggttcactctggtcatggggttacaatctctaattccctttttccatgtttcgttgagcaatttcaggatttaggttctcctgaaacactgaatgatgaagaccagaacacacgtggtcgcacttgtttgaagctgtcttctgtcacagctggtggcatgatgtcgcttgccatagacagtttggggagcctttggatgtgggggagttgcccacagcagactgatgccggagagttttgtatttcaagtagctctatcccactacctgtgtgggatttccatggacacaccgttgttaaggttgcctgtggtaacgagcatgtagtagctgcagttagtgctggggagacctatactggaggtgaccttgtttgttacgcttggggaaataacaaccatggtcagttgggtctaggtgacaaggaaagtagatctcgtcctgtgcttatttcagcatttagtgaaggatcttcctgggaggtgtatgaaattgcatgcggagcttcccatactgcagtcctcgccaataagaagtccactgaccagatagaatctcggtgctggacatttggccttggtgacaaggggcagcttggccatggaaccacagccaccatttgctcaccacaacctgtcgatggattaccaaccggatccttccttatttctcttgactgtggattgttccacacaaccgtagtctcctctgatggagaggtgtggtgctggggaatggagagaggtcttggattgtgcccagatgctagcttttcgggagttgatgaaggggatgctttatatccaataagagttcagtctcctgagaccaatgggttcaagtttcttggtccagtgcagatcgcctgtggagctgcccacactgttcttgttgctggtgatgggtataggatgtgggcatggggcagaggccgcagtggtgtgcttgggagaggccagactgctgacagttacataccatgcgttgtgatgtggcctcctcttgatgagaactttcatgaggaccaaatgggaggatcaacatcaagagtgaatgatcacactagcactgagttggaacagaagctatctgctgcctcggaggagttacaattccttaggtcaaaactgacactcatggagagatatgccaatatacttcacatctcaatcttccgtaagccacttgatgaacgggcgctaccacgttcacttcaggaatcttccgtctttgatatcagaaaggaatttgagaacattttggatgcagcagatactgatgaacttaatcgtttagagatcttctaccgcagcatgctttctggcgttaaagacaagcttctgaagagaagagtacgagaaatggtccaacaatgcattatttcactcagcagggaggccaaaccctaaagataagtgaattggattattacacttgttaccggactgcaagtgggtacagtatcacctttggtctcactaaaattgcaaaaaaaaaaggtcaacccagtgtcttatctgtttcttcaaacatagtgagtagatctgtcctggcatcaagatcatcacctggccgaccattgcacgaagacagcattactcatactgacatgtaagcatatatgttgtttatgaaattctttatatgataaatgcatcctagataaattgaatcctgtgtaaaggatgtttctgtggattgtcatagacggacaagaatttatggacatatggttaaagtgttatcggaaaagccttaggcaagtagcagtttaaattataaatactagcaactgcataaatagcgtgggtagatagttttttttatcatggtgacatttgagattttttttatttg

SEQ ID NO: 17376 - DNA, 1003 bp, Zea Mays
cacgaacccgattcttgcttgttcctctcttgggctcttgtgggcttgaataggccactgttggcctttcggaaagtcattcggccccaggaccgcgtcctcttaacctgtagcctcggacggaactctgagccctaaaccctactcgaaccaaaccagagcagcctccaccgccagcgccgacagctcgtgttcgaccttgcgcacttctccgcccatggctgaacccgaggtaggggtggccgcagacacagcgatggaaaccgaagctcctgaagcagccggtcagaagagggaacgggatgaagtaggtgatcctgctgctgaaggaggcgaggcggcggtggaggaagcggcggcggctaagaagccgaagttggaggaggagactaaggaggtagaggaggcgtcggaggagaaggcagaggagacggcggaggggaagacagaggaggcgaatgagaagacagtggaggcggagcgcaagccagtgaagctggggccaaaagagttctcctcatccgtcgagatgttcgactacttcttcggtctgcttcactactggacgccgcagattgagttcaataagtatgaacaaatggtgctggaggatttgctgaagaaaggccacgcggaacctgctaagaagatcggggcaggagtcgaagcattcgagatacgcaaccacccggtgtggcaaagccgctgcttctttatccgcaggatcgatggatcctcggatgacttcagcttccgcaagtgtgtggacaacatactgcctctccctgaggacatgaaggtcggcaacggcaagaagtctggtggccaccacaagggtggcggtggcggcggcgggggtaggggaggaggccgtggccgaggcggctggcgtggtggccgtggccggggcaggaggggaggctgctcgtgtacgttgctttaggccatccggtctgttcgctgctggtctggaatgaaggatagataggattacacttgcaca

SEQ ID NO: 17377 - DNA, 1511 bp, Zea Mays
caaatatctatatttttatagctgaatacaatgtatactggtgcttccctttggaactggagtaatcaaaagatctgcttctgtaagtctgaggtgtctgccattgtttataaagctggggagtgcatgcaggagcttctgaaatcatggaaagagtttgatgtaactcaggatgctacaattgctgaaagcctacaacatggtcctactcttgaaatccgaatacctgcagaatttgttacttccactaaccgtcaggtaaaaggtgctcagctctggggaacagatatttatacaaatgattcagatcttgtggctgtgctaatgcatactggttactgctcccctacatcctcccctccaccatccgccattcaagagcttcgtgcaactgttcgagttctaccaccacaagagagttatacttcaacactgaggaacaatgtgcgttcacgtgcttggggtgctgggattggttgtagctttcggattgaacgttgctgcattttcaagaaaggtggtggcaccattggtcttgagccacgccttagccacgtgtcagctgtggagcctactctcgccccagttgcagttgagcgtacaatgacgacaagagctgcagcttctaatgcattgcggcaacaaagatttgtccgtgaagtgactatacagtacaatctgtgcaatgagccatggttgaaatatagtataaacattgtggcagataagggattgaaaaagtctctttatacttctgctagactgaagaaaggagaagtcatatatttagaaacacacattaataggtatgagctttgcttcagtggagacaagccttgcattattggatcaagctccaatgcatctgaatcagaaacggagaaacaccagagcgggagtcaccattctcagaatggtgacagaggctgtgtggagcatgaactccgggatgtgttccggtggtcccgctgtaagaaggccatgcctgaaagtgccatgcgctccatcggtatcccactaccagcagaccagttagaggataacctcgaatgggaggatgtgcagtggtcacagaccggtgtgtgggtatctgggaaggagtatcccctcgcccgagtgcacttcctctcggcgaactagaagcagatgatgttggctgtgttcgtggggggaaaaaagaaggtgatgttggagcaacaaaggaattaatatttcttgtggacaagacagagtcgggaacattgcgtttgcttgtacgggtcaccatgccatgtgtacaaaagaaggatcagttggttagtgttgatatggtagccttactgtgttgacaataacactattcattaggctggcctgctgcccatgcatgtgccaaagctatatttgctggttttaggtcctgtgtcggtacgcaaataacttgcaatatgcttgcttctcaagtaatctggccatccttattggaacactgcttcctctgtccctgaataatagttttaacaagttcaaaa

SEQ ID NO: 17378 - DNA, 1838 bp, Zea Mays
atggataagatcaagtacgaaattcgtgagggtgaacaagaatgggtgaatgaagggcggagtaggcttggactaaaggacaaagacactaagaatggaccgtgggtggctcatattaggctcatgaagagcaatcatacatggcattcagcaccagtgaacaaccaagaactcctgtctgaaatgggtgttttcgatgttcgcagaaatagtgctgtccgacacacagaggaacaacttgttaaatcactcggagtgaagaaatgtatatcgaacagtaaagaggggaaaacaagccctattcaagaacttcagggaaaagtgtcaataggaacaaaaaggggttcaagtacaaaggttcttgcctgtaagaaattggctaagaggagaagatccaaggaactgtgcaatctaaatagttcattggatgtgactaggactgaccagcagagaggaagaaaggaagcggcagagccaatgaaagatcaccccttagcattggagtgttcgaaatctgatgctcaagggcagcttgacagaactttggaggatgcacagaacataactgaattatcaaatcaggagaacctgttacccacggtgtctcctggctttatatcaacgtctaatgggaaaggtactaacatacatgatactcaatttgaggaagagccgacagctaccctacctattgatgggagttcacagtgcatcattgacatttctccattgaggagctgctctgctttggagagatctttgccttcaccaccgcaggcttcgttcgtcaagaggtcacctgtgtggcgtgtagttgacgcaaaacatgtgtttaaggagttacctcaacaaccacatttccttccactccaaaaataccccccaacactgcgtgaaggaatagcattaggtatgatggtgtcattctcggaattggtgaagtttacaatggaagcaagcatagacgacagcatggaatggttcgaggacaaggtcaggacagtctcccttctggaggcaaatggattcagtgtgcaatctatacagagcgtcttgaccgaactgatcgagatcaaatctgagcgcgcccgtatccatggagagatcggcaagctgagttcaaagctagcggagaacacggcttcctcctcccgagtcggtgcactgctcgatgaaaaagatggagccgcagctcagctcgagcaagaactcgggcgcatccgccaggaaagccagaagatggcacaggagaaggagaaaatagatgcagagggcgtgagtatcaagacagcatgcagcgggtacgaggatttgtgcagcgacgcggaacgcaagttcaaagaagtcttggctcagctgcggcggaagggcgccaggtgatgcacaagctttgggtatcgtttcgctgcttctaactctgacacctgtttatgctgtagggctgtagttttatctatgtatcgcagtgggctcagatcgatgtgctgtggttacttttgtgcaagccgttcggtatcgtttatgtatctgtaggtatccatctatggcttaggaagcctgatgaagtctcgactctttataattgctactcctatattaattgccagctagttggaccgtacttagttgcttgtagcatatttagggtgcgtttggacacttgaatcagttctgtttatcatctaaatcagctcagctgaatcggtgccaaacggacggatgtgggaatcggagccgaaactgctacaccatggcaagacagtgaaagaagacgccaatgaatgtatcatcttgtgctcgctgatgcatcatctacaatattgtatcctgaattgcta

SEQ ID NO: 17379 - DNA, 3311 bp, Zea Mays
gcacgagcatcgcggcggcggaggcgagggcacgcgcgggtatcgcgggagcggggcatggggaggcggagggagcgcgacggcagaaccgtgcactatagtcgaatatgaacgcctacgatacaaacataaggagtagtaaagataaagatgtagagagttttttccgatgacccatgccgcactcaccaaaaatatctgcgggccagcgcgcgtgcacattggacaagtggacaaccgaggtcaccgactagtgggccccacacgtcagcccctcgatccgcttcccatctgatgctcgtgctccgccgcgtctccttcctcctctcgtcgccctcccctcgcgcaccgctcgcaaaacctctcctgctcctacgcccgccccaaaccctagccccgacagcgcggcagctcgtggctatggccgcgtcagtcccgtcggcgggtggggcggggacgatgagccgcgacgcgttccgcgcggccgtgaccaacacgctggagcgccggctcttcttcgtgccctctttcaagatctacggcggcgtcgcggggctctacgactacggacccccaggttgcgctgtcaaagctaacgtcctcgcattctggcgccagcattttgtattggaggaagggatgcttgaggttgactgtccatgtgtgacgccagaagttgtcttgaaagcctctggacatgttgataaatttacagacttaatggttaaagatgaaaagacaggcaactgctaccgtgcggatcatttgctgaaggacttctgtaaggataagcttgagaaagatcacacattgtcaccagagatggcagaagaatacaatagagttcttgctatcctggatgatctcactgcagaacaattgggtgctaagattagggagtataagattgttgctccagacaccaagaactcattatcagatccatacccttttaatctcatgtttcaaacttccattggaccatcaggtttgagcccagggtatatgaggccagagacagctcagggtatatttgtgaacttcaaagacttgtattactacaatggcaataagctgccattcgctgcagcccaaattggtcaggccttcaggaatgagatatctccccgtcaaggccttttgagagtccgtgagtttactttagcggaaattgagcactttgtggacccagaggacaaatcccatccaaagtttggtgatgtttctgatctagagttctggatgtttccgagagaggatcaaatggcaggaaggtcagccacaagacttaaactcggaaattctatatctgagggaactgtgaacaatgagacccttggctacttcattggaagggtctaccttttcttgacacaacttgggattgacaaggatcgtctccgtttccgtcaacacctgccaaatgaaatggctcattatgctgctgattgttgggatgcagagattgaatgctcctatggttggattgagtgtgttggaattgctgataggtctgcctatgacttacgtgcccactcggataaaagcggcgagaaacttgaagcacatgagaagtttgctgaacccagagaagtggagaaattagttataacgccatcaaagaaggaacttggtcttgcattcaaagggaaccagaagttggttgttgagtcattggaagccatgaccgagaccgaggcactggacatgaaagccgcgttggaatccagaggggaagtcgagttcaaggtgtgtacccttgggaagaatgtcaccataaagaaaaacatggtttcaatcaacatcgagaagaaaaaggagcaccagaggaaatttactccttccgtcatagagccatcctttgggatcgggcgcatcatatactgcctttttgagcactgcttctaccaaaggcctggcaagaccgaggatgagcagctaaacgtgttcaggtttccccctctcgttgctccaataaagtgcaccgtctttccattggtcaagctcgagaaatttgaggctgttgccaagaagatctccaaggccctgacagcagctgggatttcacatatcatcgacatgacaggtaatacaataggaaaacggtacgcaaggacggatgagattggtgtccccctggcgatcacggttgatcacaccacgagcgtgacggtgcgcgatcgtgacagcaaggaccagatccgcgtggatgtggacgaggtggcctcggtggtgaaggaagtgacggacgggcagagcacctgggctgacatcatgtggaggtacccggctcacacggcctcggccgccgacgaggatggggcacagccctgaagaggcacagccacaacaccacccaacgatcgttggtttctcttcgactgaaacacttgtcccaggaaaccaagatgctggcctagctgacctcccagcaactgtggctgctgtgaagaatcctaaccctaaggtggtttatgatgagtacaatcatgaaagatatcctcctggagatcccagcaagcgtgcatttgcttactttgtcctgagtggtgggaggttcatatatgcatcactgttgcgtctcctcgtattgaagtttgtcctgagcatgtcagcaagtaaggacgtgcttgcccttgcttcactcgaggtggacctctccagcattgagccagggaccacggtgactgtgaagtggcgtggaaagccagtcttcatcagacgccggacggacgacgacatcaagcttgccaacagtgtggatgtggcatccctgcgccacccagagcaggatgcagagcgtgtgaagaatcccgagtggctggtggtcattggcgtgtgcactcacctcggctgcatcccactaccgaacgccggagactttggcggctggttctgcccatgccatggttcccactacgacatatccgggaggatccgcaagggccctgcgccgttcaacctcgaggtcccgacctacagtttcttggaggagaacaaactgctcataggttaagagctcaaaagctacctgtctatttatctacttcactcaggtgaatccctgctgtgctgttatattgtttcttctttttaccgtttggctattttttttgctccaagaagatcattgtcatgccaaagtgcgttttttaaagtacaaaataatgtggtactttgctgatgctaaaatgtaagtgtggagctcatttggaacatcggttttctggggtaccgcaggaagaacattgattatacatctttctggcacattctcatgtcaagaataagcacccgctattatttttcgc

SEQ ID NO: 17380 - DNA, 2638 bp, Zea Mays
caccagcgaggagagaagccgcccgcgaagagagagagagagagagagggcgagaggggcggaggagagagaaacccctagtctccagccgcctcgcctccccccatcgccgcctcagcctccgcctcggcgcggggcgaggaggaggaggagagaggaagccctagaaggttcgcgccgcggacggcggcgcttgcgcctgcgccaggccacgagatctcgtggcagcgccgccggctggtgtatcggggtgcagcggctggcgggcgctgggcggtgctggttctcggtgagtccgctcgatcccctcgccgcgggagctttcgctcgagcttccccgccccctcgaatcgagggttctggttagggggtcgcctcctgctcccccggcgaccgcggaataagctagccccccctctcgtgtctcgcctcgggggggcttagggttaggttcttatccggaattgcgggcgaaattccacggccaaggcggcgcattgctacccgggaggaggaggctacgcagtgtgtctccgcagccgcagccagcaatgatggggaagacgaataggttctccaagggccaccagctcggcttcgtgcctgactaccggcatggcgtggaggctatgggggagtccaaggggctcgggagccccccgaggatcgactcggggagctcctgcgcgccgcccaagaggaagtgcgtcagtgtgaattcagaggagggggaaggcgcctcggggttcagcatgcctcgggcccgggaggtgttctcgctgcccaggatgactcgtctggacaagaaggacctagagatgaagctccgccatgagcttgcacaggtgagggacgtccagagtaggctgtttctgagagggtctgcggtcagcatgaatggtgcagcggtcgcgtcggtccccgcaggcgatgtgcaacccaagaaaaaggttgagaagctcaagcggagcgattcggtgcaaacggacaggggagcgccgccaccagcggccacggtcgtcgccgcacctgttgctagctctgttaactacacatcatcgtttaaacaatgtgccaaccttctcaagtccattatgagccatgtatgggcaggcccgtttcttgttccggttgatattgtgaagttgaacatacctgactatttccaaatagtcaagcagcccatggatttgggtacgatccagaaaaagttgaaggcagggatgtactctacacctcgggaatttgcagctgatgtgaggctcactttcagcaatgccatgaattataacccagtcaataatgatgttcatttaatggccaaaactttgagcaagaactttgaaactcgatggaagcttattgagaagaagctccctaaaccagacgataagcctcaaccagttgagaagcctcctgtgagggagcctacagaaaagaattcaactaagggagttgccgttgagaaagaagacatcaccaagaaaaaaccctcaaagaagagtgtacctaagcaagacatatttcaggaaggatattcagcggacaatccagttttgcaaccaaagaaaaggaaaacatctcctttgatacaagatgcttctttggtagaggatgttgttccaaccggaaagagaatgatgacgagtgagcaaaaatatgatattagtgcaagattacaatcatttggtgcattcattccagaccatgtagttgagttcataaggagtcgcgttgatgattgcgatgctgatgaagaggaaatggagcttgatattgatgttcttggagatgatactctttttgaattacagcagctacttgatgactatgacagggttaatccgtcgagaaaccttacaaaagaggaccctcacgaagctgagtctcggagtcaatatgaactcatcaatccatcagtgtgtaacgatggcaatgagctcattgacgaggatgttgatattggggagaatgaccccccaattttggctcttcctcctgtggtacttgaagatgaaacagcagacagaaacagcaagcatagtacatccagcagttctagtagtgactcagaatcatcctctagtgactcagattcaagtagctcttctggaagtgatgccgatgccaaagctcctcaacaaaacagcgggtcaaaggaaaaagttctacctgtcgatggcgtggatcaggaaaaggattcactgagcacattaaatttaccagagcaaagtacaaaccctatatctgtttctgctgatggtgaggggggaaatgtatctgagaagcaggtctcccctgacaagcaaatacgagctgcccttctgagaagccgctttgctgatacgatccttaaggctcgtgaaaaggcccttgatcagactacaaagaaggaccccgagaagcttcgacgcgaaagggaggaacttgagagggtacaaagagaagaagaagaatgaaagggtttaatgatcgatgggaggagcttacgaaatacgtcgtcggcgcgaaggcgaatccaccgaagaagctgagcaatgcactgaagaatgggaaggtgatggctacgaacattgtgaaccctgcacaattaaagagttgcatctcatcagtgtcgatctggttttcagaccttttc

SEQ ID NO: 17381 - DNA, 1794 bp, Zea Mays
ggacggtctcagcccgccacgcgacaaccgacaatccttcgcagtcccgcaccgcaccgccgcaccgcaccaccgcaccgcggccaaggccaatagcctcgcctagcgctcactcgctcgccccactaccaccgcaccacgcgctcccgtttccgccgatccgagcgcgcagatcgcggaagcccagcggctcagagtccagggggagggagctcgcggcggctgaggaaggcgttcaccaccgtcgcggtgagtgctcccagtcaagcgcctcttccttcgtagtgtcaacaattccgccccgcgcccgcgcggatctgattgtctcgatcgtccaatcgagcggatttcattgaggaagagatggggctctcctttgggaagctgttcagccgcctcttcgccaagaaggagatgaggattctcatggtcgggctcgatgccgccggtaagaccaccatcctctataagctcaagctcggcgagatcgtcaccaccatccccaccattggattcaatgttgaaactgttgagtacaagaacattagcttcaccgtttgggatgttggtggccaggacaagatcaggcccctgtggaggcactactttcagaacacgcagggacttatttttgttgtagacagcaatgatagggaacgtgttgttgaggctagagatgagctccacaggatgctgaatgaggatgagctgcgtgatgccgtgctgcttgtatttgcaaacaaacaagatcttcccaatgctatgaatgctgctgaaattactgacaagcttggtctgcattctcttcgccagcggcactggtacatccagagcacttgtgctacatctggtgaagggttgtatgaggggcttgattggctttccaacaacatcgccaacaagtcttgaagcttttcagcagggctcctagcaagaggaagacgtctgaacaacttatggatgcttttttacattttattacaaagatactccctctgtctcgatttactattccttttgggatagtggttgattcatataatatttgatgtatgtgtttaatagatgtgtctagattcaccatcatctattttaatatggacatagatataaagagctaaaacaaatactattttgaaatggagtgagtacaatctatagtagatagtgtgggtgctgtggagagaaaaaaatctgagctttcttttgagtgtttgctagtgtttaccttcggagatgatatggtaaattatattgacatgctttcgcgtaggtcttcaccgatccagtgctgtggcagctacatttcgttcttagatggttaacgtgtgccaacataaatccaatatgttgcttgtggtacgcaccgttttaaaatagctatggacagaccataattgacatcatcttctgtcgaactagcgttgggcttagttaggacttgggatgtcaatgctagatagctagagctgtatagcatctctaaggggtatttggtttgatgttcgatgaatcatctacatattctttatttatttttatttgggttatgatgtggaataggttgatgcatcaccatctcatatctcatatattagaagataactagcaaagtgtccgttgctacagtttttatttatacttgaggataaagtataaaatataaaaatatgtttgttttattggttatttgagtgtgaatgtaagtttaaagcgaataattgtggttcaaatccaaatttatcataattttagttttttaccgtttaaatgtggggagcatgcatggaaaca

SEQ ID NO: 17382 - DNA, 1206 bp, Zea Mays
tgtgcccccctccggccaccctcggccccacgcctccatggtcaccgccacgacaaccccgccgcaatgctggcgagggctccccgccttggcccgggcacctccacccctctcctctcctcttcggccgcgtgccgtagcggctgcggctcccatctatcctctcaggcgccgcatcgctattactacaaccagaggaaggcgaggcacactggactgttcccccaggtgtacgctggaaaccgccggccctggcttctaccctctggggctctacgaggaggggtctaattctctgtcgcggtctcccctgtctaccttctttggtatcatggcgccggtatttgggagctccagcggcggtggtgcaagtagggagaaggcgtccgggcgaggagcagcagctgcaattgaggatagctccattgacattggtgacttcttcaagggccctctacctgggaagttcctgaagctccttggttttttggccttgtctcggcttggtgtgtatatacctttgggtggggtcaaccgagaagcttttgctgggaaccttgaccagaacagcctgctgggcactttagattctttctctggtggaggcattggccggcttggaatttgctcccttggcattgtaccatttatcaatgcacagattgtgtttcaactccttgcgcaactctacccaaaattgcaagaccttcagcggaaagaaggggaagcaggaagaaagaaggttcttcagtatacaagatatgcttctgttggatttgcaattgttcaggccattggacaagttctttatctccgtccctatgtgaatgatttcagcacagaatgggttctaacatctgtgacattattgacacttggatcggtctttactactttcattggtgaaagaatatctgatctgaaacttggaaatggaacatcacttcttatatttacaagtataatatcatatttgcctgcatcatttgggaggacagttgcgcaggcatttcaagatgggaattatgttggacttctcacaatcatattgtcattcttactattagtccttgggattgtctatgttcaagaagctgagcgcaaaatacccctcaattatgcttctcgttacagcagtcgaactggggaacttcagcgatctgcatatttaccatttaagatgctgcccctaaaactgactcctcg

SEQ ID NO: 17383 - DNA, 3122 bp, Zea Mays
ccagcactcagtatacaggtcaatcaaggttgtttagagatgcctgccaacactgattgttctgaagatttattccaaagccatgaagcagaaatgcttgagaacgcagaattttggtcaaagtcaaactactcccctgtggagcatctggagtgccatatggaagttaacatggagctgaacgaaggagaacaaatgattgatcacacagaagctagccgatatgaattgtttagcaacgatctgcagagccaatcaagaacttccaacttggacaatgaacattttccaagggatgcatcaaaccacgctaatgttgaagcaactggacctccatatgatctctcaaatggatatttcacagccaaattctgaggctaatccacctgatggggttttagcggttcctttattgaggcatcagaaaattgccttgtcatggatggtgaaaaaggagactagtatctcgctttgctatggtggaattcttgcagatgatcagggccttggtaaaactgtatcagccatatcactgattcttactgagcgcccaccagttccacagtcatctactaagaacgagccatgtgaagctgtaactctagatgaagacgatgactgtattggacctcattcggaaaagctgatgcggacatgtagctctcaagtgacaagtaacacagtgaagcaagaaaatcctattgtagcggttaaggcaaggccagctgctggtactttggttgtttgcccaacaagtgttttgcgacagtgggcaggagaactgaagaacaaagttacaagtaaagctaatttatcttttctgatatatcatggtagcaatcgcaccaaggatcctaacgaacttaccaaatatgatgttgtgcttactacatattctatagtaagcatggaagtaccaaaacaatcaaatcctgatagtgatggagaagagaaagggaagcctgacccgtatggtgcacctgtgtcctcttcagggagcaaaaagagaaaggcatcctcttctaagaaaacaaaaaataaaagtgttgcagagagttgcttgcctgaaaaacctcttgcgaaagttgcttggtttagggttattcttgatgaagcacaaagcattaagaactaccgaactcaggttgccagggcttgctggggtttgcgagccaaaagaagatggtgtttgtctgggacacctatacagaatgctgttgaggatctctatagctacttcagatttctcagatacaatcccttacgctgtatataagcagttttgcactctgataaagattccaatcagtaggaacccaaataacggttacaagaagcttcaagctgttttaaagccggtaatgctacgccggactaaagcaaccatgcttgatggggaaccgatcatatccttaccacccaagactgtttcacttaagacggtggacttcactagcgaggagcgtggtttttataacactttagaagttgaatcacgagaacagttcaaggaatatgcagctgctggtactgtaaagcaaaattatgtcaacattctattgatgcttttgcggctaagacaggcatgcgatcaccctcacctagttagaggctatgactcctgttctagttggatgtcttcgttggagatggtgaagaaacttcccatggaacggcagcacaaattacttatttgcttgcaatcttgttctgcgttttgtgctctatgcaatgatgcgccagaagatcctgttgtcactctatgtggtcatgttttttgcaaccagtgcatactggagcaactcactggtgacgacagtgtatgcccagtgtctaattgcagagtccgactaaacacatcctcactcttctccagaggcactcttgaatgctctctgagtaaattagcctctgatttcaagtctgatgatacatgtatggaaatgatacatgctgaaaagcgccctgggatggattcatcctacgcatcttcaaaattgagagctgcattagatattcttctctcattgcctaaaatagatcccactattgatagcaaatgttcaatcgggattgaatctgagaagtttgatggaaagggtatttcagaacaaactgacaccaagttgacagagaaggccattgttttctctcaatggactagaatgctagacttgcttgaagtccatttgaaagcttctcatgtgacatatcgaaggcttgatggaacaatgtctgttgctgcacgggataaagctgtgaacgacttcaatatggttccagaggttactgttatgatcatgtcactcaaagctgcaagtcttggcttgaatatggttgctgcctgccacgtacttatgctagatctttggtggaacccaaccaccgaggaccaagctgtggatagggcacaccgtattggtcaaaaacggcctgtcacggtatcaagattaactataaaagacaccgtggaagatcgtattcttgctctccaggagaaaaagcgggagatggttgcttctgcgtttggagaagacaaatctggttcccgacagactcgattgaccgttgaagacctgaattatctgtttatggtgtagaatcgctcctgagagtgaacagttttgctcattggattggtgttagacgtggtagataaaaatgttctctgaaaaaataacaaaatgctttcatttagggattattagttcttgtagcttgtacagttgcagagatttaggggttgctagcgacgtgtcttccaattctttttgcacgggaagcagtaagatgctgaactaggtgaattcttcagatagctgctatagtgcctgttaacttggggggtgttttctatgtactaatttctagttcctccattttattttcttttacttcctaaattgtcaaacacagatactaaaatagagataatctctcttttagtctatgtgtttagcaatttaggggctaaaagggactaaaatagagagactaaagacaccccttaatgtaatgaagataacgacaatgaagctcagatgatatatatgtacatattcttctcgtatccgataaaccatcgagaatattgggccatattacggagggcttgttctcaa

SEQ ID NO: 17384 - DNA, 1208 bp, Zea Mays
ggaggctttggaaacagagaaataggacaaatggaggaatttaagtttcagtgcaagtggactgggatcaagtaaactgcgggttccaaagataactggaccctcatcttccccatcatctagctcgcagcctctgcttctcccagcggcaaacaaatttactgaagctacactgcctgcagatgctgagaaaaagccacaggatgggaaaactctgccaaagtatggtgccatgatcatggaagctcttttggaattgaatgagccgaatggttcagatattgctgcaatcttcggcttcatagagcaaaggtatgcggtacaaccgaccttcagaagatttctagcctcaaagttacggcgacttgcagactcaaacaaaattgaaaagatcgataagtcctataggctcccagactcccttgcaacaaggactccagctccaatgaatgcttcagctccaaaacagaaggatccatcaaagccatcgaaggtgtcaaaggccataggattgttttctgcctccagccctgcactagaggctgcgatggcagctgctgtcaaggtggctgacgcggaggcaaaagcacatgatgcgcatgatcagacgatggaggcagaaaggatcttcaagatggccgaggataccgagtctctcctcataattgcagcagagatctatgatcgatgttcaaggggagagataaccacgttagttccagtggcacaaagggagatttgagatctattggagtctctcttgtgttgtttgttgtacatggataggttctggaatccagtggcccggattgctcctgttgtatgatgtaaccgtttgtgttatactgtctccgttcttcgatatttatcgtatcctagttcatttttaaaataaaatgcgacaaataaaaaagaacggagtgagtacttaggatgtgccctagggttaacaaaataacatcagcgcaccgcctgccttcaaacttctgtaatatgtaaccccgtctttcccagcctgtcactgcaagctgcgatcgtgtatcctgatgtcagtattgtattttttttttccttggcatgatgagagaatagggaagtgttctaaacaaatgaagtagggtaggaaggtgaagtgttcttggtatgcgataacaataatctgtgccgcactttcaatttgagaatgttgtgttagacccttgttcatc

SEQ ID NO: 17385 - DNA, 1149 bp, Zea Mays
ccagggagactttgtttcagttgattggtttggtactttggttcattccaaagcgagtacttctctacttcctgtcacaaaaaaaagatttgcaatctagcatatttatggaagcctttgctctggataaaatttgcgggtcagggagatcagcggtcaccacccaagaaagagtgatggaagcccaaagtagtacttgcttttcaaaagtcgtgggacctaacttatggtatggcgatcgcacaagacttacgcccaagcaagaagaagctgcgcttggtttgtcacgtgcctgtggctctggcattccagcatacatttgcaccatgaagaagtctaatgttgtcaagagacagatggtattttcaagacagttcagtaagcgacacatattcggtcgtctgggcacttatgggtgtgaaaccagagtttttgcaggcagggacctggtcggcagtaagctcaacttctcaatgatccatggagaactaaggcttcttggtggatggcccctctttgtgaagagccaccgtatcgaagcaggacacgtgtgtgctttcatgttccaggaagaggaagaggaagagggcgaactgtcacttagggtgcacgtgctgggtactatgccagtgccaacaatctagcctttgcttgtttcgttgatgaggcacgggatgaacgtcgctaacgaattatgcatcagacattagtattggaaacagcagcatgtggctatcttgctctggaattagttgttgttgttctatctagataactatgtatggacatattgttcttttgtgttggagagagtaagcgttagtgttttaagacacaaagattgttatttttagactgaccgctccagttgtgcaaataggaactgaattagtggcattgttagcatgtacatgaaaacgtgatttgtgcagtgctgggattagcttgggaatgtcgtccaaggatggccttatattgtttcctcgcaatttgtggttggatttttctatcccatctttaaagtacatttggaatgtttctaattcttcttggaagatgtttgagaagtgtaagatacagctatgtacgactatgattcctttcattgttttcatcaagttggtgtgaaattacccacctttgccatcg

SEQ ID NO: 17386 - DNA, 173 bp, Zea Mays
cacatctttactatataacaggagttctatacaaaataattaaataattacatcatatgaggaaacgatccagcaacccaaagttgactgggagacgacggcctagaccactcacgaactcatcacagcatcctccacgcgcctcatcctttggtacctgctcttgacctgtg

SEQ ID NO: 17387 - DNA, 2706 bp, Zea Mays
cctcgccttcgcctagattcctatctccaccgcgttcgggttcctcccaacacctgcaccgcagaaccaaaccctagctgcgcttcctcctccagatcccggcgccccggccccatggccgccctcgtttctagctccagcttctccgcccgccgtccctccgctctctagctccggatcgcacgcgcacgtaaagacatggagcccgcagccgaggacgccgcagccgctgcgccggactcgtgggagacggccgacatagacgggcccatgagtcggctcatcctctccgcgcgacgcgtgtcctcttcgccggacttcgctgacgaccaggacccgccccagccgccgcccacactgcagccgcagggcgcgccttcggctccctcagatgcgcgcgaggatgtggtagcccaggtcgatcagttcctacgagaggccctcgagaagccaagggagaggctttctgtgctaagaatggagcaagaaattttgaagttcattcatgaccctagtcgtacagagtatgaattcaatggccttccaacttcgtatctgcgtcttgctgcacatcgcctggcgcagcattacttcctgcagtccattgccataccagacaacagtttgcctgatggaactggttcacgtatcatcctccgtaagacaacattcgactgccgactgcctgctgtccgccttgcagatattccagttaacctgccacaagaagacatctctgtggcgaaagtagctattaaacagaggcctcaaaagaatttacatggcatgaacagctcaagtgctcactcttctagagacaacctccaaaaaagcgtcgaagaaagaaaagaggaatacaacaaggcacgagcgcggatatttaacaacagcaatagcagtactgctactgatgagagatcagctgaggaagtgactttacccagtactcttcacaggtccacttccttggagttgaactcaagcaatagaataggtcaaggggctgaaattactcttgagaggagcttgactaccacttcagctagcagcaggtcaaatagaagcaagattgataaggagcctgcagtcaatagaaacaagcagaacaatagggttgcaattttcagagatcgtgagtcagagcgcaaggatcctgattatgacagaagctatgacaggtatatgcaaagatttgatcctggatttggatttagtggaggcccatacacaattcaacccctctatgcccctgctgttaactacaacaccgaattcccccagcttgggtcagcacaccgatcacctgttgctgtcgaacagcaacctcgtccaatagctcagcacatgcctgcatcatggtcagtggctcaagcatctaatgcaattggctatgggccagatggtgtcatgggaccttacagccctggtgcacctgtgagatcgtctgttttcatgcatgcttcacagcaatatgctataccttctcgccctggagtcccatttgcacatccacaggaatcaatgggaccatttgcacagactcaccaacaacaacctgatgctagtctacgctttgcccggccccggtgaggggcccgggcatgcctgcacctgccagtgtgcaacaaacacattatcctttgttactggcagatggtagcaggcataaaaaaaccgagaggcgtaaggcagagtcagccatctgtttgatgttgtcagcctgtatgcactctcggtgtagttgctccctgcatactgagatgcaggaggggcactgttctcctttaaacagaagcagctctaggtttattggacaaccccactaatccacaagaagatccacaagaagctgagagattgagatgctggaggagcacatcttgccctcgttgaatgggctctgttgttgaaggactgatagtgttggtaaaaaaaatgggattgcgcagtgagcgggtgattggcaaggggaaagattgggatggtccagtatgtgaacaggcgacagggatgtggccttaagccccgttgcccatgggatgcttgccgggttgagctgaggtggcatgatgacgatgctggttcttgctttgcctagtgcaatcgtggcaccattcttggtcaggtttagaagcagaggcatctctgtgcagctgctgttcacggagctggtgtttttaagttctttgtagtcagtgttgtgttgtaaatcaatcagtgttagtttgagtgaacaaacctatttcttgtaccatgtgcatgacaagcaacgactatagttgctaaagatgatgacgaatcgtgtatgcctcacaggcctatttactacagaagtgtttggtgttggaacaatctgatggagtgatgatcttggatttgtgcgtttatgcgatggatgtgttttacctcaaccgtaaggttaacttcaatggagcaaggtgaggataagcactgcagtgacatctatacggctatggccctgtttggcacagctgctgcttgttgaaaaagcaacttatctggctatgaccctgtttggcacagctgctgcttgttgaaaaaataacttatctgataagctggaaacagcttctgcttgttggctgcttttagtgtattatgagaagcagctgaactgataagctgctgcagaagctagctgtttgacagaatttctgcttaaatttgtgaagaagctgaaaataa

SEQ ID NO: 17388 - DNA, 2783 bp, Zea Mays
gtcggactcgttcacgcattcgcggttcgcctctttctctcctataaaaatccaccgccccccgccgcctccgcagaattccccaatcccaccgccaggctccgcacgcgcctcggaacctagcccagtcgactccttcagatccggcgggatcgccggctcctaccctcgtcgccacgttccggcatctcggctccccggcgtcctctacccgacttctacacctgccatcttccccaggcggcgtcccgacgaatcgcttggtcgacaggctacatcaccaccaagtcagcatcgacgactcgaaggattcgtgtcgtcgtcgatcgccgatagccggtcgccggtcgccggtcgcctcttcgtagatcgaattggttctgtgattattctggttgcagttcgctgtatttcatctgagatctgaaaaaagttcgggcctatctcgtgatagagaggcctttatatatacgtgaaaaaggagacatactcgccatccgtcatgggtgttgtgtattaccaatataagagtgaaaaggaaatctgttctatgcctgtgctccatgcttttatctctgtgtctgaactcaagcagcttatactgacaagtggtaagcacggccatgggcgaacccacggccgtgccagggaggatattatcatcttcaatgcccacagcggcgaagaatatgcagatgaaagagcatccatacctcagaacacaactgtgctggtccgcagaatttccattgccgggcaactgtcagagaagatcgttttgtcccccacgcggaaagtcacagaagaattttctgtgccttgcaagtcagtggttactgactcaagctcaaagtcatgttcttccacggtagtgcaagatgaagatgctgcaattgctgcagtgattgatgccgctgaactcaaatcggaacaactcccgtctaaaaaaggacaaggcagtggaaggtttacgtcaggacgtaactatgggtcattggaaggggaggcacctccaccaggctatgtctgtcgctcttgcggtgttccaggccatttcattcaacactgctcacaggaaaacaagatacctccacctggatacatttgctacagatgccgaattccagggcattttatccatcgttgcccaagcattggtgatcccaagtgcgacaacaataaaatgctttgttctcttgtcccagtagttacacctgtcaatggcattttggattcacttgtcccggcttcccccgttagtgctgttgatgacttgccagcagagctccactgcaggctatgtaaaaaagtgatgagagatgcagtattgacaagcaaatgctgttttgatagtttttgtgatagatgcattcgggattatattattacagagtcgaagtgcatttgtggagtcaagacactagcagatgacctcattcccaatcaaacacttcggagcacaatcagcaatatgttgggaacacagactatcagtggtggaagtggtacaacaagacacagaagttcgtcaggcagcaaccctgaccccaaaatacagagccacactgcctcgacaagggaggtgaagcaatctagagaccaccagctaccagcagcatctgcacttgatgatgtgctccaggttgccacagaaggtgctctagtgaaccagcctcgggagaaattggtacccagtgctaaaatccttggtaaagatggaggcaattttgcacaagtgtcagcagagaagactgtagcaaatgctgaagccctcaaagtaaaggatggaactgaatcgacttcaaaggccaccactgtttcaggggcccgagaacacaatgtcacaaggacagatcaaccgaagaagtggaagaaggcagtcttaaccaagaactttcaacctaacaatgttggatatggttacaatgttccatttgaccctgcatattgcaatcccttcatcaatggatatccttgggcaactgaaccttacatgtatagctcaatgggggtgccgtaccctggttatccgatggatccatattgtgtaaattcctttacctgcataccgtcgcaggctcttgcaatgcaaggctatgcaacaagctaccaaaggcctgaaactgagcccatgcatcgtgggggcactgcagctgcaccttcaaagcgccctgagaggagtgacaggcccaaggacactcgtcatcagccccaatcacgagagcacgagcgacaattgggctcttctcatgtctcagaatcgagaacgaggaacagaacaaggtcaagctccgagggaagggaccgtgggcattccgacagggcctctgttgaccaccatgaggaccactctactaggaagcggacgcgcgattcctctccgaagtacggtgatagacagagcgaccggaggtcgagtcacggttccaggagtatgatgactcctgaggaggatgcaagcgacgatgaatgtaatttcaagaggagatggggtcgcagatcatcaggaggcgtggacacaaggcactgaacggaagaatgtggactacggcggaccgaccaagtgcagcaatacattgctggtcaccagtgctcacctatccattttcttttactcgtaattgtatgtattcccctgcaaacaaaggggaacttccggttccctggcgaaatgtaatggtattaccatgcgatctctccaaatataaatggaagtttgctaagctcacgagttcttttttacttcttttaccctaacgccccgttttggaatcgaattccac

SEQ ID NO: 17389 - DNA, 2585 bp, Zea Mays
tctctatatctccgtagcatgagcaaatttacccgtttttgggagcgaattgaggctgttcgtccttttagtgcctcagtttttttgggttttgatgcagatccatcattgaatatcacagctcgaatccgtggtccaaatgtatgactatgtgatcctggttttatttgatcattttgttactagcacatctcagttaattttgttaattactcaatttatgtgctgttgtctttcaattttttgaaagatctaatcataaagctttctctggcatcccaatttggatgggagaaactgcttttctgctgttggtgcttgtgctcttttgttattatataggatcagtacataaatcatatcatgaaagaaacaggggttactgttgtactaagaggaaaagattcggagaatcttggcagttgtcatagtgaagcctcacaacaacctctacacctatacctcacaagtatgcatttaaagaacctagaagctgcaaaagttttggcagagaacctcctggatacagtagcagcagaattcggtgcttccagaatttcttcttcaaaagtatatggtgctgttccacctcctcagcagttgttagctggtgtcgacacctcaggaacgaaatcagatgttcactatattgtagggcccaatgtgttatcgggagctacacattcctttgcatctactggagttattgctcctgttgttgctcctgcagtgacagtgcaatcaggggctccaacatattctggggttccactacccagtaacatggcctatcctattccaccagcaaacggctgttccagtgacgtccacaccaacaagcatggctacaaaggggaactcaatcttggatgcggagatggataaacgatcccgaaggaaattccaggaactaccggtttcgaagggcccagcaacagaaagtcaggtattttctctgaccttgtctgaagctcacaggtggcaatagatatacatgtgggtttttcacaggcttgtaacaaatcggagtttgcattggctgtggagtgtaactgacaagatgcagagctcttcaaatatcttgttacttttttcagcaaatagaaatttaacctttgtgttttatctgtttctgtttgcttacagagttcactgatgttgattaacattgctagcatgccttaagttttgaaattggttggttggtatagtcttgttattagttgttgttagtaggttttgatacattttatttctttccactctttagagaaagttttgcatttgcaaaatcttcacattcagtggaagctccaagcaatataaatatacaaattacacaaggtccttccatatgaaacttcacttagttaagcagactcgactcatctttgttatgttattatagactctcccaatatgaaaattatatttacagcgcatctgcttctatattaagataacattctgaacttgtcaagggtcatgctaactagtattgtgcttccatgtgagatatgcttatatttgttctgtgtgcaaaattgtttctgatttcattcttatgcatgccattgcgttacctactctataacacaagaatttgatggatgaatcttcttgttttctttcatctttccagaactcacaacaggggtccaaatttgttaagacaggtttagatagttcaggtaacattgggagctcatcaattgcacctccgaagaaagttcaccctggatcaaatggaatgcttccgcaagaagaagcggatatgccatcacatctctctatatccactaagatgctaccaccacccctgaagagcatgctgccactgccacccagaagcatgcccccaccaccacctaagagcatgcctccaccgccaccaaaatttccttcagatgagtttttgtcaagaaacgagaacaagttttttcctttaaaggagccaacagcacctccaaggtcctttgatgcaatatcagtcttgccatctgaacgacgaccaagggagcctaaggaggaaaaaacaaaaggcacacctgtgtctgatactttgctgaaacttattgattatggagatgacgacgatgacggcgatattgatgtgacagacaacacacctaagggcaatccaactcctggttcagagcagaaaccattttgggctgtttaaaactgggtctgctaacgtagtctagtgtgaattcttgttgataaggatgcttgctgccttggtgcatcttctgaattgaagaggcaatcgagctccttgttcgtgtactgtagtaattctaacaggcaatgagatttctttgaacttgtattcattctggcctagtcaaaatgaaccgtttgttgttttggttcagatacgatgatgtttcgtttttagattcgacgttggttgctgaactcgtagcattttaatgtcggtattatataattgttagagcctatgtcaattttgtatccactgtcgtgcaaatttaatttttgtaatcagcctaaggtcacgacattgcttggaaacactttttttaatgaaggaaaatggcaggacatatggtatggtaatt

SEQ ID NO: 17390 - DNA, 1721 bp, Zea Mays
ccgcgctcctcgtctcccgggatcgcgggaggcccaagggacgatggatcgtgccgttacccgtcacggggttccgctgtttcaagtccttctggttttcacagccgtgattgagatccaatggtccactgtatccagcatttactgcaaggacatgccgccgaacgtgtatcggcctcacagtgtcacaataactgaatttggtgccgttggggatggtgtcaccctcaatacaaaggcattccagaatgcaatcttctatctcaattcatttgcggacaagggtggcgcgcagcttttcgtgcctgcgggaaggtggttgacggggagttttcatcttatcagccatctcactttatcactggacaaggatgcaataataattggatctccggattcatctcattggccagttatcgatcctcttccatcctatggtcgaggtagagaccttcctggaaaaagacatcagagtctgatttttggattaaatctgacggatgtaattataactggtgctaatggttcaattgatggtcaaggagctatttggtggggctggttccacaaccacacattgaattatactagaccacatcttgtggagttgatgtattctaccaatgtcgtcatatctaatctaaccttcaagaactcgccgttttggaatatccaccctgtgtactgcagccaagtgcttgtccggcatgtcacaatcctagcgcctttgaattcgccaaacaccgacggcgttactccagactcttccacgaatgtgtgtatcaatcattgctatgtaagaaatggcggtgatgttattgtcattaaaagtggctgggatgaatatggcatttcatttgctcaaccaagctccaatatcagcataagcgacatcacaggggagacaaggggtggttcagggattgcctttggaagtgagatgtcaggtggcatatcggaagtacgggctgtgggcctccgcattgtcaactcccttcacgggatcagaatcaagacggccccggggcgcggagggtacgtggagaatgtgtacatagcagatgtgagcatggacaatgtttcgatggccatcaggatcactggaaactatggtgaacatcctgatgacaaatatgacagcactgctctccctgtgataagcaatattacaatcaaggatgttgttggcgttaacattggggttgctggtatattggaaggcattcagggggacaatttcagcaacatttgtctgtccaatgtttccctcagtgtgcaatctgcacatccatggaattgttcacttattgaagggtattcgaactcggtgatcccagaatcatgcgaacagctcagaagcaattgtagacagacatccatttgctacgatggaagcagttcttcagtaatgagtgtgcagcaaccaagacatacatcgcccaccagccggttgctagatctttttactggagttggcttcattttagtgtaggtagagctgtgcttgttcttgctgcaaagggggcttgcttcatgtagtgagagccctattagtcatgtatatctgattcttgcaattatttgtgattagagtgccacttgcttcatgtatatagctgttgagatgactgtcggtgtatctttgcctgttttgttccaatttttggtatgtgaatgcaatctgcataactttatggttttgaacacactccctctgtttc

SEQ ID NO: 17391 - DNA, 960 bp, Zea Mays
acggtctcggcccctcggcgggcctccccgcctccctcgcccctgccttcgcctcattggtattggcgtccgcttgctcgctatggccgccgccccgtcgccgcggccgcgaatggcacaccgcaaaggcggagccgcccccatctccctcttccttgacaccgatctcggcacccacctcgccctgctcgtcgccccggacaccggcatccgcggcctcaagtcgcaggtggccgcggagcacgctgccgccttccccgacattggccccgtcatcaccaagtccttccaggtatttcatctacagcctatgatgaaagtgaggcttccgatgatgatggggccatatcactatctcagaagagtctcaaaggtggtctgcacattagctccatcctccgtggttcccgtagctataagaaggcaagaaagaagctggaggagctgttagacgatgatgacaccattgtgcctgatagccagcccacggatggtcttcggggttgaacatgcgtcaaccttttgcaattatccacctaatacggtgcaagtttcatgcgagccccaaagccggtgtgctttgcaattgctgtagcttaacctcccacaatttgtctaaaacacatgcgcgccggcgttatccgttgaggattgcgtatttttatttattgttctcctctgtgcatactcttttcttttcgggagcaaaaaaacattgcatacacgatacatatagtgcctaaaatatacagatcatacatgagatgtaagagcatcagttcaagccgcagcattctatctactcatcatttgtacaaggctggaatagcatgtgatacggcatcgtcaaactaacaaacagacgatcacggggtgcgagacagtctcgtcatctgcgcttctgggtcttcatccctaatgttggcagtcttgcccatagatttctggctcaacatccgg

SEQ ID NO: 17392 - DNA, 129 bp, Zea Mays
actaacatatagggcccaccaagctgtggtgtgctgggcgtataaatagggagtcacattgatagcgtttgatgtgccatttcaactgcttgtgctatttttccgagcttggattttcttgctctgcca

SEQ ID NO: 17393 - DNA, 558 bp, Zea Mays
aaggcccagtccgatgactctggccctataactctgagccccatcggagactcggagtcgggggcgccagcgtctcgcctcgccgtcagcagcagcagcagctgcacctccattccacggcttccgtcgtgcgcttcgtctgcacccacaaaggcgacggcgacggcagggggaggagatgaagctgaagcagctggagggcctcttgggtggcctgacccagttctccgaccccaagctggagctggagcagtatgcgacgggccctcacatcgcgtcgcggatgctctacatggcagagaatagtttcaatgacataactggcaaagtggtagctgtctagctgacttcggctgtggctgtggcactctggctgtggcgagtgctttactggatgctgaacatgttcttggtattgatattgacccacagtcacttgaacttgctcaagaaaatgctgctgatctggagctggacatcgatttagtttggtctgacataaagaacttaaatctgaaaggtaggagagacacaagctcgacctccccatgaagtatg

SEQ ID NO: 17394 - DNA, 1887 bp, Zea Mays
ggttcgacctgtttgttgtcttgttctgcaagcaggattctctgcaccaactcctatccaagctcaatcatggccaattgctctaaggggtcgtgatatagtagctgtggcgaagacagggaattggcgacacaaattcaagatgaagcaatcaagtttggcagatcttcaagaatatcttctacttgcttatatggaggtgctccaaaaggccctcagctaagagagttggagcgtggtgctgacattgttgtcgcaactcctgggagattaaatgacattttggaaatgaatagagtgagcctgcaccaagtatcatatcttgtccttgatgaagccgaccgtatgcttgatatgggatttgagccacaaataaggaaaattgtgaaacaaataccaccgaaacggcaaactcttatgtatactgccacatggccaagagaggttagaaaaatagcgtctgatttactggctaacccagttcaagttaacattggaaacactgatcagctagttgcaaataagtcaattacacagcatgtggaagttatcccacatatggagaaatcaagacgacttgatcagatcttgcgctcacaagatcctggatcaaaaagcataatattttgctccactaagaggatgtgtgatcagttagctcgaaacctatcacggcagtatcgtgcttctgctattcatggtgataaatcacaggctgagagggattctgtgttgaatgactttcgaagcggcaggtgtccagtacttgtagccactgatgtggccgctcgaggcttggacataaaggacatcagggtcgtggttaactatgatttcccaactggtgtggaggactatgtccatagaattgggaggacaggtagggctggtgcaacaggatctgcctacacattcttcggtgaccaggattcaaagtacgcttcagaccttgtgaagattttggagggtgcaaaccaatctgtgccgccacagttgaaagaaatggctcttcgtggaggatatggtggaagatcacgtcggtgggcatcttctgatgactcttatggtggtcagggatatggtgctaaaagatcaactgatagcttcaataataacaacttcggcaaccaggctggaggtggttcaagctttcactcgagctccagtggcggtcagtttggtgatactacgagcttccatggcagtgtccgcaacaatcagacgggggacaatgcgagctttccacccagctccagcaacaatcaggctggcgatggtctcagttttcatgaaaggttctatggatcacgtggaagggaccagagcagaacaagcaatgatggattccgtgccaggagcagaagtcctcctggcaagcccgtggaagtttccaactggtgattgcatccactagatccaaggatgtgatggtctgaaccctaacggtctcctgctatcttgatttgacgtctgggagacgcttgattccgtgcctgtgggttgtaaagcgttaaaacttgactttgctagtgtactcccaatgatataacccaatcctgggtaaacaaacgcatggggatgaattttggacgaaaccatggacaactgatgtgtgtttaatgtcatgtacaatctatgtcgaaggctgttgtaaatgccgtccgcatagtttatattgagatgagtgtctgttattgcatgtgttcgccgtggtttgtaaacgcatgtgttgtagacagccacttgacgtagctgttcgccgtggtttggaccttggaggttgtactaaattctaatcgtatggatggctggaacacaaaagtccacgagtctagtcgcgtaaggatgcaccatagtcacaaaaagtttctggatcgatagaatcga

SEQ ID NO: 17395 - DNA, 1077 bp, Zea Mays
tggagcctcgcttgtgacgtccaggcaggctgcactgcaggccaaggaggctggagacggacggctgcagctgccgcagtcgagctgctgctcctggttccggtcgcaaactcatcagaaaactcttcacagtgcatggaaagaaatatcaagattgcgtgacaatgtcagtaacaaaaggagcagactccagcttcaaaagcaaaaactcaagctgtttgctattcttaggggacagatgtcatatctagaggcctggtctcatatcgaaaaacatcattcaagtgctttatcagcagcaatcaaagctctgaaggctagtactcttcgtcttccagttgttgatggcgcaaaggctgatgctcaagccgtgaaggaagcagttaactcagcagtggatgtgatgcacacaatgacatcctcgatttgtaatttgctatctaaggtcgagggaacaagctctgtggtgtctgagcttgccaaagttgcaacgcaagaacaaatgttgttggaccaatcaaaggatctcttgtccacggttgcagcaatacatgtcaaaaattgcagcctgcaaactcatatgctacaacgtaaccaaaagcagagcccgacacaattgtagaccagtttgcctcgccacgttggtggtcactaacatcacacggcctcatgttttctcaccggagactgtggtacaggtaataaaagctgtaaccatttgctgggtgtgaagcgtttcctaatctgctcgatcgacctcactgagtgtagcagattcatgtaattttttgagtgcatatcaaccataggagcggcccttcttacctgcagtcgctgcagttggtgtatacagaaatccctagccctgacccaaagataagcttcctgtagatatgaaaagagcttgtcgtttgcgtgcttagtcttgtgtggagtgctcgagtggtgatgagtgtttgtattgtgaaagggagacggttgttggcttgatacaggtgttttcttgtctaaatccacacgaaagttgttcatcctgatttgctcatggagtcatggtatctgctttgagagtgtctc

SEQ ID NO: 17396 - DNA, 548 bp, Zea Mays
tctgcactgcacgggctaacttctctctcttccggaagcacttcccgaaaaaaggaagacagagaaggaaacggcagtgaagtcgccggcgccgccgcgacaggaggaaggagggagtagcagcggcaggggaggtccggcgatctcggctgctgtggcgcggtaagggaggaagcggagccgcgacaggatgcactcgtttgggcaccgcgccaacgcggtggcaacgtttgcggtcaccatactggccgcgatgtgcttcgccgcctccttctccgacaattttaacaccctgacacccaccgcatccgtcaagatcttgaatataaactggttccagaaggaggccaacggcaatgacgaggtcagcatgacgctgaacatttcggctgacctttcatctcttttcacgtggaacacaaaacaggtttccctttgggatggcattatacctgcaaaggagcatgccaagtttttgatccatacaacaaataagtacagatttattgaccaggttgagccttactggtgtaatggacatccattat

SEQ ID NO: 17397 - DNA, 1627 bp, Zea Mays
ccatagtgaacgaagagatgatcgagacattgttcgtctcaaattcgacacggaggtcgtcgaagagcggaaccaaggggccgaattccagtctgtgcagccaggagaacaaggtcctcgacccaaagaaatcacagaacattgccataatgctgagggcgcgcaatgcgaccaaggaagaagtgtgtaaggcactcctagatggcagagagccttgggaccgagctcttggagatgctgctgaagatggcgcctagcagggaagaggagattaggttgaaagagtacagggaggatgccgtgtctaaacttggccccgctgagagcttcctcaaggcagtgctcgcgattccatttgctttcaagagagtggaagcgatgctgtacatcgccaacttcgatttagaggttgactacctcaaagcctcctacaaaactcttgaggcagcatgcgaagagcttcagggcagcaggctgttccacaagatactagacgcggtcctgaagaccggcaaccgcatgaacaccggcacgaaccgcgggaacgcgcacgccttcaagctggacgcgctcctcaagctggtcgacgtgaagggcgccgacggcaggacgaccctcctgcacttcgtcctcgaagagatcgtcaagtccgaaggaggcaacgttgtagccatcgccaccggccagacgtctgaccaggcgagcgccctcgcggacgatggtctgcagcgcaagaagctggtcggcctgaaaaccgtggcgagcctcggcggcgagctgagcagcgtcaagaaggcggcggcgatggaccccgacgctctggccagctgcgcggccaagctctcctccggcgtcaggaaggtcggcgaggtcctgcgcctgaaccggcaggttctcggccccgaggacgggttccgcgcctccgtcggcgcgttcctgagcaaggcagaggccgagatcgccggggcgcaggcgcaggagcgccgcgccctcgccctcgtcagggagacgaccgggttcttccacggcgactcggccaaggaggaaggccacccgctgcggatcttcgtcgtggtgcgcgacttcctcgcggccctcgatcgcgcctgcaacgacgttgcgaagatgaatgatgggcgggcggcggcggccggtgggtctgggtcgtggcggcgggcgaggaacgctccggtgtttgacgccgtgcgaccctctggctcgtcggcgtcatcctagccgttgggatgcagcgctgatttgtttgtctgacagggatctgcgtcttgttgtctagaagaacagcagagcagggcagggcaggctcagacgtagtaggaccgtaatatactactactaaatattttgtacctggagcagaagatagtctgtagagtaagtgaagcctaatgattcagcgtgatgaacatcgtcctgccaaaggcctaccaaaggtagagtggcattgtacatgactctgctggtgcctgagagttgctgttgggtgagagcttttgagcaactgatgatcaagctcagtctcatgttaagaagtactctctcatttgttttagactatatatatatatatatatatatatatatattcattagttaatctatacatata

SEQ ID NO: 17398 - DNA, 518 bp, Zea Mays
ctttggcatgctacgacccagccggaatcagcctaaaaggccaggacatggaggtgtggaggcagcagcagaagccattagcccctaaccctaaccagtcgtgtctctcgcccccagacgttgcctccgctattgcgcgtgtagcagttgtgccctgcacctcgcccttgcaataggtgcacccctgccatggcggattcacccccatctcctgtcgcctcagcccgcgctgccatctcttctgctctcccccgcctctctagtttggagctcttcttcgggcggcagaggacgacactgagtcctggattcgtgacccatcgactccccgcccgctagatttgtcgggaaggacgtcggctacgtcaaccgccatcgacagagtacatcctcgtatactgagccagaagagacgaacttgaatgaggcgacgacaaatcggtggtagtgcaacgctggagaagacgaacaccctgccaccaagtctgctccccgagattccaaagatgtgtcgagga

SEQ ID NO: 17399 - DNA, 3301 bp, Zea Mays
ccaaccggcccttggtcgtggcgtcgctgtccgagcgccagacaagagacaggggagatgaaaaagaggcggtggtggttcgagtgtgaatatgccggtggggagggctctgcctccccaggatacttcgccccccgttccaccgcgagcccttccggcttccgcctctgttccgccgctccagcctccaggatccgtgagaggaaaagtagtagccccatccccaaccggtcctaacccacggtacccaatacttgactcggctctctccatgagctactgttccatctccatttcttcaatcatttctcgcctttcatgttcaagggcgttgcttgccaaccacggtatcgttctagccgccggggccgaacgaagtcggggatgtaattgaatccagcgatctttggatgctcgtcatacgtgccaacagcagggtcaatttccctcgaaagagaaggccgaggaaatggaagccggtttcctgtggaaagagatcggtgaccaagccggtgcggcgagaatgtccggtgggaacaagaacaggagcctcgactgggatttgaacgactggaggtgggacgccaacctgttcctggccacaccagcggccgccgcgccatccgagtccatcagcagggagctgagccgaggtcagggggagatcgatttcggcgtcgtcgttgacaagaggcggcggctctcaccagaggaggacggcagcggtgggtgcagcaattctgcggtagcagatggagacaacagtcacgtggtgtgtgttcagagagggcggaacactgaggagacgagacccaggaaaggtgccaattcgagcaccactccttcttgccaggttgacggctgccaagctgatcttagtggtgccagggactaccataagaggcacaaggtgtgtgaagcgcataccaggacaacagtggtctgcatcaataatgtagagcatcggttctgtcagcagtgcagcagaagagctgccgatcacgtctggcacaacataatggaaggagaaggaaagttcaaccgcaacctgctgtgaacgggaattccatgaatgaagatcagtctctaagtagcaccttattccttctgttaaaacaactttccgggctcgagtctggtagctcttctgagcaaatcaaccatcctaattctttggttaaccttttgaagaaccttgctgctattgctagcacacatgcatatcaagatgttctaaagaatgcaacttcaatatcatcaaatgatggtaataatgctgcaaatggctctataatgcatgagcaaaccatacggtcaattcctgtcaggagagaatcattagcagaagagcctgcggtgaaaagacgagtacaggactttgatttgaacgattcatgcattgaagaagccgagagccgaacagataaaattgtgttcaaactctttggaaaagagccaaaagattttcctgtagatctacgggaacagatcctaaactggttgtcgcattatccaactgatatggaaagttatattagacctggttgtgttattctaactatttaccttcacctccctaattggatgtgggatgagtttaatgatgacccagcttcatggatagaaaatcttattagcttatccaatgatggattctggagaacaggatggttgtatgctagggtacaggactgcctaacactgagttgcaatggtagtcttatgtttgcatctccctggcaaccggtaattggtgacaagcatcagagactgtgtgtaactccaattgcagttgattgttcttcgtcagtaaaattctctgtgaaaggtttcaatatagttcagccaaccacaaaattactttgtgtgtttgatgaaaaatatttaattcaagaagagacacaaatgctacttgaagattcaactatgcagcaaggccctcaatgcctgaccttctcttgttcctttccttgtacaagtggaagaggattcatagagattgaagactatgatcaaagcagcctttctgttccctttgttgtcacggacaaagatgtatgttctgagattcggatgttggagcatggattggatttagtttcatttgatcaaacctccaaaagaatagatgatctgatgatttatcgcagtcgagcattacattttttgcatgaaatcggatggcttcttcaaaggagccatgtgcgagctacgtctgagcagcgacaatattgtcctgaccgcttccctgttgcaagatttagatggctgctatcctttgcagttgatcaggaatggtgtgctgttctaaggaagcttctgaacaccatgttccagggtgatattgatgtattgtcaccaattgaatttgccttgggagaaaatctattgcatactgcggtcaaaaaacgctcaaagcctttagttgaatttctattaagatacaccacaacaaatattgctccagtgggcggtggagatggtgctccagttcagttcttgttcactcctgcgatgactgaactgtcaaatatcacacctcttcatattgcagccacaatcagtgatgctattggtgttttagatgctttaactgatgatcctcagcagttgggaatcaaagcgtggaagaatgctcgtgacgccactggcttcactcctgaggaatatgctgcaaagagaggcaacatatcctatattcaaatggtacaggacaaaattgacagaagggtgaccagagctcatgtctcggttaccatccccagcacaattgatactgtcggaaagcatggtagccgaatgaagcctgccgatcaaatcacatttggtgttgagaaaaaacaactaagcatcaaccaaacattgagctgcagacagtgtgtccagcaggcccagcagcttgcattccatccccggacaaataggtttctgtctaataggactgcgatgctttccttggtctccattgctgccgtctgcgtctgtgtgggattgatcatgaagagcctgccacaagttggttgtatgaagcctttcctctgggacaatatacgttggggccccaattgatagactgcagaagagccagcccgattgtatcagtgtatgatgaagatgtttgcgccgagcgaagctagtttcttgtaatgtacatgtttcttatactaaatgtctaacttatttctgtttatagtaaaacctgtgaacttgcctagcttgtaactccattgcatttgcatcctgactgaagtaaagcttttacttgttttggttgagaggaagaaaaccttttacttctaaa

SEQ ID NO: 17400 - DNA, 342 bp, Zea Mays
ttgaagatggaggatgtttccctcctgaggcgacccaattgtcgagcaaaaggtgtggctccaggcttcaaagtcatgatcttgggtgcagccacttgcactattgatgaagatggaccccttgtttcagtgctccatctatatgatgtcgtcaacgcacctggtgtcatagctaagtggctgacatcagccacatgaacactggtgctgtggtatgtggcttcttgggccagccacagttggaaaatgctctgactagaatggatcttgtaataattcatgttgggtgtccctcagaaacctgggatgacaattgactagggatgatttcaaaaaaaaaaa

SEQ ID NO: 17401 - DNA, 1052 bp, Zea Mays
actgtgcattcttcttaatttgctacccccattcctattctatgcagctgttgtatttgcagcagcttttgtgctcatatgccattttgtccctcagtatgggcagacacatatcatggtatatattggcatatgttctcttgttggatctttatcggtcatgagtgtcaaagctcttgggatagccttgaaggtgacattttcagggatgaaccagcttgtctattcacaaacatgggtgttctcatttgttgtaatcttgtgcatcgtaacacagatgaactatctaaacaaggccctcgacacattcaatactgcagttgtttcacccatatattacacaatgtttacatccttgaccatcttggctagtgtaataatgttcaaggattgggatcgtcaaaatccaacgcaaattgttacagagatgtgtggcttcgttacaatcctttccgggacttttcttcttcacaagacaaaggatatggtggatggtctcccaccaaatttaccaattcggcttcctaaacatgcggatgaggatggctatgcagacgacataattcctctcagatctgctgctgacggtattccactcaggtcgccaagggctacagattcatttcgctcgtcgtgatgtcctgagatttgcaagtgcgctgaatcatgtagattccaggctcatacccagcagccgtcagtctatatacatgggaagcggaaaatatcccccaattcactcggttggagaccacaacgtaggttaactgtaggattcaacaggtaacaactcggctaaccccccaaccctaatttgagtcattggtacagaattttgacgattatatcagttgtatacttatccgggtaacatcatcaccaagatgaccaagaatatatgttttgggctatatgtatatcgcggtgagccatataggttattatgttatattgaattgttgtattctttcaacacaaacactctgaatacaggaagagttgaacaagcacatcatgccgttaaccatttaccacttttatctgaacacttg

SEQ ID NO: 17402 - DNA, 1339 bp, Zea Mays
gagaaaataataattaaaaaaaagcagtgaaccttctcgcgctcggcagttggcagtcctgtcctgtggaccgtatgacgtgtttatttatgggcggcgccttcgtctccactccccaccggaggaaggaagcgagaagaccagaaggtgagaagagagagagagagtgtgtgtgatcggtacaaggatcaccgctgtgcctgcgcgtgctgcttcaccgaatcgagtcagatcctgtccgaatccgagctaagggatggcaaccggtagtgaagcctcgaaggcagctgaggctgtggttgactggcataaacacgacagcaagaggatgctccatgcggtttaccgtgttggggatctggaccgcacaatcaagtactacacggaatgctttgggatgaaactgctgaggaaaagggatgttcctgatgagaagtacaccaatgccttccttggctttgggccagagaacaccaactttgcagttgaattgacatacaactatggcgttgacaagtatgacattggaacgggctttgggcatttcgcaattgctaatgatgatgtgtacaagttagctgagaatatcaaatccaagggtggtaagatcacccgcgaacctggtcctgtcaagggaggatccactgttattgccttcgcacaggatcctgatggctacatgtttgagcttatccagagggctgacacacctgagcctctttgccaggtcatgcttcgtgttggtgaccttgagcgttctatcaagttttatgagaaggccctagggatgaagctcctaaggaagaaggatgtacctgattacaagtataccattgccatgttgggctatgctgatgaggacaagacaactgttctggagctgacgtacaactatggagtcacagaatacagcaagggcaatgcatatgctcaggttgccattggcaccaatgatgtgtacaagagcgccgaggcggttgatctggcgaccaaagaactaggtggcaagattttgcggcagccagggcctctacctgggatcaacactaagatcgcctcttttgttgatccagatggctggaaagtggttctggttgacaacaccgacttcctcaaggaactccactgaaggctcgggatacccagaggttgtgcttctgccagtgaggtttgggatttgctatgtaactgtgcctgcgggctccgattctggcgctgttcgtacactgtagaagccagtgaatcccaataaacccagcttcacaggctcctcttatcccgtagaccctagttgtttttgggtggagctggagccactgaccctagtccttttttttta

SEQ ID NO: 17403 - DNA, 369 bp, Zea Mays
ccaaggtccaactacgagctttttaactgcaacaacttaaatatacgctattggagctggaattaccacggctgctggcaccagacttgccctccaatggatcctcgttaagggatttagattgtactcattccaattaccagacactaacgcgcccggtattgttatttattgtcactacctccccgtgtcaggattgggtaatttgcgcgcctgctgccttccttggatgtggtagccgtttctcaggctccctctccggaatcgaaccctaattctccgtcacccgtcaccaccatggtaggtccctatcctaccatctaaagttgatagggcagaaatttgaatgatgcgtcgccggctcgaagg

SEQ ID NO: 17404 - DNA, 1562 bp, Zea Mays
taggtcttactgatgaagatgaaggcaatgggtttgaacgcttgaaggagatcgatcctgtggctgcgcagaggatccatccaaacgaccatagaaaaatcaaacgctacctcgagttgtatgcaaccacgggtgccctacccagcgatctgttccaaggagaggccgctaagtataaacttgctgggaattcctgctcatcatgtcagaacagaaatggggtcggcctagtaactccagactcgactgctgtttcctgtgggtagatgctgatcttcaagtcctggacagttatgtcaacaaaagggtcgattgcatgatggatggtggcctgctggacgaagtatgcagcatatatgatgcggatgctgtctatacccaggggctgcggcaggctattggggttcgtgagtttgacgagtttttcagagcatatttacccagaaaagaatctggtgagggttcctgtgcaagcctgttaggtatgcatgacgatcagcttaagagcttgttggacgaagctgtttcccagctgaaggcaaacactcgtagactagttcgacgtcaaagacggagattgcatcggctgagtaaagattttgggtggaacttgcatcgtgttgacgcaaccgaagcattcttctgtgccactgacgactcatggcaaaagaaagttgtcaaaccatgtgtggatgtcgtaagaaggtttttgtcggacaattccactgttttgccaagcacaagcgcaagtgacccctcttcaagagagctgtggacgcaatatgtgtgcgaggcctgcggcaaccgggtgctgcgaggtgcgcacgagtgggagcagcacaggcaagggcgaggccaccggaagcgagtgcagcgcctgaagcagaagagcctgaggccatggccatcgctgctgccccaagaccgcagctgatggtaactttttcacagcagaaccggcgagaagtgggacggggacgttgacgtggacatggtcgtctcgtcccacccaaaaaagcgtgccagcctgacagcgacatgctttcccaatcccgaattcctggcacgtcgacggggggactacctccatgccttttagcagcggaagaagcaggcaccaaagaactgcttatcaaaagtattgtaccacacgtacgacgggtctagaagccacagaaacgtagtgtggaagtggatagatacttgaacaatggtccatctttctatactgctaaagtttagcatatgctaaggaggtgtttaagattgctaaaatctctattttcaaaaccgaagtattgcaaatactgtagttattttaagctattctaaacttaggtctggaccttagtttgcaaaactgtattgaccacagtttgtaaaactgtattatttcaaactgtggtattgtaattactaaagtaaaaactgtattatttcaaactgtggtattgtaatgactaaagtatattatagtattttaaaaactgtggtttctaaaatgggcttaaactttggttaaactttagaacttgagacatgtttgatgcaagtgtttaaca

SEQ ID NO: 17405 - DNA, 2120 bp, Zea Mays
ctcggcccgcctaatcctctttctttagctcaagaccggcgactaaatttggcgccagccggcagcagggggtataagtagtcgccgccgccgtcttcctcgcacctccccgctccgctctcccttgtcgagttctcagcaccggccgatccatcctcctccgcctccctcggttcggcctctggcctgcacaccatgaactctcgcttccggagcctctggagagccatggctggggctttgcagccgccgtgccgcctcggagctgccgcgtgtagcttgctcgctaagcagcagctatagtagctgagcgagtgcgtccatcgatcggagtcgtccacctccgtctccctttgcgattcggcgtcgtgaactcgtgttcttgagcgtgggggcaaggggcagagcaacaaggagacacttcttcttcttctttacaacaaataagaaagcagcaacggcaatggagggagctggtctgcagtgacagtgacacgagccatggatcccgagccattcgtgcggctctcagttgggcagctcggtctgaagctccccggcgggaacgctagcaaggcggccggccggctctgcgactgcgagatccggctgggcgggttcccggtgcagaccgctccggtgccgctggtccactccccggcgttcaacctcgacccattcaccaacgcggcggttttctccctcgaggaatccgacctcaaggcgctggcggcgccggggtgcttccgggccccgcggtcgtcgtgccttgaggtcgcggtgtactacctggcccgcttcggcgcttcacgctgtggtgtcctcgcctgcgggaggaagcggctggttggcgtgttcagggtggagctcgcttcgtcggaatggcgggacggcaagcccgtgctgctgcaccatgggtgggcgggcatcggcaagggggcggccaggccggagctccacctcagggtgaagctggaggctgacccccgctacatcttccagtttgacgacgagatcgcgctcaacccgcaggttgtccagctccatggcagcatccggcagcccgtgttcagctgcaagttcatccgcgacaggcggccatctcagagtgaccctttgggcggcgggcagtactggtcgagctccagcagcgaggagcaggacatggagatggtgaggcgggagaggaaggcctggaaggtggtgatccacgacctgtccggctcggccgtagccgcggcgtttatggccaccccgtttgtgccggcgccgggcggggacacggtggcacggtccaacccgggcgcctggctcatcgtgcgcgccgacaccacggggtcctcggacagttggcagccgtggggccggctggaggcgtggcgcgaggcggcggcggcggcggcgagcagcggcaaggacacggtgcgcctgcggctgcacctgctcccggaccgccacgacgactgcgtgctcgtgtcggaggcgcccctgagcagcgacaagggcggggagttcttcatcgacatggacaggcaggcgccctccgccacggcggcggagcactgcgcggcgagcctgggcgccgcgtgcgccggcggcggcttcgtcatgagctgcagggtggagggggaggcgaggagcagcaggccgttcgtgcagcttgccatgcggcatgtcacgtgcatggaggacgccgccatgttcgtcgcgctcgccgcggccgtcgacctcagcgtcaaggcgtgccgcccgttccgcaggaaaccgaacaagaaggccgcctcgccgtcgcccgaccacctcgagctcgacacctaggaacgcagaacaggaaggccccgccgactagcacccatggccgcccatggatccatctaactcgacctgtaaattcacttaatttcaagagctggactgaatcgtttgccacaatcaaaactctgttgtttgactggcctcagcagttagtacatgtttggaagtaaattaattttacagtcataatttatagaaatccaatagtacttcgcagtgaccgtgcgctgcaacaacacataatcatatttgatagccataaaaaattaatattgtcgggtaccgtaattaggggtaccccaaca

SEQ ID NO: 17406 - DNA, 551 bp, Zea Mays
acaaaggctacgatccagtctagagattccgagcgccagcgaagcgctcctccaccgggctcaccaccgacgtgcggccccctcgccaccgccgccgccgccgcaccggtcaaaaccccgccggctgcctgcctcttctcctgcccccacccacacgctacgtctgaccaactggcccccaccggcggcgcggctcacatcacgcttcccgggcccctcgataaccgccgggtacaatcgatttttaggcgcagcactccccctcccaccactcgactcagtacaagttgccaagttctccgtcaccagctttccttttctttttcaattctccacagcgattcgtctcctctgctcttatctccgctgtgcctgtgcctgacttttcctcctcttcgtcccctcccacccgcaaccgcacagagaaaggggaggaggctctctacccagcgcagcccgagcacccctccccccggatcgggacccctgctctgcgcaatccacccatggcgctatggcaagtctgaaagccaaatggacggagatggacg

SEQ ID NO: 17407 - DNA, 1355 bp, Zea Mays
ttccgtttcccaactctcttcaactattccgcgccgtgcagtgttcatttgggtggacaacagggattcgtcggtgccgaaggtgacgcccgaggaggctgcgaagctgtgcgaccgaaacttcggcattggcgccgacggtgttatcttcgtcatgccgggggtcaatggtgccgactacaccatgagaatcttcaactctgatggcagcgaaccagagatgtgtggtaatggagtccgttgcttcgctcggtttatagccgagattgaaaatctgcaggggacaaatagattcactattcatactggtgctggaaagatcgttcctgaaatacaaagtgatgggcaggtaaaggttgatatgggcgagcctatcctttctggactagacatccccacaaaactgctagctaccaagaacaaagctgttgttcaagctgaattggcagttgagggcttaacatggcatgtcacatgtgttagcatgggaaaccctcactgtgtcacatttggtgcaaatgagttaaaggtattgcaggtcgacgatttaaaacttagcgaaattgggcctaaatttgagcatcatgaaatgtttcctgctcgcacaaacacagaattcgtacaggttttgtctcgctcacacctcaaaatgcgggtctgggaacgtggtgctggagcaactcttgcctgtggtactggtgcttgtgcagtggttgttgcagctgttcttgagggtcgagctgagcggaaatgtgtagttgatttgcctggcgggccattggaaattgagtggagggaggatgacaatcatgtttacatgactggtcctgcagaggtcgtcttttatggatctgttgttcactaggtactggggaccaagatagaagggttggctgccactcagagcttgtgagattggttatagtatccatgaaacagagtgttctggtaccagtacacttgttcagatattcttaattatgattgcttgatttgggtagcagtagaggcttccttttgaagcattctagtgttcaccttttgtactcctttagtttgtcaggtttgaacactacatgggtaacatgtctttcccaccattttctgtttcttttctttgtaagtgaacgccaatgcagttttagtattgttttctatagatttgtcttgatgcactgggcttactacttattttctggtatgaatgctgcctatttcctgaaaatcgcaatcatctaaagtgcttctgacaagtgacaacagacaacatgggttgttggctatggctcactattaattttcacctgcaacaattaagagtgtcaaattctgtgcttatataatctccgtatttt

SEQ ID NO: 17408 - DNA, 4879 bp, Zea Mays
acggtctcggcccctcggcgggcctccccgcctccctcgcccctgccttcgcctcattggtattggcgtccgcttgctcgctatggccgccgccccgtcgccgcggccgcgaatggcacaccgcaaaggcggagccgcccccatctccctcttccttgacaccgatctcggcacccacctcgccctgctcgtcgccccggacaccggcatccgcggcctcaagtcgcaggtggccgcggagcacgctgccgccttccccgacattggccccgtcatcaccaagtccttccaggtccggcggaagggtgtactgtatcgcctttctgattcaatgacagtgatgagttccttcaccaaaattgaaggtgggtgctttcttcacgtcaatatggcagaggctacagaagccacatactgctgccaagatgctccagcaattgatgataaaagattgagtgatgttagtcttggaattcatgtaaagaaccatattaaggagctgcctgtgatggcatcagatgttgcttgtgatttgctccctagagaccttgaaggtggtaatgatgacaccacgctgaataatgttcaagcacatgatgcattgcccaattgtaccttggtgccatcctcatcacagctaaatactgaaatactgaagaacaaagcagtgggtatggacagtgatgcagaagcaggaattgatcaagttattgacaaagcgaagagttacagtggccagataaaacatgctaatcaagctgaaggcacctacattagttccacatcaatggcatgtgttgataaatcttcaaatgagagtaatatgtcacatgctgtggcggagctacatgcaagtcgagaccatggcgttggtgatgatgtttctgacaaaaagcaagtcagggtagagcagcaactgctggaagagatacaatcaaaggatactctttcacaagtaaaggagcacaaaaaatctaggactggtttttttgacgcatcatgtacgtccctactgaaaacaggtactactcttgtggaatctttaaacacttctaatcatcaagaagtccatgaaaccttcaatgtggagtccatccagctagaaaatccaagcactgttggaaagaagaagaaaaggaaaaggcgtcaattgtccccttcaaaatctgcttctgctcaagagacaatagaaccatcagctacggcagtagatttattaaaacccacaggtgaaggtctgcctaataacagccttgggatacagattcataatatacttgcaatggataatctttcacaagaaaaggagcacaaaaaatctaggactagttctcctgacacatcaagtaggcatctactggaaacagaccctgcttctcttagggaacctttaaacacttcgaatcatcaagtccatgacactttacatcaggagtccatccagctagaaaacccaagtgctgctgggaagaagaaaaagagaaagcgtcaattgtccccttcaaaatctgtttctactcaaataacgacagaaccatcgcctggggcagccccagcagacttatcaagatccacaggcgacgaagcatataatgttgaattgaatggcaaagatgaaactatagtcgaagaatctggctgtcgtctttcatcatcagaacttaatgatgcaaaccaggggggcaaaagtgttcagtttgtgagcgatgctctggcatctatagatctaatctgtaaacaagagaagtttggtcattctctcaagggatgtaaggatccttcaattgcaaatgccatttattctacaagtgaaaatgtagctattgaaggaaaaactacaaaagaaagttgtgtccctttggatagaggggacaagcatgaagaaaaaaaacaacacaatgagggatgtcataatgaagctgtacctgaaataagccacatggagaaaggtggcagaagtacagatgtctctaacaagaggcacacaaatcaaattacttctcaagtgaagaagggcaaaaaatcaaaggttggttctgttggcatgcctaccgtggatgccactggtgaaaaagatcatatgtatagtgaaaatgctgccaaacaagatactgtttctactaaaaaggagattgcccatgaaccttctgtgcagcagatgtcaaacattgtgtatcaaggagattcaaatgtagtagaaaatccgagtggtgatggaaagaaaaagaaaaaaagaagacgccactcagaatccttaaagggtatgaatcctagtcaagatctgacatcatcttctggatttgtaacaaacaaaaactcgatacaatgtacagatgctgctccaatagatgcaaagcaaacaacccagggcattatagaaggagaaacagttaatgagcacatgaagcttagtagaagtctagatgtagcagcaacaaatattgttgatggggtattggcagatctacgacctaaagacagcttaagtaaggatctggatgaagatcttttaccaggacaaactcacctaggcagcaatcagaatggactagaagttcctgaatccattgctgttaaagttggtagcgttactgcagcattacctccaaaatgccctgcagcggttcactttgcttctcctgttagctcacctagacaaaagaagtctaaggggaaaaaatcgaaagtgctatcaaccatgactgactcttctcatcaatcaagtggtgtatccgaagaagatgctaatagagaattaacagaatctgattctttgaggtttgctgataaaacaagtgatcctgaggatatagtaactggaaatgtggttgcacaagctgatgataagcgcaaaaccactaagcgtcaaaggaagaagggctctgttaagcaggtatgtgatacattggcattgaaggaaacaaatgatgcagaagaaaatttggttcagggaggttatgtagttgacactcctttaagcactgttggggaagtagagcagaaaggaactccaaccttgcatgaagttcagaaatatgcaatggttctcaaatctgccaacactaattctcaaaagcaaaggaaaacatcttcgaattctgaacttcaaagtcaggattgtgccctggaacatggtttcactgcagatttggtgaacggcaggactgaaagggaagttagcactacaagttctgctagtgctgttaaacctgattaccacaccgtttttcatcgtgctaatgatggaatcaatttcctcgatcattttagctgcagcaatatgaatgatgatccatcaattgctgcagaaagtaagcaaaacaatgaagatgaacctttaagggaaatgaagaataaaaagaagaaatggaagcaaggtactagtagcattgaaccaaatgacattctagaatcttttccctcagagaaagctagcttaactggtcattttggtaccagcaaagctattgtgtcatctgttgcaaaagaaagcatgaacatagaaaatgagaatgtgaatgacggcaaggagaagaagagaaagggcaaagctaatatggaagtacctactgctgaaaaggacaattctaattgtgataatcaaggaattgatattagtacccaagaatcacttatttcttttgtacaaaatgaaaggacgggtcaggacaatggaaaagagagcaacagtaaagttactcagaatgccagtataatgcaacatggacgagaagatcccacttggaatcatactcctgagaagaatctccaccagagtgttgatgatgatcaaaacaagttgctcactgaaaaggatcatgcacatataagtaaagaagtggggaaattcacttctcagccaaagccccatgctaagattagaaagcctgatgagtttactatcaagggaaaggtggctccaaatcctaagcctgtaagcaaccttatgaaggatttttccacgagcccaggagcgtcaagtgacagcacagagggtatgccacaaagtgctaaccgatataaagtttcagtccagaaagtcccaagtaaaatgtatcaagagaccagtggaaactccaaaaaagcgagtaggaaaatagtctctggtgcaatatccaatgactctatcagggagggttgtggtgatgaattggacaccacaactgtcatggaaggatcatctgatagttcatctacctctgctgactcaggtatttcatctacagcctatgatgaaagtgaggcttccgatgatgatggggccatatcactatctcagaagagtctcaaaggtggtctgcacattagctccatcctccgtggttcccgtagctataagaaggcaagaaagaagctggaggagctgttagacgatgatgacaccattgtgcctgatagccagcccacggatggtcttcggggttgaacatgcgtcaaccttttgcaattatccacctaatacggtgcaagtttcatgcgagccccaaagccggtgtgctttgcaattgctgtagcttaacctcccacaatttgtctaaaacacatgcgcgccggcgttatccgttgaggattgcgtatttttatttattgttctcctctgtgcatactcttttcttttcgggagcaaaaaaacattgcatacacgatacatatagtgcctaaaatatacagatcatacatgagatgtaagagcatcagttcaagccgcagcattctatctactcatcatttgtacaaggctggaatagcatgtgatacggcatcgtcaaactaacaaacagacgatcacggggtgcgagacagtctcgtcatctgcgcttctgggtcttcatccctaatgttggcagtcttgcccatagatttctggctcaacatccgg

SEQ ID NO: 17409 - DNA, 1312 bp, Zea Mays
cacacacgtctatgccatccacggaccatggtgtgccctctacttatcctcctctcggctacctccaccattcctctgctcagctcgaacgaacaaaaaggactcacctcggccctctcctcttgtgcttctgcttccccaccgagtctcctcaaccccaggcactcgccctctgtcccctcccttcctcgcctccgatgccgccgccgccgccgctcctcgagccgcgcgactacctcggcgccggcgccacctcgtcgtgctgctcgtcgtgctgctcctccggccgcgagggcgcggggccccacctcgcgctgcggctcgggcttccggggtccgacgactcccccggccgcggcgcggacacggagcacgcccgcgcccacgtcgacgccgcgctcaccctcggccccggccccggccccgcgcctcccaggggcagcgccaagcgcgggttcgccgactccctcgaccggtccgcgaagctggacggcgttgccgcggatgacgctgctgggggcgtcacgcgggtagctggagctgctgccggagctccgcccgctgccaatgccatggacagggcacaagttgttggatggccgcctgttaggagctaccggaagaataccctagctgccagtgccacaaagacaaatgggggagatgaaggtaggagtgaggcgggatgctgttatgtcaaggtcagcatggatggagccccatacctaaggaaggtggacctcaagacctattcaagctatgaggatctctcgcttggtctggagaaaatgttcagttgcttcatcactggtcaaaacagttcatgcaagacttcaagaagggataggcttactgatggttctagggttgatgcccttcaggaccaagaatatgtccttacttacgaagataaagatgctgactggatgctcgttggtgatctgccctgggacttgttcaccacattttgccggaaacttaggatcatgagaggctctgatgctgctggcatggctcctccaagaccaccggaacagacagttcggaacaaatgagggcggacagcttacttacctggcgctgaactgaagggagagcgacgctgccttggtcaggccttctttcacttgtgcagtgggatctgcgtcctgctgtctcggacgcccattttgcccacgagctggtcgtcacgtgctgtcgctttttgtctgggaaagatagcgtactgcttgctgtatgatactttcatctgtgttcggaagtttgtagcgcttcatatcctggaagggagtaaagaaaatgtccatgctgt

SEQ ID NO: 17410 - DNA, 1788 bp, Zea Mays
cttggccattcgcccgttctacgccagagcccagaggaggcagcaagtcgttctcgcatctcgcgcgcctcgtgaacgaatccctaaccccacaattaaaagcaagcaacccccgctcccccacctgcgctaattaatcacatcacgagatccccttgcccacctccttcgcctcagtcacacgcctcgatctcgcctcgccgcgctcccaccaccgcaccatcccggccgcctcgctcgcgacgcaccaaggtgccctcgtatcccgcggcgccggattgggttccctccggggatcacgcggcgagcctcgccgctcgagccacaggataatatgttcaatctgtttccttgttcatttaaacgtagagtggccttgaaggatgataattgaagcaaaatgattctctatttcaccatattttggagatggatgatctgccaggagatgaaggaagatcccagacacacccttcagaccggaattggccctcccatttggagcagaagttccagtccctgcccctgactaaacaggaaaggaattttgattctgcatattcttcccttgattctagggaagttggtcattcattgcaggctgctcagacattatggtctagcggatccctttcaggtccaatacccaatggtttttattccattattccggaaaagagactcaaggagcattttgataccataccttctcctgatgacctttattctcttggaatagaaggatttaaggctgagattatccttgtggacatagaaagagataaaaagctatctgctttaaagcagttatgcacagcactggtaaaaggattgaattcaaatcctgctgcaatgataaaaaaaattgcaggtttggtttttgacttctacaaccgaccaaacccacatctcagtcctgcaagaacatcctctgaagatctttccaatttattagaaaatcgaggagttcaattgctgggacagataagacatggatcttgcaggcccaaagctatattatttaaagtccttgctgactcagttggtatagattctaaactgctggtgggcattccaaatgaagaacctcatggatatgataattcatccaaacatatgtctgttgtggtcattctgaaatctgcggagtttctagttgacctgatgcgttttccaggacaactagttccattttcatccaaagctgttgtcacatcccatatgtctgcaactggagaaagtgattcagccgactatgattcctgtgattctcctcttgaaccaaatagtcctctatgtgctcaaaggcaagagcaagatgatggcaatagatccttcaaagtcctctcactaagaaacatcatgctcaaatcgacaaattctatggagggtaaaatgagttgttcatctcatagtgagccgaatgttgcaaatgccttctgtggtcgcagccgcgataaagttgtggatgaacatcaaagaactgcaagctcaagtccagagcatccactgtccagagttcgtgggcgctcaatgctgggtgataaacaatatggtggtgctgtagcagtgtcaaggtcagatggcgcatcaacatcaaatacacatagagcacggagaagtactaatattactcctgaaatcagtgatgatattgtgagagcagttcgagcaatgagtgaaagcatgagacaaaatcgcctttcaagggagcagaaggatggtagtcttggatcctcaaatgattcaatgaaacatatcatgatctattatcaccctacaaaccag

SEQ ID NO: 17411 - DNA, 743 bp, Zea Mays
tggagctgtgagaagtaagataccaccttgatgaggatccaaaaaccttgagagttatgccaattccacttcatgactctaaaggttctgtttgccagtatgatcacatgacagtctctcctgatggtaaaattctggctgtaacaagtggatcaacgttgcaatggttacttgtggaaactggtgcagttttggatacagctgacaaagcacatgaaggtgatataactggcattgcttgggctccacggacaattcccaatggtggcgtgcatgtttttattttggcgactgctggtgtggacaaaaaggtgaaactttggacagctccagatgttggttcaacatgagtggtcgaggattgaatctgcataagacagctttgccaagggcacagaattgaagttttgttgcgtagagtttgagaggaggaagggaagggaggcctggctgttactgatgagaccccaatgcatcacgcaggcggcagccttggggctgtagtttcgctaccttttatacaataaactgaatgttgtctgcatttgtatttttttttctttccttcctttttactgttggaatgatctggctgtgtgatcaacataatttaagctgctgctgcttggaatagacgtcattttatttgtcaagcaaatgtgctgctttgcgcattgtttgacattatattgtttgataaagtgtgctaagtatgaaaatgccaaagcaagtgttctttcttt

SEQ ID NO: 17412 - DNA, 887 bp, Zea Mays
gagagttcaaatgaccacatctattcaggtcaattaccaacatcagcatcagacatgctgaacagcaattcaccatagcccgctacatgaagagtctggtacaacgagcatctagcatattattcttccaaaacggtgtcaaccggcaatcgccacatatgaacaaaagcaagacgccataatggcgcccaggggtgacgaaatgcctggtctattctacaatctagagtctacacttacaacctggtaccaaaataaccacgtcaaggttgggtcggtacagcccttacgccttccatcttcccagtcagcagtgaaacaatcaaccacctacacgattgccagagcctttcaggagattgcgctgccttttaggaggcttcacatcaacagcgccagcgccatctttggacttgccgtatcccctcttccgacctctttggcggccgcccttctttctgtgcctatcgccagcagcttcatcgttggacttgcgacatgggcggccacgcttccttttaggcttctcctgttcttcagctccagccttttttttgttcttgagttgggcaaaccaactcttcgaccactccgaggaaggatccaagaaatttactacttggttcagagcatgaagagcaatcttcttgatctggagacaatagtccaggtggaagccgcctaaactctccagtcagtttcatgcactcgttgacgctttctggggagacaaagtccatcgcaaccttaatgcaagactgcacaaacagaaaggcttctgtttaagcaacgagatacatttgttgagaaggtgcgataaagaggagcacaaattaaggtctgtatagtcacaccttcaagttcctcacttggtgaggacatccagc

SEQ ID NO: 17413 - DNA, 638 bp, Zea Mays
agagtacttaggtaattcagtttattccactgggcgtatatatgttttattggctcttacgtgtgggatcacatccatataactcttggaatagtgttgtcgccgcagttgacgaactggtagttgactgtgaggtggccggcctggaagccctggccgttggtgtcgatgggcttgaacgccgtgtcgtagtccaggtccaggccgcgtgcgggcagtgtctcctggtgaccaacacggcgacgggggcgtccatcacggtgaggatcgtggaccagtgcagcaacggcggcctggacctggactacgacacggcgttcaagcccatcgacaccaacggacagggcttccaggccggccacctcaccgtcaactaccagttcgtcaactgcggcgacaactgaactgatagattattcacctgtgcatgcacctatatgtactagcaccattattccaagagttatatggatgtgatcccacacgtaagagccaataaaacatatatgcccagtggaataaactgaattacctaaataccggactactcatgtatcgtcatgtctcacgaaatactacattcgttctcgaatatgtgtcgtccactaattcatttttaaactaaaatgctttggttg

SEQ ID NO: 17414 - DNA, 1424 bp, Zea Mays
gaatttgatcggatctaggtttcgtcgatcacttaaccctgataagtggctagagttcaagctccaagagaaggcaacagtcagtcacaactcacagttattcaggttttcatttgatccatcaactaaactgggacttgatgttgcctcgtgcctcatcacaagggcacctataggcgaggaagctgagggaagaaggaaatatgttattcgcccgtacacacctatctctgatccagactctaaaggatattttgacctactgatcaaggtttaccctgatggaaaaatgagtcagtattttgcaagtttgaagccaggagatgttgttgaagtcaaagggcccattgaaaagctcagatacaacccgaacatgaaaaaacaaattgggatggtaagatagccttaacttgctttgaccttttgatttcatccctgcaaggattttttttcgaaaacgcaggagagctgcgtatcaatatattaagaagaaagggtgaggcaagataatttttcatgtatttgattcaattgtttttagctcgtatgtttgttttaccttgattagagagtaaccctgcagatactatagctgttgaataatgtgcatgcctttggttccagatcgctggtggttctggtataacaccaatgctgcaggttgtcagggctatcctcaaaaaccctaatgacaacactcaggtctccttaatttacgccaatgtgtcaccagatgatatattgctcaaaagagaactggatagacttgccagtagctatcctaacttcaaggtattttatacagttgataaaccgtcaactgactggaggggtggtgttggttttgtatcaaaggacatggttttgaaaggtttgccaggcccagcggaggactctctgattcttgtttgtggtccaccaggaatgatgaatcacatatctggagacaaggccaaggatagatcacagggcgagctctctggcgttctgaaagacttaggatacaccgcagagatggtatacaaattctgagaagacagtagtagactctgctgacgcacacacattcttgctgccctgcagtcaataaaccacacctgaactttttgttgttgctgctgcatctggctctgaactggaaaccgttttgacttgtttcctgatgtaataataattttcatccgagaattctaggtgtagcttcgggtgttctgcagatgccacgctgcgatgtttgcgaaaattctagtatgctggcacttgagataagagctatcgagttctactggatagctgcagcgaattatggtatgttggaagttggaacccagtcatttgtcgcaatctggcgcgtatgtgccgtggcatctaggaactcgttgccgtatggtggatgtcgtaatcgtagagagagagagatgctt

SEQ ID NO: 17415 - DNA, 979 bp, Zea Mays
gggcagacctccggatgagggagaccaggttgatgatgtacttgagacaaagttagataggaaattcaaaattattacagacaaagggacattggatgccatcggattgcatccagatggtcgtgcgaaaagaatggtatattgggaatctgtatcaaacttggttgagcctggtggcattgtggtcataacgtcatgtaatcacacaaaggatgagcttctgcatgaagtagaagatttcaccaagagaaaatttggcaaggagaacgtggatgaaggtgcacgagatgcgtctgagatcttccggtacatagaccatgtccgaacatatcctaccataatgtttggaggaattgagggctctcaagtctgcactgtggcctttcagcgggtgtgactgaaagctgaggcacacatagttcttggcctgacgtgtcacgttgggtccagaagaaatggataaaaaattttgtgcttcgcctgtgggactgttcctaccgtattaaggaacagtccaaactgtgtcttcttctgttgttagctcatctatccaggatggtcgtgtaattttagatggaccagactatgagacgaatcagtcctgtattgttgtcaccgtgaacatttccttgtatttccgttcctcttatacatactctagccttaatttattactctttcttgtaaggaggtttcaacttgctaccagtggattgtttaagtgatcatcatcttgttatattggctagatcagaggaacgagttttcttgtctcggatcccaggactgctggacggctgtcagcttgcctgctccataatgttggacacagtctgctggactgctggacacagtctgctgcaacttgcctgctccgttctcttcccgtatgtattaaattgatgtaatggtctagaaaatcaacaaggttctccaaaaaaaatctgaacgcaaaaatcatcatcaggggataaaaaaa

SEQ ID NO: 17416 - DNA, 2097 bp, Zea Mays
cagtaatcaagaggttcattgtgaaccactagaagttattcgtgaaagacactccacagaaccaaacatcaatgctgcagctattctaccatcaagacctgtgagcaatacatttaacctgcttctggaaggtgacatgaatccaagtcatggcaatgggcttgctgaaatagagaacataatcaaccagagatatttttctagggatgagacactacgtcttatagagatcatgcggtcaaggacttctgattttactgttgaagaccagagacctccagtatctactgcaaaaggttttgaaacaaaattttttacacctgccaaactgatcgaggctcagccatcttggaggactgatatcgttccatcatccaatgtgcatgatattggttcttcgccagttgaaattgccaaagcttttatggaagcgcagacctcagcttctgtacacgagtccaaaaagcggaaattcagagctttgagtcatggagttgcggttgacaattcgacatcagaagttttccctacaataactactgattcttctgtaagatggcctgactcagttgttcaaggtggtcccaattatcttacaccacaaagtaataaaggaaggactctgtctcagcctctttctcgcacaccatacaatagctcagttattcgaagatatattaagaacagcaggcatggtgatatgcacaataatggacagacacaatttcccactccattttctattggaagtaaggtactagctagttgcctgtccattgcaacagattttcattatgaactactcaaaattctgctaatcatttatccacaaagaaaccacgtaggtacaaggtggaactggaagaccatctgagaatactagaggatacacatgtatcagcaagtggtggtatagcgcagccatcatcttccaggggacagatagatgtttttggttctattctaagagaaggttcgactgcaataaacaatgttgcattcaacctgcaagagtcagatggtaaaagcatgacagaaagcagaacaacttttggacgtgcttcaggtgtagacaatatctcaagggttgcttcagtatctgttcatcccaagtcaagcgaaacagcattcaaaatacttaagcaacttgacagaactattccttcccctacatcaaagccactagggctgagacagacattagccaagaaaaatactttttctgttgctacctacagacagattaaagagcctgatatcattatcggtaatgataataaacagagcagcattaatgagagtggtagtgctagctcggagactacatatggaaaaaaggttcagcaacctcaaagcagtcctatttcaggagagtcaagtgaaaaagtccagagaagcggagctaactcagatgtttatgaagcaggcacttctcagcgtcctctgaaatcaaatctaacacccacttcagtcgccgaggtcttggataataacaacaccagcaaaggtttcagcttcacatttcctattcctaaagctccaagctctctacttgaaccgcctcctacaccaaccatggcctcgccaccaaggaccttgccaatcactaacgaggatgttcccaagttcacctttggctcatccagcatggccaacaaactcgttttctccttcaactccacaagcagttctcctggtgctggtggaacagacccaaccttcaaatttggatctgataataagcgagagcttgtgttttgatacagtttttttttgatagacaccatgcccgcggatctgaactgtaccactctatctattcttggtgtaagacgtcttaagagagttggagtgtgctacttgagctacacaacatgacattcttttcattcattagcatattcaaacattacatattttagacgtcctgcgttggcaggacatttcccccagtgctttgcacccgtggctgtgtcattgggcatcagttcgtttagcctattatttggaagcttttcatagctgaatggagttccattgccctttcggtccaaggtatgtgatatgtcaatgtcactgctgatataatccgttgaa

SEQ ID NO: 17417 - DNA, 2524 bp, Zea Mays
caaatcggaactgacaatatttttgtgccctcataccaagaagttccttatattgctcgacaatcgcccatggttgctagatcaggatacaaaacctgctcatctatggcaattgatggttactaagtcaaggttttcccctttcgccaactctagggctaggagaaggagggatgaaactgatgaaaagcttgtgtactcaacaagctcagtatctgctccccatttacagaataaatcttccagatggtattccttgatcgacgacgctatgcgggaaaagaagcttcaagtaaataagttgaaggatgcccgcatactgaacagggagcttcatcagactttatatggttttatcatttttgaggtagactgggctgatgtgcgtggcatcaattatttgaatgaacttcagacggatacatcaatggttgtggagtctaaaataatgaagagatgggagtttgatagtgtcaaacaagcttcaacattgatcgcttcttggttctctggaaatccttttgaatgtcagctcctacaggattatttgaccaacatctcttctaacggagatatattttatgatgctcaaaatgatttcttaacacctgaatgggatagtgagaatttaccaagtgatagtgatgattctagccatgttcaaatcatcagagagtcatcaggtttcacagactcatcttacactacacctccttgctctggaccttacaagagaagaaaaataacaaaatcagatgatggaagtagttcgactgaagaatcatacacagaaattgtggcctcgccaaaacattcgtcatcttcgtgttcatcatgtgacagtgataatgagaatgctaagccgctattggagcctagcacgtataaggatgtactgatctgcttccgctttgatgatcatgaccttccattcggactgaaagaagtcatactatctgacgtcagactgttgacgctacttgagtatggccttccatcgtgggttatatttcttcagtcatatccggtgttttgcaagatatatcggccatggatgtgccctcttgccagagcattgtatgtcttgatgtcattaatcactgttcttataggattttatgacctctacaagaacgtgcccatgctgaaggcaactgcctcaagattgtttggccctttatttgattggatagaaacatgggaaatgatatcaagacttaagtatcttggaactatgcttttcctgcataattttcagcaggcttttacatggtcccttaagattgtgggtgctgctaagtctgctcttagtgttttgacaaagccaattgcgggaccaattctggaggtttttgaacttacgatgccaatttggaacctttgtgctgagacagtaggatatctgagttcagttgtcatgttatctgtagaagtgtcttggagtgtagttattgatacagtggagatgattgtctggccattttggtttgtcttcagtactatggttagcattgtgaattcaattctgtaccctataatttggctcctcggagagatactagctgcacctttccgactagtcattgggctatcaagttttgtagtggacctttttgttgatattatcaattttctaagggggagctggtcaacactaagtgccttatatcaagttggatctgttcccagatcacctgtgcttacatctgataataacatctgggcctcactgtggaaagatcttttgtatcagattttccgtgcactacggagcattttgtatggttttgttgccttcttttcaacatgtaataggcaccgactcagcatttacaatcacattcaagtgttcctccggcgcatatctcatgtcccagctggtgcacgatttaccgcctaccttgatgggactaggaagtatagcagccagaatcatcataagagaaggaaagccaagacgagataacagtgcagttggcaggtcactgagcaattaacaagctaactcggcgcaaatccgagctcaaaaaaagcaaagaaacaaaacaatgtaagccgaacgaaatatggagagcgaacaatcgataacaagagtttgattggagccttcggagaacataaaaaccaaggaagagtccagtacaggagttgtacattgacgctgaaagttccgttacattagctctaaccagtgaccagcagttcccttgtgtaccaaatacctggcgagcagtggaggaaaacctgcagctgtacatacgcggatcttgtagctgctgtttgttgtaaaatgagtaatagctagctttgtatagtaggcctgtgcatatcctgatatcctcttgtagttgccctccggacagcgattttgcaatgcatgtgtatgtcaagtgttgagttttcttcgcgaagaagtgtcatccttttgtcttactgatctcatttcagcagttatttctatggtcattgtccatgtgcacgccatgtaaacactacgtagtagcttacaatacatgtttaacca

SEQ ID NO: 17418 - DNA, 569 bp, Zea Mays
acactcttattttctccattgcacctgtgcaaggacaagggagacagtacagtttcttgatggatcaagatgccctacgtcaacaagaaggagagggagcacgaactgagcagaaggaagcgctagtgccactggtgcaagctcggcggctcagcgtcaagacgaacgattacagcagctatgacccttccccgtccatggacaagccacactccaagctcataccgaactgatcaatcatgtacccgtccaggttgcagcagtcgagttgccgatgagaaatttaacagcttaaatgtgtgcctgatttatatatacagaagcattatattactaggcttgcttaaactgttctcatgacatctaatatcatattattatagatgtgacatatagatgtttacttcttctttgtattcatacgcagtcacaggcttcttctcaagattagatcaagtagttagtataataagagtagcaactactttgtcaaactctgaatgcaagtctcctaaacaattttaacaacaagctggttctactgccagagcattcaaccacacaagagg

SEQ ID NO: 17419 - DNA, 1303 bp, Zea Mays
cggctgccaaaacgaggtagctagtattccagaggtgatttctcctctcctgatcgacagagggcaaatctggttcgtgaccccccagtatcatatcagagagggccacggttttgcttatcaatgtgttaggagttaggaccaagtactggagctatttcgtggttccgatggagtctaagtgtgtgaacgaccaggacaccttgatcgacctggagagtggcaacggcactgcagtgatcaaccatagcaacgacctggagagtggttgcgtgtgtgcgtgcgccaacggatgtccgagggatgacaggaacaaccagcacatggactgctcttcaccggcttcggacgccgttgctagaagtggagacgacaggaagtccgagggggaggagaagctgggcctgggccttctggacagctcgggaggggacaaggcgaagaagaagcggtcgaagaagaagccgccgcggccgccgaggccgctgacgcctacgccgctggacgtctctgaccagaagctcctcaacgagctgagcgagcttgccgtgctgaagcgggcgagggtcgagcggatgaaggccttgaagaagatgaagaacgccaagcaagggttctcgggtggcaatctgtgccccctgatcgtcaccgttatcttctgcgtcgtcattctctggcaaggtttcttctcgggacacgggccggcggtgagcttccatggatcaccggaatcgtcgatcagggggacgcgcagcagtctgatctccatcaggttctacaagaaccattccaacacgaggccaccaccattcagcgagaccactgcagctcccgataacgtagtagagaccggtccgaggctcaggaatcgtaaccaagcgagaaggctactagctcggtgacccgatgattatggcggcggccacacctcaaatgaaagaagctcgccacattttgaagcgtcgccggcgcttcgcttcgtcctcctcgaggcgccggccccacccccccgctccttggctgctgctccttggctgctgtaaaaaacgagtggactcctagtgtgtcgtgcgctgggtagtgaatctgtgttggccatggctctagcgaagcgtagagagcaacgaaagcaagcgagcgagcaagcaagcaagctgtctgtccgtatgtgtctggcatgttacagtaataaaaggtttgcgcgcaataaatcagagagctgatctgaatctgacccaccccgttgcagtgctgtgctgctgcacttgctcatcgttactgatttgctgaaatgtggcgtgtt

SEQ ID NO: 17420 - DNA, 2511 bp, Zea Mays
agtcacctccacaaacgagagaataaaggtgaaaggacccctcggattcacaacggtaaagcctgcggcaccctgctccttacagcccactcaccactctcgctccaactccgagtttgagtgcagcagaaggcagagcaggaaaggaatttcggaagggacgggtacagcccgcagcgccaccacaagggagcacctggaccaggagcctccaagcgcaagcaaccaagcgcagcgcagagcacaacccgacgcccagcacaaccagcagccagggcagcataaagcaatgcagccgggaggcgcggcttccagtaccgccaccggtggacggaggcgcgtgtcggtgcagtccaccaggagcgccggcgccacaccggcgtcgtcggtgtgggaggcgcggatgaagatggacgaggtcaggggcggcgtcaaggtcttcagcgccggcgccgccgacgagccggcggacgaggagggcgtgcgggtctaccgccgcctgcgccgcaaccagagcgagggcggcggcgccggtgccgcggacaccgccgccaagaagaggcgcagctggaaggcttccaagccggtcaccgcgatcggggacctccgcaagtcgcgctccgacgccgccgccgccgtgacgacggccaccaccaccgccactgcggtggttgctaggcgggccgtggcgcgggtatccatgcccgagaagaaggtggcgccggcgccagcggccgccgccggcgaggtcaaggaggtggtggtcgtggaagtgcacaaggctgcggcggcagacgcgaagaacgtggcgcgaggaccagatgaggagttggacgacgacgacgacgaccacgacgacggcgcggagggtgaattgttggacgaggagcaggagacagacgaggaggaagaaaaagagatgctggatctgcaggatcacatggccattgacgacgacgagcaaactgctccgcaccaagtggacgacgacgacgagcaagatcttgagccaccgacaaaagcagggattaagcccacgctgtcggtggaagaagagagagcgaccaacccagagccggtgaagccgccgcctccagggaagaaactagcctcggtggtcgatctccgagcggtcaatccggaacccatgacccctgctcctccgccagtcgagaagaaggcgacaccgatagtggttcaccgcatgaccaacttcgagctggcacaatcttttccagagaagaaagctttgccggcggtgggtccccggattccgaagacagagcctgccagcagtcctcctggtggtgaggagtatgaggagatccaaggaagaccatctcaaccgagcagaagtcaagcgagaatgcagaacattgtgaatctggtgatgtggaccgacgtgtcaaaatccgcgctggtgttcggactagggactttcttgctcgtctcctcctcctacgccaaagacctaaacttcaacacgatcacggcggcgtcgtatgcaggcctgatctacctcggtctacgcttcctgcgcaagtccatactgagcaggggtgaaagtgtggagtgcgacgatgatggaggcgtcggcggcgataggtgctgctacctggtcggggaggaggatgccgtgtggctgctgaggctggtgctgccgtacgtcaacgaggtgctgctaaacctgaggtctctcttctccggcgagcctgcgaccaccatgaagctggcgctgatactgttcgcgatggcccggtgcggcaactttgtcaccctctggacgctggccaaactggtgttctttggggtcttcatcatccccaaggtgtgctcctcttactccacgcagctggcacgatacggcaggttctggctggagaggctgagggacgcctgggagtcgtgcacccacaagaaggccgtggtggcggccgccttcacgctggtctggaacgtctcgtccacggcgtcgcgcgtctgggcggtgttcatgctggcggtggccgtcaagtgctaccaccagcgcgtcggggagttcggctggagcagcagcagcgcgggggcgcaggaacagccagcggacgacgacgacgagccgccgccgccgccgccgaagcacagggcccaggacgagtcgtcgtcgccgcggcaggagttcggggcgccgccgcggcacaggcgggcgccggtctccggcgagttcgcccgcgagaggctcagggctcggggcggcatccagcctcggtgacggttggggttgcatttagaggctgcatgaggctttgatctgttgcggtcctgctcctgcgatcggcaggcaataacgagggatcccatacacgcagacgcagtgtgttcgcgctaaacgcctcgaccaaaccactcgagcccactgctaatgagccacgaatggagttggttggggggatggttcgttctagtggttcgttgaaacaatagagtggttctgctttcgtatttggttcatagacaggacatcctcttttt

SEQ ID NO: 17421 - DNA, 168 bp, Zea Mays
gtcaagaacaggtaccgcaggatgaggtgcatgaaggatgctgtgatgtgttcgtgagaggtctaggccgtcgtcttccagtcaactgtgggttgctggatcgtttcctcatatgatgtaattatttatttattttgtatagaactcctgttatatagtaaagatgtg

SEQ ID NO: 17422 - DNA, 6515 bp, Zea Mays
gtccgatctggccccttgaccgcttaagctcacctcagatacgattagttacactttttgttccttccgtaatcgtcgccttcgatttgttgctgctgcagctgctggccaggccatactactagagagggacgccctcccttcctctcgcttggcttacacttctccccatcccccaacacaaacccaacacaactccgccgtgtcgcctacacgcactggccacgaccaaaccctaggcgccgccgcccccggggcccccagggaggagaaggaggaggagatcggtgaggagagaaggggatttatgtcccagcgaggggacaggggcgaggggcacgccaggagacccggccggtccagcagcttcggcggccaccgcggaggcggagtcggtggcgcgggcaagggcggcgcgggctcctcaggccagcctcctctctcatccaaccgcagctttagaaagcctggcaatggccacggcgggcaccagagggtggtgaaccagcccgacaccactggcttccagcctgcaccagcgcctggcacccaccaaactcctgcgcgcccgccacctgcgcctcagaatgcagccgtgcatgttcctgtctccgcatcacggccacaacaccaggatccacatgtgtcatcttcattgtctgccagcgagaaaccggctaatccgccgttaccactaccgaaagctacacatgctgctccaagggctctaccaaaaaactctaacacagcgcttcctcagggaggatcgcaaggagaaccatcaaaggggtttaactttcagtttggtagtataaatatgaatgggctaccgcaatttcctgccaggacaagctcagctcctccaaatttggatgaacaaaaacgtaatcaggcacttgtggaggaacttaaggttacacctgcccctgtgcaaccagctctgaaacagcagcagttgcagcagcagccacagctgccgccacagctgccgccgcagcaggttccccagcagccacagcagcagtcagcaagaaaggaagctgttggttccagccaacataactccatcaatccccatattacatcgcaattgaaaagagatgtgcacccatctccatctgtccctaatgttacatctcttagacctaccgttcaaattcctggtgttcagatgccgatccccttccatcaccagccggcacaagtttccttgcagtttggtggtcatggggcacaactgcagcctcaagtcgtgcctagctcatatcaaatgtcaatgggattgacaggcagtagtacacaagtcccacagcagctgtatgcccctactctgcagcatcatcaattgcaacagcaagcaatgatgcatcctggccagggtatgggttatgttccttccgttgctcaccaattcccacagttgggaaacattcctatgaacatcgcatcacaatatgctcagcaacagccaaacacgcatgctgctgcacgtaagactactgtaaaaattactcatccagacactcatgaagagttgaagctcgataagaggatggactcttctgggcagagagctgcaccgagcttgacacaacaatcccagcccgttggtaattatgctcctcatattggcttctttcatcagccacagagttcctacaatcagtcaggaatgtattaccctactacagctggtgtgaaccaggttgctactggatcttcaggtcctagatataattatcctgtcactcagtctgggcaagcgatgacatatatcagtccatctgcagtgcctccggtatctgctcagtcccaatatacagttaaaccgcaccctattgggttggtgactgaaaaatctagtactcatgtcacaataagtgctccaccagctaaatctgagcctcctaagttacgtgctgctgaggattctgcgtcaagtcggcaaaaggataatgaaattgtttctgggatcgctgtttctagtaaatcaatccttgagaaggaggagagtaacgatcctttagtcacagtgaagcattcgactgtaataagcccgtccttgccaattcatggtgcaaaatcacaaacttcagtgacatcatctcctgttgtgaattcagtctcacctgtggcaggagttgatggaaaaagcatagaatctattcaaaggactggatcatttaatgataacaagaaaattgtcactaaaaaggatgtcaggatttcatctgaaccaccgaattcagcttcatctgttgaagataaggtgcaaactgtaaaggctggaggcagtgatcaccaggaaactaacaacctgaacaatgagttggatttggccagctcatcttcatgctcaacggttccactggcagtaagtaggatctttccagggaccgtttcagtgaatgctaacagcacagcagtaactgctgctgatgttcctgggacagatagaagctcaagaagaccatctcccgagggtactggtgagcctgcagtagaaagcttcactgttttggctgttgaatgtgacaaaaggaagcggactgatgaagttgcgacagatcctagcaaggataatatttcttctgatgctaccaaacatgaattgcctgatgcatgtgcagtggaccctactgaacaggcatcagcagtgacttctaatactgatgattcatatgcatcccctatagtaaataatcaggagcagttgctgaaagagtctgctccatctgcttctgaggaacaagctatgatgaataacttttccaagaattctgagacttcacattttcttgatagcaatgctgtggaagtgagaactggaacttcagagcctactgttcaaagttccaatgacgaaggtgactcggatattagtccagaaacagacctagctgtttgcaatgttcctctagtttcatctgagggacaactgaaatctgagagtagggctgatgatcaacaggctgctgaaccaacagtttcagttcgatcagtatccagggaaaagcctagtgttgagatcgccaggtcaaagtccgcagctgggaagaggaagaagaaaaaggaaatgcttgctaaggctgatgctgctgggtcttcagatctttataatgcatacaagggaccagaagagaagtctgaaatggttggtactgcagatggtgctgatagttcttcaatagttgacacaacacatgtgctgcttgatgaagcagaaagggatgttagtacgtttgcagatgattgtaagaaaaaagttgagcttgatgattgggaagatgctgcagacatgtctactccaaagctggcaccagattctggaaatcaggctggcaccacccaagtgctagattcagatacaagtgaagcaaacagcaggaagaaatattcacgggattttctgttgaccttgcaacaccactgtactggtcttcctgttggatttcagatgaatgaagctgtcaatgcaataatgaataatttggttggaaagtcttatgttgttgaccgggaaccttaccctagtcctggaaggggtttggaccgcccaacttctcgtggtgaccgccgtggtgctgccatgactgacgacaggtggactaagacgggtgttcctctcagtcctggtcgtgatgttcacatggacctgccaaatggaacatcagttgtcaactaccgtagctcaggaggtaatcatggtgttttaaggaatccacgtggccaaccatcaaatcaatatggtggtggtcttcttgcaggacctgtgcattctgttgggcctcaagtacctcgcagcggctctgattctgatagatggcagcaaaagggtctcatgccttcccctgtcacacccatgcaaacaatgcacaaagcagagaggaagtatgttgttgggaaagtttctgatgaggaggaggcgaaacagaggcagttgaaaggcattcttaacaagctgactccacaaaactttgaaaaactgtttgaacaagttaaggaagtcaacattgacagtgtagcaactcttactggggtcatttcacagatatttgacaaagctttgatggaaccaactttttgtgaaatgtatgctaatttttgcttccatctggctggtgccttgcctgacttcagtgaagacaatgaaaagatcacattcaaaagattgcttttgaataaatgccaagaggagtttgagagaggtgaaagggaagaagctgaagctgataaaacagaagaggaaggtgagatcaaacagaccaaagaagaaagagaggaaaagagaatccgtgctcgaaggcgcatgctgggaaacattaggttaatcggagagttgttcaaaaagaaaatgttgacagaaaggattatgcatgagtgcattaaaaaattgtttggaaattgtgatgatcccgatgaggagaacattgaagcactatgcaaattgatgagtacaattggtgagatgattgatcgtgcaaaggcaaaggagcacatggatgcatattttggtatgatgcataagatgtcaacaagtcagaagttgtcttctcgtgtaaggtttatgttgagagattcaattgacctcaggagaaataaatggcaacagaggcgtaaagttgaaggccccaagaagattgaggaggtgcacagagatgcagctcaagaaagacatgctcagtcaagtaggctaggacgtggtccagctgttagttctgtttcaagaagaggagcaccttctatggattatggctctcgtggctcatctgcgttagcatcctcaagttcccaacaagggagcattcgtggaatgcctccacactcgcgtggttcacaagacatccgatatgaggagaggaaccagtttgacaatagaactgttcttccccagcgtgtagtcaaggatgaagctatcactcttgggccacaaggtggccttgctaggggtatgtctataagagggctgtcaccagcatcaaatactgaacttccttctgttattgaccaccggagaatattatctggttctaatggttataactctgtgactgattggacatcatcatctggaagagaagattctagctcaataattccagatcgaacctctggccgaacttctgcttctagtcaatctgctggaccttcacagaggcctgccagccaggaaggccgtccaggaagtaaatcatattctgaggatgaattgagagaaaaatctgttttggccattcgggaatattacagtgcaaaagatgaaaaggaggttgctttgtgtattgaggagctgaatgctccgagtttctatccttctgttgtatcactttgggtaaatgattccttcgagagaaaagacatggaaagagagttgttggctaaacttctcgtcagcctttgcagtggtcgacataatttgttgagcaagcaacaactcagtgatggcctttcatctgttcttaccttattggaagatactctaagtgatgctccaagggccaccgagtaccttggacgactttttgcaaggtttgtggaggaaagcatattgctcttggaagagacaaaggggattcattcttgaatgaggttaagtcaacttcgagtttaaaattggttgatttcagaccacatcatcttaagcgatcaaagttggatgccttcatgtagctacatgagttattattacctgattcaccaatgggtgcggccgccaagcagtttactttgttcgcacgcaaatacccatcggcctttttgatgtactgtgaaaaattcctctgatgctactcctacttgctgtacctgatcgtgcactatttataagatggaaggcgatgggtcacccattttttcagagttgatgctggttgtaaactactgtcaatgaagggtcatgggtgggaagcagctagctaggcccccataagaggatcagggaatatttttgcgatcacagggagaagtctgctaaccaatattagttggtagttgggggaactgtaggttgaacttaatgcctcctgcgggcttctgaccaaatactcctttgtgatcagaattggtagtcggttaacttagcggcattttcgtgatagccaatgtttctcgtgatggtctgaatatgttgatgttgcttaaattttgctgtaatttgctatttttcctcgttctttgtttttgtacttattgagaattgatgcctcggattctctgatgtatgtatgattgggctcaggctcagggcactttgccatccctattttgtcatttcggttcttccttagcgtggaacgtaatgagtgtgagaaagtaaaattggtgaaagtgaaaatgggaactgagagcactttttttattgcattctcatacaagtgaaaagtcacatgcgaagacgtgcgaaagtgtagaatgtgcaaagggatatgtcccatgatcatttggttcatgcgactagtgcagtgcagtaataactgtttacatcatgtaacacttttccttaagcaagtggagaa

SEQ ID NO: 17423 - DNA, 1564 bp, Zea Mays
gggctattcaagatcccagcctctgcactctagtactgacccaagcaaaggacagcagatgcagtttctacagtggagtcccttcctcgccccaccagcacaaggttcctttcatacgaagaactgaaagtggcaacaaataacttcgagccttcaagtgtgcttggagaaggtggttttggccgtgtcttcaagggggtactgggtgatggcactgctgtcgctataaagaagcttactaacggagggcaccaaggagataaggagtttttagttgaagtggaaatgctgagcaggttgcaccaccggaatcttgtgaaactgattggttattacagcagccgtgaatcatcacagaaccttctttgttatgagcttgttcccaatggaagcctagaggcttggcttcatggtacacaaggtgctagccgccccttggactgggacgccaggatgaggatagcacttgatgctgccaggggattagcatacctccatgaggattcgcagccttgcgtaatccacagggatttcaaagcatctaatatattgcttgagaatgatttccatgctaaagtgtccgattttggtctggcaaaacaggcgccggaaggtcggacgaactatctttctactcgtgttatgggaactttcgggtaatctgaatgtccttttacatttagccatgggtccatggcccagcaatttattttctgaatttaccttcaccttgtacttctggcctttttgcaggtatgttgcaccggagtacgccatgacaggacacttgcttgtaaaaagtgatgtatatagctatggagttgttctacttgaactactaactgggaggaggcccgttgatatgtcacagccctctgggcaggaaaacctagtgacttgggcacggccaattctccgagaccaagatagattaggagagctagctgatcccaggcttggcggccagtacccgaaagatgattttgtgcgggtgtgcacaatcgcagcagcctgcgtttcgccagaggcgaaccagaggccaacaatgggcgaggtggtgcagtcactcaagatggtgcagcgctctgtggagttccaggaatctgtgccaacacctcccgctcgccccaacgtccggcaatcgtcgacgacctatgagtctgatggcacctcgtccatgttctcttcgggccccttctcaggcctcagccccttcgagaccgaaaccattccaaggactgcggttttctcagaagatctccatgaaggtcgatgactggtggggggtggctgccttgccatcgccgagccgagccgtttctctagagcctgtagccatgtagtcaagcattcaaaggctggtggtccaattggcctggccagccattgggaggaaaggggtacctgtaaattccatttttctgcgccgtctcaaaagactactactagattattacaacccacaaggacgttctctggctttgtatggaagaaatggttttgttcgaagttgctgctgtcctcagtccatagctcctgaattacgcagacagacagtcctaac

SEQ ID NO: 17424 - DNA, 839 bp, Zea Mays
ataatggcaaatttctcgtcgaataggtcagtgtgcacgcgtgaccgcgaaaagttgtttcgacctcctcggctgctgctttccgctgacctcgccgtgccattgagatgtcatagaacctgccgagccggtcgcaggcgcgaggagaatggggacggaggccgacgccgcagccgtggattcgcttcggtcgcagatcccgttccagaccgacggggagctcatcctcccgccgcgcgatgtggggctcgtcctcgtcgacctctgcaacggcttctgcaccgtcggcgccgggaacctcgctcctgttgcgccaaataagcagataagtaaaatggtggaagaggccgctaggctctctaagctgttctgtgatagaaacctgccgatctttgcattcctggatacccattatccagataagccggagccaccgtatcctcctcactgtatcattggtactggggaggagaacttcgttccagacctggagtggttggaaaaggagccaaatgtgactataaagaggaaaagttgtattgacggttacatcagctgcatagaggaggacgggtctagtgtttttgttgactgggtgggaaaatatcagatcaaaactgtcttggtactcgggatatgcacggacatctgtgttttggattttgcaagctcaactctggctgctcgaaatattgaccgagtgcctccattacgagatgtcgtgatttattcagaggggtgtgctacatatgaccttcctgttgagatcgctatgaatatcaaaggagctcttgcccatcctcaggtacagagcacatgcttgctgtcgataaactgag

SEQ ID NO: 17425 - DNA, 1376 bp, Zea Mays
gtcaccggctcactccttgtccggacactgtctgtctgtccctctcttatccgaatatttcctgtctcctccactctacgcagacgcagctcgtgctgcacaacatgatcagatgctagttcgcacggtcaggtgatatgggggcatgttcagctggtgcaaatttcactccacacataattacagtcgctcctggtgaggatgtgatgacgaaggtcatatcgttttcccaacaaggaccacgagctatctgtgttctctctgcaaatggtgtgatatccaccgttacactctgtcagcctgattcctctggtggcacgttaacttacgagggacgctttgagttgctgtccctgtctgggtccttcatgccaaccgaaaacggcgggacacgaagtcgatcaggtgggatgagcgtgtctctcgcgagtccagacggtcgtgttgtcggtggcggggttgccggcctgctggtggcagcgagtcctgttcagattgtggttgggagcttcctgccaagctaccagatggagcagaagaacaagaagccacgggtggacgcggcacctgctgccgccgtcccgcagacgcctcccgcagtcccgatctcgagcacagacacccgcagcagcgagcaagggcagcagagctccgcgtcccagagaggggtgaacatgacggtcccgggaggaacctacggcgcggaccagagctgggtgttgtcccctgctccgcagcagccgatggccgaggtgtccaggacgccgtcgtctggggacctgaagatgaccacgtccggatcatgagcactctgaaacccagccggagctagccacccacgcactgactgggagccaaggtccccgctggaagatggaaggatggggtcatggattggttcatttgttcctgactcttgctgcaaatctcgcactagggcggtctagtctagttgttgctgtatgatgagcgcgccaggcaggaggaggggagtctaacaactgcacttgctgccattgtcgaggagtgcgtgtgtgtagtgcagcagctattaacaccacagtttgagtgtgctagcggcgtgtgtttttatttaggcgacattgtcgattaaattcttgtgtcgggattattacctttaccttacgtgctggtttagtttggcaccctgtatctgtatctgtattggatcatgcccacccttggcttaaatcagcattagaaaattctccatgtttcctgttattctgtcactagtcgggaaatggatgaattccgtggtgcgatcgatctctctttccgaatcatgtgtgtaggtatgatggattgtgtggccaggtcatgcctacttttgtaactgttgccgtactccaaaa

SEQ ID NO: 17426 - DNA, 543 bp, Zea Mays
cagtctggccattcctgatgactggcaatctcattcgattttctgccttgactggttttggctggtccaatggcgtggtgttgtcattcttggaagaattcgggtggccagagggcaaggaaatagcttgttgagcggcgaagcgctcacgacagggtggatctggtcttgccggagagcaatctggttaggcatcgttcatgtcacacatgtctagctacgagagtggcgcattgccttctgcagttcgtcaagtgcgtttgtgtgttcttgtttgcttttagttgcgactaggctgtagatccttcttgtatcacaacaatatatgtactgctactgtaccggccccggcctcttgtttaatctgaaatgctcattgtatatcctcttacgaaacgcaaacacgtgctttggcacgttcgtcgtcgaaaagagaagagaatataccattttgctctcttgaatacaaaatcagtgcatcgttctagatctcgcccacagggcgtggactggcagactgttggccccttttctgttcaaata

SEQ ID NO: 17427 - DNA, 1437 bp, Zea Mays
cggcaccacacaataataagtgatgtcattatgagcatgttcatgaacgagctgtatggtttccaattggataaccaccgatggtacccgctagagctcaggaaagacaagcctgctaaaatcaaggcaaggaatatcaaaagaaaagaatcaacgaatgatgtagaagctaatattattgatgatgagggtgatgaggtcatggtggacgtagaagaagctattgaaggacaacctgaagtcaatggagtttccaatcagttgatcaaaactctgaatatcactaaagatggctcaagcagaagcattgatgttctctctgattcaacagcacaagaatcatttttggaggcggtgaagcccagtggtcgtatcaatgcatgcttggccgtagggaaagatatgctctacttgtatggaggaatgatggaagtgaaagatagagaaattactcttgatgatctatattcacttaaccttagcaaacttgatgagtggaagtgtatcatatccgcctcagaatctgaatggttagaaatttctgaggaagaggatgatgatgatgatgatgagactgatgatgatgaaaatgaagagggggatgctagccagacagatgaagatgaagaagagtctgatgaagatgctgcaaagaacgtgtccagtgctgtgtctctgctgaagggtgaaagtaagaccatgcgtagaaaagagaagcgtgctcggatagaacagatcagggtcatccttggcctttctgattctcaaaggactccagtgcctggagaatcactgagagatttctacaagaggacaaatatgtactggcaaatggctgcctatgagcacactcaacacactggaaaggagctccgcaaagacggttttgatcttgccgaaactcgattcaaggaactgaaaccgatacttgacgagctggctgtgctggaggccgagcagaaagctgaggaagaggccagtgcgtcgactagttccaagagggacaccaagaaacccaagcagaagagcgcacgaaggtagctttggttctgaacgagtgtgtaagcggaagccagctttagatgaagttgctccaggaagaggccagtgcgtcagctagtcccaactcccaaggtgtgaagaggggacaccaagaaaatccaagcagaagagtgcagggagatagttttggttctgaacgagtgtttaagcgtaagacggttttaaacgattgctcaaatgctcaagttcctttgaggggatttccattttctttttgaacccaagtagacaaaattgatatttgttgttttataatagtgtatgtatatactcgtacgttgaaatttgattcatgtgcaatcttgaccgtatattctcccactattcgactaaacgaacgatcttcctccacacagcatagaccatagagctcca

SEQ ID NO: 17428 - DNA, 1068 bp, Zea Mays
caccttatagtccacttgataacttgaatataccggttgttgcacctattctttactgggaatcaataactttcagcagaccagctattgctctaatatgttttggcacaatcgccttattcccaagtgttttgttaccttcttcgcccttcatgtggcttgctgggatgacttttggatatctttatggctttttgataatcacagtggggatgagcataggcatgtcgttgccgtattttataggttctgcattccactgcaggatacatagatggctggagaagtggccaaagaaagcagcttttgtaaggcttgctggcgagggagattggcatcatcaatttaaggctgttgctttactcaggatttctccatttccatatttagtttttaactacgcttctgtggctacgaacgtcaaatattacccatacatagctggttccatggctggaaccatacatgaaactttccttgcaatatacagtgggaaacttctacagagcttggctgtagcaactagccaagggtcattcttgtcggtggatcagattatctacaatggaatcggctttacaattgctgcaacttccactgctgctatcactatttatgcaaagaaagcgcttcaaaagctccaagcggaggacgagatattttgagaggtccaaggccaggatcaaacccgtaacgctagttttctttcaggtgtactatatatgaacagctggtactaatctggtttcctgtgtcgactaccggactgctactaccatccatctgaggaagaggagggggggaggtgcttcagcaattgtaaagaaaatagaggcccagagtttttcgttcttgttttgttttctgtagagagaattaccaacctcatctgtgtattgcaattgcgctatgtaaatccccaagttgaaagttgtttccttatcttgagaagtataacaaggtatgctggctgcgtcgaaatatattacatacactgcagccatgatttgcgtgttgtatagtaatgcatcttaagctaatatatatacgacgaaaaactttggggct

SEQ ID NO: 17429 - DNA, 1260 bp, Zea Mays
tgagtgggatcgggctgcgttggcagccaagcgtgctagggaactagtcaggacaaagagtgtgttgaaatcttcatcactccctgggaaacttgctgattgtgcatcagctaatcctgaagaatctgaaatctttattgtcgaaggtgattctgcgggcggtagtgcaaagcaaggacgggatagaagattccaggctattttgcctctaagaggtaaaattctcaacattgaaagaagggatgaagcagccatgtacaaaaatgaagagatccaaaaccttattcttgcacttggattaggagtgaagggtgaggattttaagaaggaggctctccggtatcataagatagttatacttactgacgctgatgttgatggagcacatatccggactctcctccttactttcttcttcagatatcaaagagcattatttgatgaaggttgcatctacgttggtgtacctcctctttacaaggttgagcgtggaaaactagcacattactgctatgatgatgccgacctcaaagagatagttaacaccttccctgcaaatgcatcatatcatatccagaggtttaaaggtttgggtgagatgatgcctgcacaattatgggaaacaacgatggatcctgagaggcggctgttgaagcagcttagggttgaagatgctgccgaggccaatgttgtgttctcgtcacttatgggcacccgggttgaatataggaaggaactgatccagaaagctgctagcatgatcaacatagatcaacttgacatttgaaggcattaagtaaggctgtcctttctgtgtatgatatagaaggtccgccacctgctgcttttcttgccactccaacaggattctagcgttgcagacttgatgataccttggcaacatctttttggtgctagagtagcagaaaacgtagggtacaaacattggatccaggatgagagctgggtttcctaacgaaaactctgattcatttgtggcggtgctataaccatttcagcttgacagttcagagctcacgggtgtagttccctgctgacatcgttcctccgatacggtgtaatatgcttttatatctatcgcctaatatttgcttcatgattccgtgtctcctttcttaatctggcagttaagtatctgtatgagctatggattcgtctgatgtttaaattggacggtttgaacccagttgacatgtgagcaatatctggtttggtttataggtaccaggtttagagagc

SEQ ID NO: 17430 - DNA, 1833 bp, Zea Mays
atggccgcctcggcattggcctcccgcgcgctgcggcctccgcacggccgccaccctcccgccccttcgccgcgtccgcgtccgcgctcggcaaccgccgccgctccaaggacgcgctgccgcgcggtggctgcggacgagcgccccgccgaccccgcgttccccgagcgccagaaccgcgggatttccggggcggtggagaggccggaggcggacgtggttgtgataggcagcgggctcggcgggctgtgctgcgccggcctcctggcgaggtacggccaggacgtgctggtgctcgagagccatgaccgcccgggaggcgccgcgcactcgttcgatatcaagggattcaacttcgattcagggccatccttgttctccggattccagtccagaggcccccaggcaaatccacttgctcaggtccttgatgcattaggcgaatcagtcccttgtgcgtcttatgactcttggatggtttatgtacctgaaggacaattcctctcacggataggaccaactgaattcctcaaggaccttgagatgtttgttggtgttgacgctgtccaggagtggaaaaaacttcttgatgcagttattcctatgtctgcagctgcaatggctttgcctccgctttccattcgaggtgatctgggcattatatctacagctgttggtagatacactccttcgttgttgaaatcattcatacaaatgggaccgcaaggagctctgggcgctacgaaacttctacgtccattcaaagaaattgttgattcgctggagctgaaaaatccatttgttcgtaactggatcgatcttctgtgctttctacttgctggagttaaatctgatggtgctctttctgcagaaatggtttatatgtttgcagaatggtacaaaccaggatgcttgcttgagtaccctctgggtggaactggagcaataatagatgcccttgtgagcggtattgaaaaatttggtggcagacttgctcttcgttctcatgttgaaaagatcttaatagagaatggtcgagcagttggtgtcaagctacaaagtggacaagttatccgtgcaaagaaagcggttgttagcaatgcatctatgtgggacactttggatctgttaccacccgatgctgtcccaaaatcatatgaagatagagtgaaagcaactccacaatgtgaatcgtttatgcatctccaccttggttttgatgcagagaatgctagagaggaccttgggatccatcacattgtggttgatgattggaacaaaggagttgatggtgaacaaaatgttgttttgatatccgttcccagtgttcttagcaaggacctggcaccgcccggaaagcacattcttcatgcatatactccagggacagaacctttcagtttgtgggagggactggacaggaaaagtgcagaatatcgaagactgaaggaagaacgttctgaggtgatgtggaaagctgtggagcttgctctcggcccaaaatttagccgcgaaaaatgcgacgtgaaattggtcgggacaccgctaacgcacaggagatttctccgaaggaacaggggaacctatggtccagccataaaagccggagaagccactttccctgggcaagcaacaccgatcccccagctcttttgctgcggtgactcgacctttccagggatcggagtgccggcagttgcggccagcggcgcgattgtggcgaacacgctggttccggtgtcgcagcattcagagctccttgacgctgttggaatctgagtggcagatacgtccgtcggtcctggctgattagctgatacccctgcatacaca

SEQ ID NO: 17431 - DNA, 3112 bp, Zea Mays
aaatgatgtgcatagtaatcactccagattctgttgatgagcctggtttgattactatgcacatcatttccctgaagattccaaggagggagatggaaatgaaacaaaagaaattgatgatgaacaagaagaaaatgaagatgaggatgctgaagatgaagggcagattgaagagaacatctcaaagactcctccatcaacacggtcccggaagttgctatcacaaacttgtaaggaaatcagatgggaaggtgaaacatctgggaaaacattgtctggagaaactctatataaatgtgcttatgttagggaactcagaatacctgttggtggaacagtggctctagaagatgattcaggagacacagtcatttgttttgttgagtacatgttccagaaagttgatggttcaaaaatggttcatgggaggattctgcaaaaaggttcacagacaattcttggcaatgcggcaaatgagagggaggttttcttaactaatgactgcttagaattcaaattagatgacatcaaggaattggtaatggttgatatccaatcaaggccttggggtcacaagtacagaaaagagaattctgaagctgataaagttgagcaggtcaaagcagaagagagaaagaaaaagggccagcccatggtatatttctgcaaaagcttgtactggcctgagaagggtgccttctttgccctctcccgagataaaatgggtcttggtagtggtttatgtagttcttgtgataatatagagccagattctgatgaattgaaaatattctcgaagaccagctttgtctacagaaaggttacatataatgtcaatgagtttttatacataagacctgatttttttgctgaagatgaggatcgtgcaaccttcaaggctggccgaaatgtgggtctaaagccctatgcagtttgtcaaatattgtccatccctgaaggggctggatctaaaaaactcaatccagcatcagcaaatatcagtgctagaagattttacagaccagatgacatttcatcagccaaagcctatgcatctgacatcagagaggtctactatagtgaggatgtaattgatgtgcctgtggatatgatagagggaaaatgtgaggttagaaagaagaacgatcttgcaagttcagaccttccagtgatgtttgaacatgtatttttctgtgaacttatatatgaccgtgccagtggagctctcaagcagttgcctccaaatgttaggtttatgtctatggtgcaaaggacaagtgcgttgaaaaagaacaaaggaaagcagatctgtgagcctgatcaaatagattcaggtaaatggttggatgtgcctaaagagaaccgtctagctactcttgacatttttgctggctgtggaggtttatcagaagggctgcagcaagctggtgtatcttttacaaaatgggcgattgaatacgaagagcctgctggtgaagcatttaataaaaatcatccagaggctgtggtctttgtagataactgcaatgtgattctaaaggcaattatggataaatgtggggatactgatgattgtgtttcaacttctgaagctgctgaacaagcagcaaaacttccagaagtgaacattaataatcttccagtccctggcgaagttgaattcataaatggtggtcctccgtgtcagggattctctgggatgaatagattcaaccaaagcccatggagtaaagttcagtgtgagatgattctagcattcctctcattcgctgagtatttccgtcccagattctttctgttagaaaatgttcggaactttgtttccttcaacaaagggcagaccttccgtttggcagttgcatctcttctggagatgggataccaggtccggtttggaattctagaagcaggggcttttggtgttgcccagtccaggaaaagggcgtttatttgggctgctgcacctggagagatgcttcctgattggccagagccgatgcatgtgtttgctagccctgagctgaagataacactgcctgatggccaatactatgcagctgcaagaagcactgctggtggagcgcctttccgagcgattactgttagagatacaattggggatctgcctaaagtgggaaatggtgccagcaaactcacgcttgagtatggaggtgagcccgtgtcttggttccagaagaagataagagggaatatgatggtactgaatgatcacatatctaaggagatgaatgagctgaacctaataaggtgccaacacattccgaaacggccgggttgtgattggcatgacctaccggacgagaaggttaagctgtcaaatgggcagatggctgacctgataccttggtgcctgcccaacacagccaagaggcacaatcagtggaaaggactgtacgggaggctggactgggaaggcaacttccccacatccgtcactgatccccagccaatgggcaaggtcggcatgtgcttccaccctgatcaagacaggatcatcacagtccgggaatgtgctcggtcacagggctttcctgacagctatgaatttgcgggcaacatccagaacaagcaccggcagattggcaatgccgtgcccccgcctcttgcctatgcacttgggaggaagctgaaggaagccgttgacaagcgtcaggaagccagcgcaggcgtgcctgcaccatgagaagttttccttccatcaaaccatgacccatgaagctaagcgctgaggtcgtccttgaggaccagttaattttggttttatcagtcttaatgcactcctgaatgtatatgttagagaagtgtcgattgctgattgttaccctgattcagggtagcggttatatctaaaaacttgagaaaatctagtgtactctagttgtcatgtgttccattttgttggctctaaactttcaactagttttggtgattaatgacaacatgagattaaattaaattttgtagaggcatttaaattaggccactaatagtgactatttagtcgctcaatttttttgcccctaattatggaatttgttttttaaaggatgaacaacaagattaaatggattagttcaagtgtcgattgggg

SEQ ID NO: 17432 - DNA, 1014 bp, Zea Mays
aaaatcggggagcatctgtttacttcttaatgagatgccgagacgcaaggctgtgcagcgccgggggagtgcgggtggtgctgaccgacttccacaggagcaaccgtacggacttcctgctcgccgggccggcgttcgcgggcctggccaagcccgggatggcccagcagttgaacaggcgagacgccctctccgtagagtacaaaaggattccctgcgagtacaaggagaagaacctgtcgatccgggtggaagaagcgggcgacaggagccggggcaagctggtggtgaagctgctgtaccagggcgggcagaccgacgtactggcggtggaggtggcccccgtggggtcgtcgtcggagtggcggttcatgacaagggcgtacgggccggtgtggagcacggaccgggcccccgccggcccgctgcagttccgcgcggtcgtcacgggcggctacgacggcaagtgggtgtgggccgagcaggaggtgctgccggccgactggcgccccggccaggtctacgacaccggcgtccgcatcgtcgacgtcgcccgggacgcatcccgcggctgcaccgccgccgccatggacgactggaagtgaagtgaggatatggctgggtagattaaaaatacgtatgaatacatactaacacgtcgccacatcggtgctgcgacactctggtaagaagaggacagcatgcaatggctccaagaacagcatcccccccaagcgcgtccggctgtccagaggagaggaggaagaagattggagtagctagcagctagggtgtaattgtgtatgcaggatcttctatcaaggtcgatccgattagatgcaggcaaaaaaaaagagctgggatccagtcgacagttctaatgggtcatggcgtcatgccatcctggctgtaccacaaactcgactaaaagcaaaaggaaaaaattaacaaaaaatcacgctatcattcaactaccatgcacggatccataaaattaccccaaaaaaaaaccaa

SEQ ID NO: 17433 - DNA, 138 bp, Zea Mays
tggaggatgctgcgatgtgttcgtgagaggtctaggccgccgtctcccagtcaactttgggttgctagatcgttgtctccttacgatgtaatgatttatttattttgtacagaactcttattatatagtaaagatgtg

SEQ ID NO: 17434 - DNA, 426 bp, Zea Mays
ctgcactatagaagatatcctcagcaaaatcataaatagaaggaagtacagaagaccactggggtcgacaagatgctgcacaggcaattgctctagttctatggaaaggtcttggtctggaggatggaaatgctgttggaacttggcagaggaattgtgaaaaggttctattaggtataggaggtggtcactatgttcctcgtcacatggatattgtcatcaaagatggtgtatgggtcggtcatttactctctggttactccttgccaatggacatgtcgtcgcaagtaaatgtaaagagttctgaagaggttgctggaatgtggaagcactccatcaaagtttcttatgaagcaacaaaggcagcatttcctggtggtgaagttatcgcgcatcttgatcacaagcgatggaggacaaggcaag

SEQ ID NO: 17435 - DNA, 3119 bp, Zea Mays
aaataagcaaaaatggcttgctcagttgctctttgtgggaacaaaggtgtctgaactcagagctatggcatgcatgcgcagggccccttgtgtccctgcctgtggttgggagccgggtcgtctactttcctcagggccatagtgagcaggttgctgcatcaactaataaagaagttgatgctcaaatcccaaactatccaaacctacctccacagttaatatgccagcttcataatgtcacaatgcatgctgatgcagagactgaagaggtgtatgcccaaatgacactgcaaccattgagcccggaagagcaaaaggatccttttcttccaattgaattgggtgctggtagcaagcagccaaccaattacttctgcaagacgttgactgcaagtgatacgagtacccatggtggattctctgttccgcgccgagcagctgagaaagtcttccctccattggatttttcacaacagcctccagtgcaagagctggttgcaagagatctgcatgataatgaatggaaatttcgtcatatttttcgtggtcagccaaaaaggcatctactgacgactggttggagtgtttttgtaagcgcgaaaagactagtagcaggggattctatcatatttatctggaatgataataaccagcttctcttgggaattcgccgtgcaagtcgtccacagactgtaatgccctcttctgtgctatcaagcgatagcatgcacattggtcttcttgctgcagcagctcatgctgcagccacaaacagtcgtttcactattttctacaaccctcgggctagcccttctgagtttgtcattccactggctaagtatgtgaaagctgtttaccacacgcgcgtatctgttggaatgcggtttcggatgctttttgagacagaggaatcaagtgtcagaagatacatgggtacaatcacaggcataagtgatctggactcagagcgctggccaaactcgcactggcgttctgtgaaggttggttgggatgagtctacagctggtgataaacagccaagagtttcactctgggagattgagccactgacaacctttccgatgtacccaactgcttttccattaaggctaaagcgtccgtgggcttcaggactacctatgttcaatggtgggaggagcgacgagttcgctcgttattcttctctcatgtggcttcgagatggaaaccgaggggctcagtcactgaacttccagggacttggagcatcaccatggcttcagccaagaatagataatccattgttgagtctgaagccagatacttaccagcagatggctgccgccgcactagaagaaattagagctggggatcatttgaagcaggcatcttctctcctgccagttcagcagactcaaactttgaatggtggattagatcatttgtatggaaatcctgttctacagcagatgcagttccaatctcagcagtcaacactgcaagctgtgcagcaaggttatggtcagaatgcaaacgactctgggtatgttcaaaatcaactgcagcagctgcagctgcaaaagcagcaggagccaccaccaccacagcagcagcagcagacacaagtccttcagcgacaagcacatcaggaaatgcaacagcacctctcagctagttgtcatgatattgctaatgtagcttctggtgtgtccatgtctggatctgcttgtcaatcacaatcttctctgctttctgggtcatcgttctaccaacagaacatctttgatggaaatggtggtccagatctgcatctgcacaacagtttccacaacttttcaagccaagagtcctccaaccttcttaacctcccaagaagtggccaattaatggcatcagagggatggccttcaaagaggttggctgtggaatctcttgctggtcatgagatccaacctctgcagcacaagcttgagaaagttagtcaccagagtactgtgtctcactgttctggcaccttgccgccactatcagcaagagacggttctagtgcccaggcttgtggtacaaatgttcagagtcacctgcttccatcatcatttgcaatccatgatggattgtcaaccatcaggagtggtggtgttggcagtggaactgatgcgataaccatagcttcgttgagatatagtgatgcgaatttgctacctgaaaactccatagcaacttccagttgtttgggtgaatcaggaaccttcaattctcttgacgatgtttgtggtgtaaacccatcacaaggtggaacctttgtgaaggtttacaaatcagggtccctcgggagatcgctcgacatcaccagattcggcagctactacgagttgcgtgtcgagctcgagcggttatttggtctcgaaggccaactggaggaccctgcaagatcaggctggcagcttgtattcgtcgaccgggaaaacgatgttcttctcctcggcgacgacccgtggcaggagtttgtgaatagcgtagggtgcataaagatcctctcgccgcaagacctgcagcagatggcccgcggcggcggaggtgaccttctgtctgcgcctggagcgaggatgctgcagggcagtgtctgtgacgactattctgcaggccacgacgtgcagaacctcaccggcagcattgcgcctgtggtgcctctggactactgaagaggactgaggcgaaggccgggatctgaagctctgaaccaaaaccggcaatccagcatttgcaggatttgccatccgcaagtcgtttcgttcctgtgttatgatcctctcagtctcaggccctgttgatcgggaataacctagtcgtttaatatagctagatgatgatccatgtatcattatggtaatggacatgctgtacgatagctactgtagctctaaatgcaggcaaggcaagaattgatctatcaaagaacgaatgaatgcaggcactcactgtagaggtgatgtagccctgtactcctaagtcctaagatatattctcatagctaaaactgatggttccatgtggcattggcacccaagctattgaaaccagtcacctttgccgattctttcttcacctcaatttgcggttgttcggtcctgctgcatgcc

SEQ ID NO: 17436 - DNA, 912 bp, Zea Mays
  misc_feature (912)..(912): n is a, c, g, or t
tccctctccgcgtctcgtctcgtctcgtcgccgcccgaccctcgctcgcctcttcccgaggtctccacgatattacatccccgatcgtgcccggggcttcgttccggtacgtgagggggtcggcgatgttcttctcgggtgacccgtcggcgcggcggcgggtcgacctcggcggccggagcagcaaggagcgggaccgcaaggtgctgctcgagcagacgcgcgaggagcggcgtcggcgccagggcctccgactacagaacacctccgccacgaagatccagaaattcttcagagggaagaaggctttggaattggcacgctcagaggttcggaagaatttttgctcaacttttggggagcattgcgagcggatagagtggaacaacttcggaactaattctgactttcttcgtcaattactgtttttctttaatgcaaatgaagacaatgacatagctatactttgtcaaatctgcaacttgctgctgcaatatgttaaacaaggcggagatgttgtaactctctttactggtgtgaatggctcctcactgcaacctctcgttgctcacagagtaaaaaaaattactctcatctgtgtgcaagcagtctatcaaaagaggcatgattggggcagccaacttttgacaacacctggaagcacatcagtgccttctgtctcattactggaaactgtaggttgcttgataaatccaaaatttccttggaactgcaaagtagtaggttatcttcagcagagaaagatctattgcttattccgtggaattgtcatatctgtaccacaaaaggtcagaaattctgggcattttgatggtacatctgtgctggagcaagttctcatgcttgttgcttcacatgttggccatcatccctgttgttgtctgaaagtgn

SEQ ID NO: 17437 - DNA, 1395 bp, Zea Mays
taatccgattccgatgccgtcttgccgtgggtgaggaggaggatgatctgaactccattgtttccgtcgaaaacctgcctcccgctgctgctcacgttcctgaggcaaggaggacaacagtgcgcgtcaggttcgtgctgaggaagcagtgcgccttcggccaccagttcctcgtcgccggcgacgacgcggcgctcgggctttgggatccagctaaggcgatctccttggtttggtcagaaggccacgtctggacggcgaacacggatttgccggcgaacaggtcgatcgagttcaagttcttgctgcgagatgcctcggggcatgcgcattggcagcacggcgctaacagaactctgcgaattactactgaaaccccaaacaccgtagttgtccacgaagactgggatcacggcaacaaacagaaagtgtcagaggaggaagagctctccatcggggaagatgtgatgtttccagatgatcttgcgggaacagatggcgcaagcgcaatgccggcagataatcccgagaagcatcagaatgtggagactgacagtgacaggtcggctgcggtggttgcagatgctcctccgcagcaggaaatggtagcagcaaacggaacgggccaaccgcagctggtggtggacgggcacaagacgattcttgaagaggtccccggagaagaaaacggcaccctttctgccgccaattatgctggtaatggcagcatcgacgacgatgacgacgacgacactaccttgtatcagggaggtgatgtgctaccgaacaggccgacaagtatatttgagaacgacttggcttgggccgggaaagccatgcagcagctgctccgggtcctcggtttccagatcggcacaacaagaacgtgaggttcagcttcagatgccgttgtgtgtatatgttgcaaaccttcaactcacttctctacgcagaaagaaacgtcggtgctgaggattgtaactgaaactccagtaacagcagcaaacatcagctgtcttcccccctgcactgtgttgcatatagcaattactaggagataaacaactggcactgcaagtatgttcagtttagaaacaatgactaataaggtgagagtcatcgacttcttatccgcttgtcgtgaaggcaggctccatctgtactgtacaacatggcaaatgtaagttcggtacaaagtcgaatatgtggagcagtggatgtactcttctaaaagaaaagggtgatgcacttctggtaaaccaatgacatctgtaacggtgaaaatgagctgttggctgttgccctcacattctatccttcttgaatattacactagaacattaggtgcccatttgggcgccctacagtggtttaaggcagaagataatgtggagc

SEQ ID NO: 17438 - DNA, 2050 bp, Zea Mays
cgtcttcttgggtgcagagttatcgatgagcgcggtggtgcacgccatcgattcccagcaaggtgggcgccaaacgctgggcaggcactggagaaactggagggacacgctggagggcgtcctacaatccactgctgggaagcagggctccggagggattcagagctgcatccgagctgcgctcagatttagtggttgccctcccacagaacatgggaacttagctcacgacggaggagcaggcagagatgaccctgttggagctgtacattctgaagagaatagtggtgccttggttcagttagaagacggaacagctgcacctttggaagccaacaaaacgatgtgccataatgctctctttgacattctgatctccgagaagtttgcgatgctgtgtgatctgctagctgcaacattccatgtcagtaagcctgacgatgtgattggtttgcaaataattgatgccaagatgagaaatggggattatgcacagaaccatgcgctgcttgaccatgatatcaagcagatatggaagaagtttgaacacgttggccaagaaatggctggtctggcaagcagtctctcagtgatttcacaagcttctcaccaaaagcaggcttctggtgtttcagaaattgatgtggctgaacacaagatagaagaaacaagcctggttggtgttgcccgcaaagccctaagggagttgactccccagtgcgattctggctattctacgataccaaaacgagctgggaggtctggatcggatggaatttgcaaggattgtggcagaaaggcagacagcaaaggaagaattatctgtgacagatgtgaagctgcgtaccatgtttcgtgtctgaagcttgccatcgatgaagaggccccagcaaaatggtactgtcccagctgcgttgagccagacgtagctttgaagcataaaaaccatggcaggtcacatgaaggctgtgatgtatgcgagtggctcgtggtgaagccagaagagcctgctgaagatgttagcgagcctgaactggcggtcaaaacgcaggagagctcagtgtcaagcatgggcgaagacagcgaaccagacctctcaacgactgctctagcgaacttgtgcaagaactgtggcacatgcgaagacgaggacaggaagttcatggtatgcgggcatggtttatgttctttcaagttctaccatgtcctgtgcctgaaagagagacagattgcaagcgagaagcagaagaatctaaagtgctggtactgcccgtcttgcctgtgcagacggtgcttcaaggacaaggatgatgagaaaatagtactgtgcgatggctgcgacgaggcttatcacatctactgcatggacccgccgtgcgagtctgtcccgagaggtaaatggttctgcacgcggtgtagcgcgcggaggtcagtgcaagggatgcagaggtatgagaagtcgatcctggagaaagtcaagcgtgctcctggtgccaatgggccgaaggtgcaggcatctgctggtccagaaaaataggcagcagtgtggatgatgtttcacaggccatactagggtagaagaaagggaaggatacttttgttcctctgagggagggggtatacattgctctggtagctttgaagaatcgatggatgggttgtgtatacgtggggggaaggaagatgccccgttggctgctgatgttgattcactgtgctgccatttcgtttttggaattcttgagtgtcgctcggcttgttgttgtgctgttatgttgtgtctgatggtaagtggcatcgcttatcgatgatatgtacatgcctgtaactcgttttcttttatttgttggacattgtgtgtgtgtgtgtgtgtgtttgaattgtgatgacctagagaacgctggtgtcaatcaatgcagcgtaccttgtttgcgcctaaatttggtagacaaaagaggagattaccttcgtagcatgtgtaccctgcatgtggaaggcaaacctatcaataattccttgtatgaatttgacatagattattacaaactgt

SEQ ID NO: 17439 - DNA, 4447 bp, Zea Mays
atacttttgtcatactttagctttagcatcttcaccatacagttgagtgtctctcggatccacctgtttttgctctgtacaaactttgcttaaattacgaaagaaaaaggaaaaggaaaagtctctcgagaattcgaaataattggaattagatcgtcgtggggattccacatcgtaaccactgaagacgaggcggcggacgagacggagagcagaaccgcgcagcgaagcagcagcggcgacaagccctcgcgtcggtagaggcgccgtccgccgtccgccccctcaactccggtagccgctggccgctgcaggtcgagtcccgtcgagccgactcgcgcttcccgatctgggtggccgcggcgccggcatggcgcggttcgaggtgaacggcaagtcggtgcaaggcgtggacttgctgcggcggcgccactggccgtcgcgcctcgacttctggcccttccttgcactctatgcgctctggctgctgcttgctgtcccggcgctcgacttcactgacgctctcatcatccttgccgcgctctccgctgctcacattctcaccttcctcttcaccgcctggttcgtcgatttccgtgccttcgtcgggtactctaaggtcaaggatatccatgccgctaacacgtgtaaggtgactcctgctaagttctcggggtcaaaggagattgtacctctgcacaaacagaaaaatgtggcctcaacttcagctgcaggtgagacagaggagatttactttgattttcggaagcagaggttcatctactcggctgagaaagataactttttaaaactccggtacccaacgaaggaattgatcggtcattatggcaagggcactggttatggaactgaggccaagattagcaccgcagtggacaagtggggcagaaatgtattcgaatatccacagcccacatttcagaaattaatgaaggagcaaatcatggaaccattttttgttttccaggttttttgtgttgctctatggtgcctggatgcgtattggtactacagtttgtttacacttttcatgcttttcctgtttgagtctactatggcaaagaataggctgaagacattgactgagctaagacgtgtgaaagttgatagccagattgtgttgacctatagatgtgggaaatgggttaaagtccctggaactgaactactaccaggagatattgtgtcaataggccgctcaactagtggtgaagatagatctgtaccagcagatatgctattgttagctgggtctgcaatagtaaatgaagctattcttacaggagaatctactccacagtggaaggtttcaattgctggacgtggtcctgatgatatgctatctataaggcgagataagaaccatatcctatttggtggcactaaagtattgcaacacactgcagataagtctgtaaatcttcgatcacctgatggtggctgtctagcttttgtattgaggactggatttgagactagccaagggaaattgatgaggactatcttattttcaactgagagggttactgcaaataacaaagaaagtggcctgtttatactctttttgcttttctttgcaatcattgcgtccggttatgtgcttgtgaagggattagaggacccaacaaggagcagatataaacttttattgagctgttcgttgattattacttctgtgataccaccggaattgccaatggagctctccatagcagtcaatacatctttaattgcattggctcggcatggtattttctgcacagagccattcagaataccatttgctgggaaggttgacatatgctgctttgataagacagggactctgacatcagatgatatggaatttcaaggtattgttacatcggaaggtgatgacttaatatctgatgcaaataagctgcctctccgaactcaagaagtgctttccagttgccatgcactggtatttgttgacaacaagctggttggcgatcccctagaaaaggctgctataaagggcatagactggatctacacatctgatgagaaggccatgtccaaaaagcctggtggtcaacctgttcaaattgtgcacagataccattttgcttctcacttgaagagaatgtctgttatcgtccgtattcagcagaaattttacgctttcattaagggtgcaccagagaccatccaagagaaattagttgatttacctgctgcatatgtggagacatataagaaatacacacggcaaggttctcgggtcttggctcttgcatataaattgcttcctgagatgcctgttagtgaagttagaagtttggaaagggatcaagtagagagcgatctaacatttgctggttttgcggtcttcaattgtcctataaggagcgactctggtgctgtcctacaagaactgggacaatcttcccatgacttggtcatgatcaccggagaccaagctttgactgcctgccatgttgctagccaagtacatatatcttccaaacctgttttgattttgacacggataaagactggtggttttgagtgggtttcgccagatgaaactgatagagctccatacagtgctgtggaggttgcagtgttatcagaatctcatgacctttgtattaatggggactgttttgaaatgctacaaagtactgaggctgttctccaggttatcccttatgtgaaggttttttcacgtgttgctccagaacaaaaagaacttgtactaactacattcaaaagtgttgggagggtgacactgatgtgtggagatggaaccaatgatgttggtgcactgaagcaggcacatgtcggcgttgctcttttgaatgctgaaccagttcagaaagtggattcaaaatctaaagctgaaaataaatctgggaaattgaaaaacaagaagcctgctaatgaagcatcatcacaagtgactccggtagctaatagttctggtaaagcatccagcagcctttccttgactgctgctgagaggcagcgagaaaagctgcagaagatgttggatgaaatgaatgatgaaagtgatggtcgttcagcaccaattgttaagcttggtgatgcttctatggcttcacctttcacagcaaagcatgcatctgttacccctactcttgatatcatccgtcagggaagaagcaccctagtcactacacttcaaatgttcaagattcttgggctcaattgccttgcgacagcttacgttctcagtgtcatgtacttggatggtgtcaaactgggcgatgttcaggctacaattagtggtgtcttcactgcagccttcttcctcttcatctccaatgctcggccactccaaacgctgtctgcagagcggcctcagcctaacatattctgtgcatacgttctgctctcgattcttggccagttcgccatgcacatattcttccttatcacggctgtcaatgaagcatcaaagcatatgccagaggaatgcattgagcctgactcagacttccatccaaaccttgtgaatacggtttcgtacatggtgaacatgatgatccaggtggcaacctttgctgtaaactacatgggccacccatttaatcagagcatatccgagaacaagcccttcaagtatgcattgtatggagcggttgctttcttcacagtgatcacatcagatatgttcaggggtttgaatgactacatgaaacttgaacctttgccagagggaatgcgtggcaaattgatgttgtgggctattctaatgttttgtggttgctacggatgggagcggctcctgcgatgggtgttcccggggaagattccggcgtgggagaagcgccagaaacaggcagttgcaagcttggagaaaaaacaccactagaattcttttagttgtctgcacttctttaccctttgatgcccatttcgatacttggtagtacatactgatcatgtcttgtcatggtttcaatctaatctgtagcctaggggaattttggcagtgaaagccctaaatgatagcatagagggtcacttatcaggattgttaaattttcggttacaatatgaaagttaatattagatggcaatgcatatcgggtgatgtacaaggcaaaatacagaaactatgccaggatttccttcattcttctactcttacaatgcgcattgatcttaatgtgtacaccctatgagaaaaggaatccctgtattctgctgctttatttatttatttatttaataatagcgtaaacatccatgttggtacagcgaaatgttggttacagcgaaagtatcaagacggaggaagggcaaaaggatcaagatgaagagtaaaattttcttttctattttttgtgtaaattaaattctaaaccaaagcttaatagtgtgatgaagcgttttgtaccttaattttcatgacaaatactagcatgacaatttg

SEQ ID NO: 17440 - DNA, 1189 bp, Zea Mays
gagagggcccagaccatgagcttttcccagctcaggaagcggtgctgcacattcaaactcatattgtagaccttggcccagacatggataacattatcacaacaagactacttgtacctgcaagtgaaattgcttgctttgatggaagggaggggtcattatctgatatacagaggcagactagtgcaaacgtgcagatattacattgttggagagattaaagctgctcggaatgctctgatacaagtaacaacaaaattaaggagttttctataccgtgagatgcctgatcctattcaagttggcaatatcaatttacatggagccatttctccagtagcaggctcacctcgaggaccataccaaggaaatgatatcccaatgggtgcttatcaccaagcatcgcaactggcaacttcatggcattcaaaggatagtggaggcagtgcaagtggatcatttgagcaaggcagcaacattaatgatgatataaggcaaagtgctacaaaaagatttgccgttcctctagtgactagaagcacactagaaattgtcataccaaacagtgctgttgcaagcctcaccatgagagctggtagcaagcttgctcaaataagcgagatatctggtgctgcagtaacgctagccgaggatagatctgacatcttgcagaaagttgttcgaatatctggtacccctgagcaggctagcaaagctgagaatttgctgcagggatttatccttagcattccagatgacattccttcaggttaatcgaagatactctgcatgtcatagttgttaattcgtcaattttcttttatattttcgaggcagaatatgtcgagtcatgtgattatttgtttaattgagcagcatgttttcatgtgcggagacatgcatgccattttctttgtatctttgtagctgtgaccctaaatttcggttgtctccgaagacactctgcatgtcatagttgttaattcgtcaattttcttttatattttcgaggtagaatatgttgagtcatgtgattatttgtttaattgagcagcatgttttcatgtgtgtagacatgccattttctttgtatctttgtagctgtgaccctaaatttcggctgtctccgtttaactggccgatggggctgtaagattagcaagtgttttatagactgattggacattaa

SEQ ID NO: 17441 - DNA, 361 bp, Zea Mays
cccttaactgtctcttgtacctagaaaatcgtttgaaggtcgctaggttgtacacgccttataaagtagtagagatacatattccatagacaacgagaaaatcagtctgggatgcatttttttcttaaggattaaatatatattccaaagaaaaaacatacgtgtaaagaaaaattgttgagagcatgtggaaggaaaaacaagtactcgtggacaggggtgaatgtactaaatagctgctaaggcatcagtacagaaatctcaaaaaaatttggaccatttctcgatttgtgcgtgtcatccttgcgcaggggccatgctaatcttctctgtatcattccaattttatcggatgtctccg

SEQ ID NO: 17442 - DNA, 320 bp, Zea Mays
cacgagaaacgaggagcgaggtgagcttgatttcggccggcaaataaatgtggtccactgagaacgatgaaaagtatagctgcagcgaaactggctatcgcctgcccttgaaatgtgtacaggcacaaaatgctacaaaagaaggaaacatgagcaagcagaggaagatattggatgatgcatccacatcaggtggcacaaaatccgcatcaggtggtccaaagcattatattacttacagaagttgtgtgccgttggttggagaggagaatttatctgttcttggttttgaggagcgctcggtactgatggctgtggca

SEQ ID NO: 17443 - DNA, 2040 bp, Zea Mays
aatttgtaaagggagagaggaccaaggttgagcctggcagtcaaactgagcaaccacctccttctgcatttcttctactgagtccaggagaaatgagtggtttcagattcatgactatatcagtagcacctcgaccgacaatttcaggtaggcctcccccagcagcctctatggcagtggggcagttcttcagtcctgaggaaggggcaagttcattttctattggtacaataatccgctccagctttgctcccaaagaaatatttctgttggaggatcacccattggctctaaacttgtcattttctgcaagccttggccttctaccagtaactttatcactgaaaactgccggatgtggaataaaaaatcctggtgatcaaatggaagctgagagaaataacctttgtaaattgcggtgctttccgcctgttgccttggcatgggattctgtatctggcctgcacatcattccaaatatatactcagagactgtagtggttgattcatcacctgccttttgggattcacctgaggggactgacaaaactacagtactgattctggctgatccacactgctcatacgaagtcacttctcgtgcttcactaagtgatgcggcaagcagattctttttgttgtactcatcagagattcttggtttcatggtggccataatgttttttggaattatgcgacagacttcagcatgggaatgtgattcttctatgccatccattttgtcagccatagagtctaatcttggactcccaaaggcattcatgtttctttgcttcatgccaatacttgtattttgtgcctttttcattttcacggcggagcaaaaaccaccatttgggaccttcttattggttactctgatctgctacatagttgctaatggtttcacaattttgttgatactaagttcgaaattgcttctgtatgtggttgccattctacatgtctttactaaaagacgatggcaatcatgggggaatggtgttcaatcagcatttcttggtcaattcctcagtttctcctcgtttcagtcagtgaagattgtgcagatgcttaggaacaatccaaatataattgtagcagttgctacattaccactcgtctgtttggttcatccagccattggccttggtctgctacttctctctcatgctttccatgctcattcaaatctatgcagttttttagcagcttcttttcgtagcatcactcagaaaaaggacctgtacaagtccaagatgggcgatggttcagttctgctatccaaaagtaaatccgatgggctgcagcaacttctgccaatggatgatagcccaacagcttcaaaaagttttaccgacagccaactagaactgtttgattatcggcatggcgtcatgatcttgcatcttctaagcacactcatgtttgtgccttcacttgttgcctggctacagagaattggtatgggacaaaattttccctggttcattgattctgctatttgcgttggtgttatactgcatggactttttggatcccaaccaaatgtcagctgctgcatatttttcaagttacctggcaggagaggccgtgaaattggtctgagtttcctctacctcgtgggtggctattattcctttgtcagctccatggcgttggcaccttatagggccttgtatgccatggcgaccattggttatatatgtttcatttccagaattctcgagagaagaaatatggtaaggggtgacattaactctaggaggactcggaagcactcacacagacactgacacaccacagaaagtgtgatttctttaaaattatttgtaagagatagagaatagggttgaggaacctttcctccaacctaagttatctccttttttgtttttttccaaatcttgcttatgtgcatgtgattgtgtacggccatggttttgaaagttgttatcggatatggttatcctcggtgtgtggggtcttcataaattgcatcaagaatagcaaatttctaggtgttgagagcatcgcatt

SEQ ID NO: 17444 - DNA, 2719 bp, Zea Mays
aacaagttctgttaagcgttctcggatttatttgtgcggtctctcactgggcacaggtcaagttgcactgctgttgaattccatccatttggcgagttttttgcatctggttcgtcagatacagacctgaagatatgggacataaagaaaaaaggatacatacacacatataagggtcacagaggagcaattaaaacaatcaggtttacgcctgatggacgatgggttgtcactggtggggaagataacattgtgaaggtgtgggatttgacagctggaaagcttctacatgatttcaagttccatagtggacaaatcaactgtattgattttcaccctcaagaatttttgcttgcaacaggctctgctgataggacagtgaaattttgggatcttgaaacttttgaattgataggttcttctggacctgagggtaccggtgtacgttctatggtctttcacccagatggtaaaacccttttctgtggattagaccaaagcttaaaggtattctcttgggaaccagtaaggtgccatgatgttgttgacatgggttggagtaatttggctgaccttagtatttatgaagggaaactcttgggatgctcctaccatgagtgccgtgttggtctatgggctgctgatatatcactcattggaccctatgctcttggtgtattgcccaaagcgaatttttttgctgagcttgtgcagtctatggaagataatcctgtgaaaccagttgatagcactgcaaattctcgtcctgcttcagcaatggcacattcaagaagttcatacaaaatcaaggagtctgggattgctcaaagcagggttcgtggctcacatttgactccagcaagtacagataagaccaagaaagataggagcagcactattccacgaagacctgattcgtctttaaagtcatctgttcagagtactaccctgatgaggcgtatgaagcttgttgatagtccttccaccaacacaaaaaatgtggaacgtaatgttgggcagagagacatttcattagcgtctcgtgcagtgatggctaataattctgcaactgctaagaaaagcaatcttacagaatcagctttagtgaaagatatttacactacatctcaggctgtttcagcacctattgttgtgcccagagacattttagaggacaaaacagtaagcaatgttcgtcgagggactggagagacagctgcagtcccagatgattttcggatccctgttcacagaagaaaaccctcacttagtggcagtgctgctgatagtgatagctcatcaagatcagtgttcactgaacctgatgtttgctcagagggtttgtctagcttaaaattctcctttgggctaactccatatcacaagaaagaagaatttggcgatgtggataatgaaggtattgcacaaatagcagaaaagatggaaagaacagtgtcgctggaccattctcagcagttaaatgatgataaatcctttgaatcaccatgctcaacaacagagactgccaaggtcaaatatgttagaggagttgctgtgccactggggaaaacaaagtctcttgttgagagatgggaaaaaagagagacttctagcactgattattcaccacaaactggttcttgtggtgatcgggcatcgagaaatgacaaccatccattccatctggcggaaccaagtacaacatttgaaaaggacctgtcaactgtagatgaagcgatggctcctgtcaatttagtgcggaaccatgatgaattcctaaatgctgtaaaacttcggctgacaaaactagagatgatgcggcatgtctttgaacaaagtggtattaaaggagcaattgctgcagtggcaaagctacctgacaatgctgttcaagcagatgttgttagtgctctcaaaggaaagcttgatcttttcaacctggaatttttctcaaattttctgcctgttcttgctgggttactgtgtagcaagactgaaaggcatgctatggtctctttggaaatgttgttggatcttataaagatttttggaccagtaattcattcagcattatcagcaaatttaggcgttggagttgacattcaggctgagcagaggttgcaacgttgttcacggtgctttaaccatttgcaaaagatccaacagagtctgaatccattgattctgcggggtggtcaaacagcacaacttgcacaagaactaagtctttcattgcaagatttggtggtgatctaggcaagatgatgtacaatgtatacgacagagtagataccattggttttggcgaaaagtgcccacagttgtgtagcttgtaattttgtcatagctttgcaagtgggttttgcaactgtgttttaacattgggctggcattcagcctggtcccctgttgtaaatgtgagcctagccgtgaatgagtctgtaattagccagccacatctgctgtgtgagcagccctgaacaaaaagactagttgaaaggaaacaaccgcaaaggggatcattttggttacaccccaggtggtaggatggctcatgtagcatgcggtgattggcaattccattctttgaaagcatctgtgtttaacgtatattttgtagaagtaaattgagttatgccatagtaacgatgactgattgggctaatatgccttttgtttcttcaactgaccaagaatactaagagtcggctagttttaa

SEQ ID NO: 17445 - DNA, 2637 bp, Zea Mays
agaaacgactgttattaaccaatgtaatcagctgctctcaccatctgctgagccaaactatgtcatgacttatttgagccacagtttccctcagcatcgtcaatatctttgtgctggtgcttggatgctgatgaatggacatcttgagatcaacagtgcaaatcttgctcgcgtcttaagagagttttcacctgaggaagttacagcaaatatctatacagtggttgatgtgcttctgcatcatatccaatgcgaggtgcaaagggggcatctagcacaggatttactatccaaagcaatcacaaatctttctttttttatatggacacatgaactccttccgctggatattctattgctagctcttattgacagggatgatgatccttatgctttacgccttgtgataagtctgcttgaaaaaccagaacttcagcaaagagtcaagaatttctgtaatactcgttctccagagcattggctgaaaaatcaacatccaaaaagagctgagctccagaaagctcttggcagccatctttcatggaaggaccgctatccacccttcttcgatgacattgctgcacgtctgcttcctgttattccactgattatttataggcttattgagaatgatgcaactgacattgcagacagagttcttgcattctattcttccttgcttgccttccacccgctaagatttacatttgtacgtgatattcttgcgtatttctatggtcatcttccaatcaaactaattggtaggatcctcaacctgctgggtgttagcactaagacccccttttcagaatcttttgctaaatatttagtgtcatcaaattcttcaatatgtccaccaccagaatactttgccaacctgttgctaaacctcgttaataatgttatacctcctttaagtagcaaatcgaaatcaaacccagcagacacaacacgctcgactttcaacaaacatcatgcatcttcacaacctggtggagttggtaacaccgatggccagagggcattttatcagaatcaggatcctgggtcgtatacacagcttgttttggaaacagcagctattgagattctctcacttcctgtgcctgctgctcaaatagtgtcctctttggtccaaataatagcacatgtacaagcaatacttatacagtcaaatagtggccaaggaatgtcaggtggtttggggcaaagttctgggctgccaacttctccttcaggggctgctgaatcctcaggtcccaaccaagcgaacagtgctgcaactggcatcaatgccactaactttgtttctaggagtggttactcctgccaacaattgtctgttttgatgattcaagcatgtggtcttctgctggcacaactcccaccagaattccacatgcaactatactcagaagcagctcgagtcataaaagactgctggtggcttgctgatggttccaggcctgttaaagagcttgactctgctgttggatatgcactgttggatcctacatgggcttcccaagacaatacatcaacagccattggtaacattgttgcccttctgcattccttttttagcaatcttccacaagagtggctggaatctactcatactgtcatcaaacaccttcggccagtcaattcagttgccatgttaagaatcgccttccgcatattgggtcccttgttacctcgtctagcctttgctcgacctttgttcatgaagaccttggctttactcttcaatgttttgggtgacgtgtttggtaagaaccctcaggtctcaaatccaaatcctgtggaggcgtcagaaattgcagacataattgacttcttgcatcatgcggtgatgtatgagggccaaggcggtcctgttcagagcacgagcaaacccaagctggagatactgacattatgcgggaaagtaatagagattttgaggccagacgtgcaacatcttctctcccacctcaagattgaccccacctcttcaatctatgctgcaacgcatccaaagctcgttcaaaacccatcctaataatgttatagcttacaagtgtattctaatgatgcaagatgcttcgaaccactgcagaagtctcaacatgtgatgctgttggatgagtagaattgcagtaactgtaacatgtgattcaggggcgtattctcaagtgattcgccgttgtcagttgtatcctttagttagaatgttgtaaatgctatctgcttagtgcatattaggacataactacatagtgtaagcagtaaccatggaggttatcttgccaggctaagaattttggctgccttgcctgtgagccatgcgacatatgtatcctgtcgcattaggatgagcgacaaccgacacggtcgcatgatgcaagatttgtgccggttggccgattgtcaccgtgcagatctcttcgtaacagtgctgcacgtggaaggtttgaccgagtgactgcatcaccagttaatagtgtgaactgtatcaaattcttgatcatcttgcttattatgaaatgcctacgttgtgtcaatcactcttgcattgtatagtcgctcatcaagtgttcaaacttaattgtgggtaaaattgtttggttcttcttgcatgacattcatccaatc

SEQ ID NO: 17446 - DNA, 2464 bp, Zea Mays
agtttgggatcctgagctcggggtcgggggtcgtcgtacttgcgcgtttcgccgctgaggtttctaacaccaaggcacctgccaataaattttgcctactggcactccatatattagaagcaatatgaatccgtatttcttgggattcattctcccttttgtggcatctctgctgcttaccaagagaaagtccgagaagaagaggggggtgccagtcaatgtgggtggagagcctggctgcgccatccgtaaccacagatttgaaagacctgtcaagacgcgctgggaggggatttccacgcttgctgagctatttgagcaatcgtgcaagcagtttgcctctacacccctgtttggcaccaggaagctcattgcaagagaaatggtagtggctgctgatggaagatcctttgagaagctccatttgggaaactatgagtggagaagctatgctgatgcattcaaaactgtctgcaatttcgcttctggtctactgcggattggacacctcaaggatgagcgtgttgctatttttgctgacacacgggctgagtggcagattgcgttgcaggcatgcttcagacaaaatattgcagttgtcacaatctatgcctctttgggggagggagcgctatgtcactcactaaatgagaccgaggtaactactgttgtatgtggacgaaaagaatttaaaaagctgattgatataagtgggcaacttgacactgtgaaacatgtcatctacattgatgaggaaggcatctcagttgaagtgtccttggctgaaaactgtactagctggacagtcaagtcatttgaagaggtagagagtataggcttgcaaagacctgttgaagcaaacttgcctctcccatcagatactgcagtgattatgtatacgagtggaagcacaggaatgcctaagggagtcatgatgagccaccaaaatgtcttggctgtagtttcagctgttatgacgattgtgcctggtcttggcaagaaggatgtgtacctggcatatcttcccctagcacatatccttgaattggcagctgaggcaatcataactggtgttggggcttcaataggttacgggtcacctttgaccctgactgatacatcaaataaaataaaaaaggggacgcaaggtgatgcttctgtactgaagccaacgctaatgactgctgtacctgctatacttgatcgtgttcgtgatggtgtacgaaaaaatgtagatgcaaaaggtgggttagcgaagagattatttgatattgcctatagccgtcgtctagctgctgtcaatggaagctggttgggtgcgtggggactagagaagcttttgtgggatatgctcgtcttccgaaaggttcgtgcaatcttgggaggacggattcgctttattcttgcaggtggagcacctctgtcaggggaaacacagagatttatcaatatatgtcttggggctccaatatctcaaggatatggcttgactgaaacctgtgctggtgggacattttcagagtatgatgaaacatctgttggtcgcgttggtccccctttgccttgttcatacattaagttgatagactgggccgaaggtggatacttaacaaccgattcaccaatgcctcggggtgaaatagttattggaggtccaaatgtaactaaaggctacttcaaaaatgaagcaaaaacaaatgaggtgtacaaggttgatgaaagaggcatgcgatggttctactctggcgacattgggcgcttgcacccagatggatgtcttgaaattatcgaccgcaagaaggatatagtcaagcttcaacacggtgaatatgtttctctaggaaaggtggaggctactttgagtgtgtgctcatacgttgaccagatcatgatccatgctgaccccttccacagctactgtgtggcacttgttgtaactgcacagagtgagctgaaatcctgggcctcaaaacaaggaatgacatatagtgatttctcagatttgtgccacaagcaagggacagtcaaagaagtcctccaatctttggtgaaggctggtaagcaagcacggttggagaagtttgagatccctgccaaaatcaagctgataccggagccgtggacgccggagtcaggcctcgtcacggctgccctcaagctcaagagggaggtgatcaagaaggcatacgagatggaccttgcccagttgtacagtcagtgacctgccgctacagtttctcaacgataggggtgatcctggtagctaccggcaacaacagttttttttatttgtacctcgtactatgttcctgtctttcttttaagacaatagttgactggtaaatcagttgccgataatgtgtagccttccattgcccgcccaaagagaactataattagcccttatttatttggctattatcatattcacctcaattcaaatacgttagccattataattgaa

SEQ ID NO: 17447 - DNA, 1073 bp, Zea Mays
atcagtttacacaaaacgcaagatcgattatccggtcgcctcccgggccgggggcctttaactcgagtcgctaatccgtttccttgtatcgccccgtctccgacctcgctcgccgccatggatggttcgaaggggagcgtaggtggcggggacgggaccgggcccgaaaagccaagcgccgattcgaaccctagccttgacccgccccaacctaccgcggcggctgtcgaagccacagatgacggtgcggccgcggctgcggccgaggcggccaggcggcccttcacggccctcagccaagaggaagctgacctcgccctcgcccgcgtcctgcaggagcagggcgaacagtggaggtggagcatgaggaggatcatgcgaatgatccacaggaggcatggcaagaggtcgatccagatgaatactcttatgaggagctagtcgcattgggtgaagtagttggcacagaaaacagaggtctctctgctgatacacttggttctttaccttcagtaacatacaagctgcaacatgttcaggatggcaacacagagcaatgcgtaatttgccgtgtggaattggaggagggtgaatctttgattgcactcccctgcaagcacttataccatcctgaatgcataaaccagtggctgcaaataaataaggtatgccctatgtgcagcgcagaagtatcaacctcgggtaacaaggagccatgactgctcctccgatggctatcttgggaacttggtgggaataactagcggcatcactgcagcatctgtattgtcgaaacaaaagcagaaaaaacggtctacatacatgcaaggagatcaggatataatcctcttgtcagtctaaagttctgcccttggttccctgctaactggattgattggccttgccgcttattatctcagttccctatgaacgccttatggctgttgtatgatccataaattatgctaattatattatattgttagtcattctttttactgatcgcatgatcatcttatatatttgcttgtcaactgattttagtttttttcttcttaattctaatcccttcg

SEQ ID NO: 17448 - DNA, 2552 bp, Zea Mays
atcgacaccttgaagcgtgctagggtttcccccgtcttatcgcttcctcgttcccgcagccgccgcccaaaccctagcaaacccgtcctccgccatggccgacgaccactactcgtccaagcggaagtacgacgacccctcgccgccgccgcggcgcacggggttctcttctggcccgccgcctgcctcgccgcccgctggcggcgccccgtcgtacaacagcgttgcgccgccccccgatgagatccagctcgcgaagcagcgtgcgcaggagatcgcggcgcggatctttaacgccgcagaggccaagcgccctcgcgtcgacaacggcgacgatgacgtcggcggcttcggtggaggaagttccctgggtggcagcggtggtggtggtggtggccgcatcgggggcgcaggacttggcttctcgtcctctgccggtggtgagcagtgcaccacagtactcatatggtggacatcagggtacaagcaaaaagattgaaattccaaatggaagggttggtgttattattggaaaagctggggaaactattaggtatatccaacttcaatcaggagcaaagattcaagttacgagagaccatgaagctgaacctggtgcactgacaaggcaagttgagctttctggcaatcctgagcagataagcaaagctgaacagttgatcaaagaagttatagcagaggctgatgctgggtcatccggtgctgtatctggtggccggaaatacaatgcaccacagccaggcgctgagacattccagatgaaaattgctaataataaggtgggattgattattgggaagggtggtgagaccataaagtctatgcaggccaaatctggagcccgcattcaggttattcctttgcatctgcctgctggtgatacttcaactgaaagaactgtgcatattgatggcactcaagaacaaattgaacatgcaaagcagctggtggctgaggttaccagtgagaatcgtgccaggaatccaatgtctggtggctattctcagcagggctatcaccctcctcgtcctcagtcaaactggggcccgccttctgcgccaccccagcagtctggttatggttatatgcagcctggggcttatcctggggcaccgccacagtatggtgcacctcagcaaccttatggtagctatcccccaacatctggtggctatcagactgggtgggatcagtctcaaaaccagcaatctcatacaactccccctggtactgggtatgattattatagccagcagcagcaacctcaacaacaacaatctgcccctgggactgctgcttctactgatgccactagctacaattatggccagccttcaacatatgcttcacaaggatatgattctacctatactcagcatagtggtgggcagcaagcatatggacatgatggctactctggttaccagacccaaggccagcagcagggctactctcagcagactggttatgaccagcagggatatggtgcatctgcttatggatcagctgcgaactcgacccaggatgggtccagctatggtggtcctggtggggccacccaggcatctccggggcagcaaacttcaaccccagctgctggaagccaccctggctatgccagtcaaccgcctactagtgctgcagcaagctatccagttcaaggttcagctccatctggatatggtgctccaccaccccagcctggctatggcacccaacctccacagcaaggtggatatggtccgggcgcttatgggcagccttctccacacggcgagaaacctcctgcatcttcaccttatggacaagctccgcctcctggatctgctcagggtggttatgtgcagtatggttacagccaacctgcatacggtgcaccaccagcttaccctggtgcacccactgcaagccacccgggctatggccaacagcagtcttatggcgatgcttatggtagtggaagctatgggcagcctacagcctacactactgaagcagcagctcctgctgcatcccaggatcactctgccgcacctgccgcggcccctggaacaacagctgcgccagctcctgacaacaatgggggtgccaaaacttctgcggaaacttgatcttcaacagctaattgggaacaaactttttacaagcctctgttgtgtcgtttcctccactgttgcttaatattacacatctagtttaggctccacatctacaggttatatctttctgcctgttgttttgaccccatgaatcgctctttccgtgctgttgattagtactttgttgtttttttattgctggttagatgtttggactggtgatatatgtgtttgtgcggttactcttgttggactctaatgggtacctaccggcttggtctggacatatactgtcctatatttgtttttagcctccttttacattggttattatgtgtgctgtacaactgtcggacgtttccataagctggtgatagttatggatgaaaatttggtttcaatattgtctaagatgatcataaaaggtttaag

SEQ ID NO: 17449 - DNA, 623 bp, Zea Mays
agaatatagagactagtgcatttcgtcgcgtcacacgtactgtactgtgctgtacgtaccgtggtgatcctgttggtcgctcctgcggagcgcctccatgatgcagagggagccgtcggacttcagcggcatggacgccagctgcggcgtgtagtacggcgacgcgctggcggccaccacgccgtcgccgccaccgaggccgtatgccgcggtgacggaagggaagaagaggccattatggtgctggtgctggtgctggtgttcgtccatggcggaagccatgtgaggcgacagcgagaagcctagccagccgctcgccgacgcggggttcgtgccgttgccattgttttcgttggtcatcgtgtgaaccaagctaaaacacaaaactacctaagcgacagcaagctagtaacacaacctgcttgcgcggcaatggcgatcggtcgtcggagtggagcagcaatcattggggagcgcacggtgcggtggccattgccgcgaggagatgaggggtgtgaagcgcgcggcggcggaggaggaggaggaggaggaggaggtgggcaagggcaagtcttcttctgcgcttgcgttgtgtacgcgcgcgcgtggctttaaagcgggac

SEQ ID NO: 17450 - DNA, 1266 bp, Zea Mays
cacgggacgtcttggttcgcgcgatggtctccctcagcgtgctcatggagaccatcgcgcgcaccaagacgtcccgcgccgaggcggacgccgactcggacatgtcgcccgaggcgcacgaattcaagcagatcgtcgacgagatcgtgccgcacctcggcacggccaacctgtgggactacctgccggtgctgcggtggctcgacgtgttcggcgtgaggaacaagatcacggccgctgtgggcaggagggacgcgttcctgcggcggctcatcgacgcggagcggcggaggctggacgacggcggcggcgacagcgacagcgacaagaagagcatgatagccgtgctgctctcgttgcagaagtcagagccggaggtgtacacggataccatgatcatggcactttgcgggaacttatttggcgccggaacggagaccacgtcgaccacgacagaatgggccatgtcgctcctcctgaaccacccggaggcgctgaagaaggcacaggcagagatcgacgcagtcgtgggcacctcccgcctactcgccgcagaggacgtgccccgactcggctacctgcaccgcgtcatcagcgagaccctgcgcatgtacccggccgccccgctgctcctgccgcacgagtcgtcggcggactgcaaggtcggcggctacgacgtggcccgcggcacgctgctcatcgtgaacgcgtacgccatccacagggacccgctggtgtgggaggacccggacgagttcaggccggagcggttcgaggacggcaaggccgaggggcggctcctgatgccgttcgggatggggcggcgcaagtgccctggggagaccctcgcgctgcggaccatcagcctggtgctcggcacgctgatccagtgcttcgactgggaccgagtcgacggcctcgagatcgacatggccgcgggcggcgggctcactctgcccagggccgtcccgttggaggccacgtgcaagcctcgtgcagctgtgcgccatcttcttctggagctctgaatctgatgctgtagtaacatcttggcatgcatatgatccctagtatgctttgcctgatggtgtgtgctaaactaaataagcttgagtgcgtaataccctcgtgcgtgttatcttctgtaaaatgtgttgtacagtcgtttgcgtgaacaatcaatcagtagttggttcacagtatggtttatagcaaattgtggtcttctgcaggttgtcctgtatactgttttttttttttttgaca

SEQ ID NO: 17451 - DNA, 744 bp, Zea Mays
gacaaggcagccgccgccgtccccattaacatcaccgagacctatcgccgcagaaccaccgaatccacggcatcggagagtgtagaggttagtactaggcggaggtcaagatggtgtgcatccggcaggcgactatcgacgacctgctggcgatgcaggcgtgcaacttgatgtgcctgccggagaactaccagatgaagtactacctctaccacatgctgtcttggccgcagctcctcttcgtcgccgaggactacggcggccgcatcgtcggctacgtgctcgccaagatggaggaggacccctccgagccctgccacggccacatcacctccctcgcggtgctccgctcccaccgcaagctcgggctcgccaccaagctcatgtccgccgcgcaggcagccatggaccaggtcttcggcgccgagtacgtctccctccacgtccgccgatccaaccgcgccgccttcaacctctacacctccactctcgggtaccagatccacgacatcgaggccaagtactacgccgatggagaggacgcgttcgacatgcgcaagcctctccggcagccgcaacctaagaagcaccaccatcaccaccaccacggccccggtgggtgctgctcccacgacgcacctacggcgacgactggttcttctcctcagtcttttagttcgccggataagaaggctaacacttgacggatgagttgttcgttgttctcaaactgtgattttggtt

SEQ ID NO: 17452 - DNA, 992 bp, Zea Mays
ggctaaatcaccatcatgagtgctcaaggagaggattgagcgcgtcaaagctaagaagaatgacgcttttacatccaggagtgaatttaccgaagaaatgttagagatacgactagtgaagatactgaagaagtatgacaagagaacaggtggcgtgcttagcctgcctttcactcagcgtgttcgtcaccagccatttttcacaaccgaacctttaacaaggcttgtccgagaatgcgaggctaacctcgaactacttttcccggtcgaagcagaggttcttgagcctagttcatcctcgaatctagaaccgcacgatgtggctaggtgtgacccgacatcgtcccgcgatgtggaaaccgtcgatgtttaccgaagcacactcgcagctatgaaggcgatacagggccttcggagagccagctctacttacaaccccctgtctctgtctaggttcttccacggcgaggatggcgaaccctgctcgggtgccatcacttctgagagctcactgtcagattcctcaacggactcccagattcaggatgctgggaaggatgataaggaggtgcaatcaaattcgagggaccagaatgctgcccaaggggaacagaatgcacaaggcgagccgactgatgaataaacagtttttttcccacacgctgttcaataagacaataaccattgataagtgtaaatgctaataatcttgctggttaaccctcttttgaagtgacacatatgcaatgactccctggtggcgcagtttcatttttcttctttttccttaattaatgggtaaagagtatatgggatgttggatttatcatgttcctatcgtgttgacagcatgccagttgccagaagtttgacacttgataagagctatgatcgtaatcagcatgttggatctattatgtttttgttgtgttgacactacagggaccaccatgtcagtacttcataagcgccatgtaagttttgacggttac

SEQ ID NO: 17453 - DNA, 2556 bp, Zea Mays
aaagaatacagaggggttttggtcagcaactgtgcaatgtggtggagttgatatacttataaagctggttagttctggacaaacaaatacccttgcaaatgcttgctatctccttgggtctttgatgatggaagactcttctgtttgttctaaagttttatctggagaaacaactaagcagctcttaaagttacttggtcctggcaatgaaacttctattagagctgaggctgctggggctctcaagttcctttctgcacagagtaaagaggccagacgtcagatagctaattctaatggtattcctgctcttataaatgcgactattgctccatcaaaagaattcatgcaaggtgaatctgctcaatcattgcaagagaatgcaatgtgtgcattagcaaatatatctggcggtttgtcctatgtaatctcaagccttggtgagagtctcgagtcatgttcttcgcctgcacagattgcagatactcttggtgcattggcctcagccttgatgatatatgacacaaatgcggaatctatcagtgcttctgatcctgttgacattgagaagacactgttgaagcagtttaagcctaaggttcctttccttgtgcaggagcgcataattgaagctttggctagcttgtatagtaacccggttctctgcaagacactagcagattctgatgcaaaacgcttgcttgttggtttaataaccatggcagctactgaggtgcaagatgacctcacaaaatcactgtttgctctctgcaaaaaggattgtgacctatggcaagctctgcaaggccgtgaaggtgtccagctattgatttctttacttggtctttcatcagaacagcagcaggaatgtgctgttgctctgcttgcgcttctttcaaaggagaatgatgagagcaaatgggctatcactgctgctggtggcatacccccacttgttcaaattttggaaactggatctcccaaagccaaagaagattcagcaaccatccttggcaatttatgcaatcacagtgaagacataagagcatgtgttgaaagtgctgatgctgttcctgctttactatggcttctgaaaaatggaagtgataatgggaaggagatagcttctaaaacactgaatcatctcatccacaaatcagatacaggaactattagtcagctgtctgctctcttaacaagtgaacagcctgagtcaaaagtttatgttctggatgctttgaaaagcttgctttctgttgcaccacttgatgatattctacatgagggaagtgcagcaaatgatgcggttgagacaatgattaaaattctaagctcacccaaggaagagactcaggctacatcagcaactgctcttgctggtctatttcattgccgcaaggacctgcgagaaactcatattgcagtgaagacactctggtcgctcatgaagctgcttcatatgcagtctaacaaaatactaatgggggcctcatgttgccttgctgccatttttctttcaattaagcaaaataaggaggttgctgcaattgcccgggatgccttaaccccacttgtctcacttgcaaattcttcagttattgaagtggcagaacaagcgactagagctttggcaaatcttttccttgatcaggaattatccctccaggtgtcttttgaagaaaatctcttccgtgtaacacgtgtgctaagagagggaactattgatggaagaactcatgcagctgcagcaatagctcgtcttttacagtgccgaactgttaatcagccactttcagatactattaaccgctctgggtctgtccttgctctagctgagctcttggaagttgccaacggtgaagctgctgcaacatcagaagttcttgatgcactggtgctgttatcgcgatcaaaggcatcaagtgggcacaccaaggctccctgggcaattcttgcagaaaaccctcacacgatacttccccttgtttcatgtattgctgatgctgcagcctccttacaagataaagccatagaagttgtgtcaaggctctgttccgaccaacatgatgttattggtggtctggtttctgaaactccaggttgcatatcatccattgcatggcgcatcattggctccaacacgcttaaagttaaagttggtggatgtgctcttctcgtctgtgctgcaaaagagcattgtcagaagcaaatagaggttctgaatgatgcaagtctgtatattcaactaatccattctctaattgatatgatccatatggcaaacacgcctgctgaaaatgtcagcagtgaaagcatatcagatattagaatttccagacactccaaagaaaactacagtgatggtgaaactgtgtgccgtactgctgtaatctcaggcaacatgattccactatggctacttgctgtcttttctcgtcatgacagcaaaacaagagcagaactcctagaagctggagcagttgaaatgctcactgagaagatttcacaaaatgcattccaatatgtccaggcctgttactgatgacttaacgtatg

SEQ ID NO: 17454 - DNA, 1381 bp, Zea Mays
gaacaagtcatcaatatccgcgaaagcagcccgtggaaatggaaaggaatgctacagaaccaatcaacaagccaagccaactgaccccttccgtcccggtgaagtgccaaacgcgtgattccattcgggaggcagggttgagcatcattggagtggaagaaaggaatcatgttcaggagaaagcatgcttctcattccaactcaagtgatgctgagcagcaagaagcaaagataaatgaattaaaatctgcacttggtcctttgtctgcccatggcgagaagtactgcagtgacacatgtttcagaagatatcttgaagcccggaactggaatgtcactaagtcgagaaaaatgcttgaagaaagtctcaaatggagggcaacttataagccagaggatattcgctggcctgatgtttctgttgaagcggaaacgggaaaaatgtacaaggcaaattttcgagatagagaggggagaactgtaatcattatgaggcctacaaaggagaattcaacgtcccatgacggtcagattcggtttcttgtgtatgttttggagaatgcgatcctggaccaacgtgaaggtcaagagaaaatggtatggctgatagacttcacgggatggacaatggcccatgccacacccataaagactgcaagagaatgtacaagcatcctgcaaaatcattaccctgagaggctggccattgcatttctgttgaatcccccaaaagtattcgaagccttttacagggctgttaaatatttccttgacccaagatcgatcgagaaactgaacttcgtgtacctgaaggatgaggagagcatgaaggtcctgtacaagtgcattgatcccgtggtccttcctgtggagttcgggggaaagaacagtgttgtgtacaaccatgaggactactccaagttgatgctgcaagaagatatcgaaacatcaagcttctgggaggatgatgcgaaaactgttaaccatgctatcaatgggaccttggttcctgatgttgcatctcagctgtcacggattgctgctaaagccagttaatgagctactacgatgggagctattcagaatgctttaatggagtaactagaaagtcgagcgccaataaaatgttcatagtaaacagaaatagagcaaataacagatgagatatcacttgtccatagtcgaaatagttgcacttatcgaacactttattcagtacacgatgagttacaggagactatcgtaatgatgtaagaggtagaagtgctacctgcttaatgtacctcaaaagcccttaaggctttacttgttttagccgtggctacggagaagctaattctgggttatggcttttaaaatgctggttctatatttggatttg

SEQ ID NO: 17455 - DNA, 1281 bp, Zea Mays
ccaaccaaatctcgccttttctacgcggttttcttaacgtcctcaacacgctcttcaccagtctgaattctcctgggcagctcacaggttggcaggcgaatgggggtgatccttgtggccagtcatggaagggcattacttgctcaggatcaggggtcactaaaatccaattaccaaacttgtcactcactggaaatttggcctacaacatgaataacttgggttcattagttgagcttgacatgagccaaaataaccttggcggtggaggtcaaatacagtacaatcttcccaatatgaagcttgagaaactcaatcttgcaggaaatcaatttggtggaaatttaccctactcaatttcgacgatgcctaatcttaagtatttaaaccttaatcataaccaactacaaggaaacatcagtgatgtattttccaacctttacagtttgtcagaactggatctgtcctttaattcccttactggtgatctaccacaaagtttcactggattgtcaagcctgaaaaaagtgtatttgcagaacaaccaatttactggtaatatcaatgtcttagccaatctcccccttgaaactttgaatgttgcgaacaaccatttcactggttggattcctagtcagcttaagaagataaacagtctacagactgatggaaattcttggagcacaggaccagcgccacctccacctccatacacagcgccgcctcctcctccaaaccattggaatgctgatggttcatcaagttcatcaagttctggtggaagatctgggataggtggtggaggtgtagcaggaatcattatatcgttgctggttgttggatcagttgttgcatttcttgtgatcaaaagaagaaaacgcaaagctgctatgaaagaacattttgaacagcaccagccattcacttccttcccttcaaatgaagttaaagacatgaagcctgtctacgaggccaccacagtagacatagagtctttggcttcacctgcttcagttaatctgaaaccacctccgaagatagaacgaaacaaatcatttgatgatgacgatgatttttcaaacaagcttgttgcaaagaaaagtaatataacacctataaatgcaactgtttattcagttgcagatctacagatggcaacagatagctttagcttcgacaaccttgttggagagggtacttttggacgtgtttacagggcacaattcaatgatggaaagctgcagcactgttctttagcttggcatcgtcagcttcttcttg

SEQ ID NO: 17456 - DNA, 85 bp, Zea Mays
cgccacctgcccccatagggtcaacctcctcatcctacacatgagcctcctgctcaccctcctcaccctgcacatgagcatccta

SEQ ID NO: 17457 - DNA, 1386 bp, Zea Mays
ctctcactcactctctccctcgttccctcctcgtcgttctcccgtgtccgccgtgcactgtctgtctctggtggcggcgactgggcggcctccgccgctgccctacgccaggatcccaggctgcatcttccgtacgccaggaggagggcatcgccgcaggttgagtgggaggcggagatgagccgggggcggtcgccggagccgctggatttcttcatctggactgtgcaggatgtagggttatggttggaggaaataaatcttggaagctaccgccaggcttttgaagaaaatggtgtcaatggagagtatctagaaagcctgtcggtgttcaccactgagcagattctccgctttataagacgatgccatatgaaatggggagattttatcaccctctgtaaagagctgagacgcatcaaagttgcctgcttgaaaggggagcaggaggtccgcaggccgtggtgggcgccgtcatgcctgtcggtcgtgttcacgcgggtggccaggcacaaccggcagtcccgggtcgtctccttgaagctggaagcttagcaagttagcaggctcgccctcagccagtggaactggcagagtcgtctccagatgctggaagcttagtagcaggctcgccgtcagccagcttgcctcgcgctttggcgcgccgccgccatccccgtcgttccagtgccctagggcacacaaggggcgcctctctctgtgtaccatatagcaagcaatgtgtctcagtgttcttgaaaggtgctctcgcgttacagtcgtcgtgtgttgccaggcatgcgtgtgtttttcgttgatttgtttattttcttcacgtatagctaggggttgtgggtttgagttcgagatggtaagatgttgtaatgtagacgatgaatatacgtatgctttgcgtgttgtgcagatggctgctgtttaaaatggccccctttttgcttagctacgagagaaaagagatggcattgctgggaacagcagagcgtggattaaggatcatgaaggatcgtgatgctgatgaaggtctattgctttgattgggcacaaggttgtggttctacaagataaagatcatgatagattgtgatgcagatgccggccttagtaaaaagttcctgctagtttcagctgctggtattgcttatctagtgaacaaattatggtcccgtttacatctcatggtctaaggccatgtttgtttagcctttagattatataatctagcttaataagttgaacaccggaggatgtgtttggttggacggacaagtagagatagaaggggcggccatatttattttataatgcttgaatgagagtcacgcgaggtgagatgaatatcagatcaatttttttatatagaactgt

SEQ ID NO: 17458 - DNA, 2817 bp, Zea Mays
gagagagtgagtgcctggatgtggggaagagggagaaataaataaacccgaattcagccaaacctctctctcccacctcctgtcaccaccaccacacccctcctcctcccctgtctttctccctctccctcttgacaaaatttcctccacccattctcttcctcctcttcttccccaccgactccaccgatccacctctttctatctgaatttcctctcgtcttgcccaccgctccatctgtctgttgcctctctctctcgcaaccaatcggttcttgtttcctccgtctgctgggttgattctctctctcttcctctccgtggagaggagaggatcgagaaacaggagacaggaaagaagagaaatcagaacggagcctgttcttttgcctggattgcggttctcgcgagttgttcagaaactctgggccagtttctggtcctttaaaatactggaacgaggaaccatcagagatgctaaggcaacagaccaattgatgttatctcgctaccctagtttggatcatcacaatgcaaggacagaggaattctgtggagcattttgctgatgtttttggattcgacattgcatctagttcaggcaaccctgtgatggatcagcagtcatattggaacaatgttcttggatcagtagaatcgcagaatcttcaaggttatcagatgaatcacagtgatgctgccatgccatatgggaatgagacacagcaagatggtacatttcttggtttctgggaatcaggcgaagcaagtgcaagtggcagctctaacaatgccaaaacagagcatcttagtattggcggtggtctgaggattggtgaaaggcgactggtagctgacaatggcatttctctggatgtggatatcaaccttaacgccaacgttaacgatctatgtggtcaaagttcaaatgttaactgtacatctcagggccctgagcactatggtggcggtgatcgtagtgttgtaaattctcagccaactgacctgagattacacccatacaggactttcctactagatgcagagcaagcagattcttttactttgaaccctagtgaaaaccctttgtgtgatttttcactgatgcaagaaagcattgaccaaagacccggtagttccctggatggacgccggctagcctgcaagagaaaaaatgttgaaggacccaatggccagagttcagcaggtgctagcactagtttttcccacaggaacgacaatgctttccataacattgcttcttcaagttacaatcctgcacctatcagaaatccgtcctcacccaattgcttgccggttccaagttctatcgatgatcaactcccacgatatggaactaatgcagggctctcagccggtacctatgaccttaatggaggggtcaacaatgctgggaattcgcagagaagtttccgggcaagaattactacgtctcaacagattgctccctgtagtgtatggccctcttcaaatgctatcagacttcctaattcatggaatcatcagccacctcattttcaaagtgcatttgatgatacccaggaggttattcctgtggtcagcagcctcaacttgcaataccagcatccagtgaatgtttctagtgtgccaccggctgcaaaccgtttcactggccatggagcttcatcatcgagagctggcagtttggagaacagaattcttggtagtcaagaggctcctacaaggaatgtggtgcctgccaactactctgatttagttcccccgtctgtagtagacccgagacgtttgctgccagaaccatctaattggagttctgatgtccgaggcactgcaatatcaggaagtattcctcctgtatcaagagctaataacagtgcaactgttaatccgccagcaggattcagtcaccaaaacctcacccggcgccatcctcgaaatttatcagaggagattggtcggctatctggagcacttcgcggccatcaacccccacgcttaaggccggggtttctgttggagcgccagggcgatggtgtttggggtgttcctttatcaacaaggggtagagaaggaagaaggttaatggagattcggaatgcacttgaaatgatccatagaggggagaatgtaaggcttgagtctatcttctatggcggtgttgacattcacgatagacacagggacatgcgccttgacattgacaatatgtcctatgaggagctattagcactcgaggaaagaataggaaatgtcggcactggcctcagcgaggaagctgtgataaggttgctcaaacaaaggaaattttcatcttggacactaaaagcatctttggaccctgaaccatgttgtatctgccaggaggagtacgctgatggagacgacctcgggaagctggactgcgggcacgacttccacgctggctgcatcaagcaatggctggtggtgaagaacgtgtgccccatctgcaagagcaccgcattgaagaagacctgaaacccgaacaaaggctcgtgtcagagacatcccccatgtttctatgttcactcgatggttcgcgagatcatttgccgattcgtattgctacgcttttttttttttggtcgggaaaattttgccagccaccttttggttaatgtctttcctgcttgatgtagtgaatttggactatgcctgatagttgtccttgacctgaatcaggttggtgtgtgggtgtttcatgtttggttgctgtgatagctggtacgaacaatgtatttctgttatgcaagtaatagaaatgaagtttctccggtcaaaaaaaaaaggtggagg

SEQ ID NO: 17459 - DNA, 1317 bp, Zea Mays
cttccttccgctccctcgtcacgccggccggcccatgcttcagtctctgcgactcgtcgcgtcagccgtgaagcggcggcgcggcgcggtcgtggtggcagcggacgcggcggcggcggccgggagcgcggagttcggcgacgaggagaacccgtatgagcttctgggcatcaggccgcttgatagcttcgatcacatgaaaatggcctacaagaagaagcgcaaggacgccgaggagactggagacgacgagttccttgccaagttggacagggcctatgacactgtcatgatgcagcagctgcagtatcggaagaagggagtcacatacgggtctgttcaggtgtccaaggatatcaagtatgctgacaatcaaccagtggtgccttggggaccaagattctcccgatcaacaatgaaggacatgcgcataaatatggcagtatcagcagcatttgttgtttggatagctattatgggcaatgcagactggaagcctttgcagttcctttgttttgctttcttctacagaatactacagaagctaagagctactgaaccaccaattactccaatatacaatgaatatggcgaggtcgaaggacgagggataagaatggcaaaaagagtagtccgtgctttgggtttgatatttggatgtgtgttcgctgcatccctgcagctattaacttgatcgagctttcaatgcagtacactccccgccttgtttattactaccaggagctgattgttacggcggctacctccgttcttctgtgcatcacagcctcatactaccgatgaacacgacgacgagcagtgatggcctggctgaggcgattgtgagatagccgagaatccacaaattttgtagcatacttccaccagcacctgtcagctttgaggcagagagttcttagtgcaggatcatacatgaccacttgtggcacaatgcagatgaccaatggatgaaaaacatttggcgtgaatacttcaacagcagtgttgtgtgtgtgcaatttttaattaggtcttggacatgttagacaacagggttagctgcaatgtgcatgtgctttgttttgcctcgatcaacgaatgaatgaaagtactagctgctgcttctttgttaagctgcctctccgcatcggagctcccatttgtcggacacacaatgctgctcccatttctatacgaacctgctgctatgcaatgtgaactttaaactcgtgtctatgatctggtgtgttcctctttatttgttttttaagtgtgctgataggacatttgtgaagcttgtgcataaactaatgtgtg

SEQ ID NO: 17460 - DNA, 2351 bp, Zea Mays
gacgaaaccgagccgcggacggagaggagcccggaccagtgacctccgtccaccgcagaaaaaacacgaggacctcgcgcctccgcccgcagccacagtccagcagctccaggcccgcctgagtacctgaccagagagagctatatctacttcgcccgcgcccgcggatcccctcgcctcgcgatcgccaccacagaccacaccaacaatcccctcccttctccccggggccgggcttgtcttcttcctcccgattcgttttctttttcttttcttccgctgctgcaaaatctcgcgctggcgcggcccgaggccagaggactccgatccttatccctcacgcatctcccgcctcgcctccgccacacgttccgcgcctctacagctctcgacctcgtctggatttttttccccgacccgattttcgcatcagctccttctgcccaccgggctcgtctcctcccctggtttctttttcgtcacttgtcaccgctagttcctttagagaaggtgtacccccattattccattagcggcctcactgacgagagagattttggcgtgactatccagagtctccaatcttttacacccaaaactcttctcagctaccggtgcggcatatcgcccctgtcggcggcgaacatttgagttctcgcgacgtgtctcgaggattctgtggtggaagatcggatcttttgctgcggattccagttgccaaccaagatgtcggctctcctcgatctactgatggggatctttcgccagcagaccctcggcggcgccgccctggagctcgccgcgctggcggcgccgctctcgctcgccgcgctcgtcggccttctcatcgggtgggcgtggcgcccgaggtgggcgggggtcgtcacggtcgacaacgcccaacagatggcgcagctccccgcggcggcgcctcctccggaccgcgccaccgccaccgcggtggtctctcgcaacgaggcggccgccgtcgtaccgagaactgtggtggctcatgcggcggccgaggacgagcagcagcagctggcggtcaacaccggtgacttgctgcacctctggcggctcgtcgacgagaaggacggtggcccgtcgtggattcacatgatggaccgcaccttaccaaccatgaggtaccaagcctggcggagagacccaccgagtggtccaccacagtaccgcagcagcacaatcttcgaggacgcgtcaccggaggttgtgagagatttcttctgggacgatgagttccggatgaagaacagctgggacgacatgcttcttcagcacgagacgctggaggagtgcaccgagactggaaccatggtggtccggtgggtcaggaagttcccgttcttctgcagcgacagggagtacatcataggccgcaggatatgggcgtctgggaagacattttactgtgtgaccaagggtgttcctcgtccctccgttccaagacaaaacaaacctcgccgtgtggacttgtactactctagctggtgcatccgtccagttgagtcgagaaaaggcgacggtgcaatgagtgcatgcgaggtgctcttgttccaccacgaagacatggggattccatgggagatcgcgaagcttggcgtccggcaggggatgtggggctgcgtcaagaggatagagcctggccttcgggcgtaccaggtcgggaggaccgccggagaggctgtttccaagtgtgctgccatggcacaggtcaccaccaggttcagtgccgacgagctcgtcatcgcagggccgggcaacacggaggccagttcttcttcgtccggcgacggcgcagaggttggcaaggtgacgaagcactgggcgaacagcatacccaaggttctcatggtcggtggcgctgtggccctggcctgctgcaccttcgacggtgggttgttgaccaaggccgtcatcttcggcactgccaggaggtttgcaggagggccaggaaggcggtaggtacggtgtaacggtggacggaaagatccagcggcacaacacaaaacaagtgttgctgcactgcagcccgctgcgggttaataggttagaaatatagcatttgttacgaggacacatatagaagtattatggaagaaaaccgctgttagataagaaatacactgctgtgtattagtagttaataacaagaattcttggtttttgtatgtaaccatattgtggatcggatccattgttcttccccatggacactactactaccagatcgatgttgaccttgtggcagttgctgcagtttttttttgacagagtgtgcttagaataagaaaatttttctccaaagtaggcaaagatttgaacgtatt

SEQ ID NO: 17461 - DNA, 963 bp, Zea Mays
ccttcgcccctcggttccgccggcgcgcgaggggattcgagctgggtcttgggtagcctctcaccgtctcacgatgccgccagcacccaagtccggcgacgccctcttcgccagcgtggatcgcgtcaatgcggagctgttcacgctcacgtacggcgccatcgtgcggcagttgctcacggatctggaggaggtcgaggaggtcaacaagcagctcgatcagatgggttacaacattggaacacgattggttgatgagttcttagcaaagtcaaatgtatcaagcttggcttcaaaatgttcttgggcgtgactgcaaccgtgaccaattgggatgctgagggtacaagttgcagccttgtcctggaagacaaccctcttgttgatttcgttgagctccctgacacttgccaaggccttcagtattgcaatttgttaagtggagttattaggggggcattggaaatggtgtctatgaaggcggaggtgacatgggtgcgtgacatgcttcgcggggacgatgcctatgagatgcgggtgaagcttatcaagcaagtcccggaggaatacccctacaaggatgatgactagttctactttagtgcaagattgcttgtttggattttgacatcgttttcgtcgatggtccgtagttctgctataacctgatatcatacgaggaaagctgcgtctgttttgcttgtgtattgtagaaatcatacataatctttcctgagttgcggctttgaattagtctgctggattcagggcgttcgctatgcaaattggtgttatctagaaataaagtattttcgatcttatcagtttgccctcatttcatgcaaagttatcgcctgctttgcctcccatttcctggagagctttagtttgttatttcccatgtttgtgaaataatacgtttctttgatgaaaacatttaaaatgaaacttgtttcagctaag

SEQ ID NO: 17462 - DNA, 745 bp, Zea Mays
gctctcgttcacagtgcaagcgaggcttaattggtagtaggctgctcttgttgcgccggcagcggcaggcggcagcgcaaaacattaaaccatcatttgcggcggcggctgctgccggcgacgcgatgtccaagcaaaagtccgtgatcaggctgggcgtaccgaacgacaagaaccggtctaaggccatgcagatggcatccaagttcgtgggagtgaactcggtggggatcgccggcgacgccaaggaccggctggaggtggtgggggagagcgtcgacatcacctgcatgatcaacctgctgcgcaagaaggtctgccgcgccgacatcgtcgtggtggaggaggtcaaggacaagaagaaggaggaggaggagaagaagaagaaggaggaggaagagaaaaagaagaaggcggaggaggaagccaagaagaagaaggaggaggaagagctcaagaagaagctctgtccgtacctgtacccgccgccgccgtgctccggtgcctgttgccgcgggccgtcgccgccgatgtttctgtgcgagccggaacagccagcgggatgccacatcatgtgacgatgaagtgaagctccgtgaataatcgtcccgtccgaacttgtgcacatgcgtggttgtggttttgctttggcatctgaattacaatcctaagtgatcatggaatttagatcactacttatatataaagtattgttttgtgagtttgtttttaagttaaaataaaa

SEQ ID NO: 17463 - DNA, 1697 bp, Zea Mays
gcataaggcatgataccttctgtgaggatctctcctggctatgcagccttctctggctccagcctacgcttaaaattacattcaattccatccatctctagtctcaaaccctccaaatatgtggtctcctcgctgaaaccactctacctagcaccgctagatggtccacacacttctgagcttaagtcttggagacaaccacttgagttccgttgtgctgcttctgctgccgatgacaaggagtcaaagactcaggtggtgccagttcagttggaaggcgcacagaggttaaagatctccatctatttcgcgacctggtgggcgcttaatgtgatatttaacatttacaacaagaaggttctcaatgctttcccttacccctggctcacctccacactctcccttgcctgcggctctgcgatgatgcttttctcgtgggccactcgtcttgttgaggcccccaagaccgacctagacttctggaaagttcttttcccggttgctgtggcacatacaattggccatgttgctgcgacagtgagcatgtctaaggtggcagtgtcattcacacacataattaaaagtgcagaacctgcattcactgttttggtgtcaaagttcctccttggggagacgtttccagttccagtctatctttctcttcttccaatcattggtggttgtgctctagctgctgtcacagagctgaactttaatatggttggatttatgggtgctatgatatccaaccttgcatttgttttccgcaacatcttctcgaagaggggcatgaaggggaagttcgtcagtggcatgaattactatgcttgcctgtcaataatgtcgctggtcatactgactccatttgctatagctatggaaggtcctcagatgtgggctgctggttggcaaaaggctgttgcagaagttggacccaatgttgtctggtggatcgctgcacagagcgtgttctatcacttatataaccaggtgtcctacatgtctctcgatcagatctctccattgacgtttagcattggcaatacaatgaaacgtatatcagtgattgtttcatctataattatcttccacacgcctgtccgccctgtcaatgcactgggagctgccattgccatccttggcacattcctgtactctcaggcaaaggcgtgaggctaaagctttggccaaaggatcggagccagtagcaggcactggatccagttttgcttgttggagtggcatgtagatataaggccgtgacatgaaccgtcgtcaagtgtacctgaataacaccgtaacgaaattcaccgatgctgtttctttatgggtatgtaatccaaaccggaatcctggtttcaatagaaatagtttctgctatcagaagttattagtcgttgtgcattccagtattttagcagagctaagctgcgagccatgaccatgaccatgagcgcttgaacctccctacctttctggcgtttgagcatcatcagaagttagcttgaacaagcaagagtgaagatttcgaaggcttgaagaatgttctctgcatcagtgtacaaatatattgcagggctagtacaacaaagtagaatgtgatgttatgtttagctgcattgtgattgctttgccagtttacatgtaacaactaaaaagatagctgggacgtaaaataatactacctttgttctcgg

SEQ ID NO: 17464 - DNA, 1328 bp, Zea Mays
acctttctttccctcttccgtcttccccaacccaaccacccgcaccaagccgacccagagagaggagagcctgcttgcctgcctgggctggactcccccttcgcctcctcctcgtccgatcggccccgccccgcctagctgctgctgctgctgctgctgctgctgcgcgcgcgccgcggcgggacccgggaggagcgccggtggtggcgttttatacgaagatgcaaacaaggttgcttgcagtttgtgattctcaagcctattttggttgttatcacttttatactttacgcgaaaggaaaatacaaagatggcaacttcagtgtcaaccaatcctatctctacataactatcatatatacaatctcatactcgatggctttgtatgcccttgcattgttctatgcggcttgcagagatctacttcggccatataatcctgtcccaaaattcatcatgataaaatcagtggtgtttctcacatattggcagggtgtcctggttttccttgctgcaaaatctcgatttatcaagaatgctgataaggctgctgatcttcagaactttgtgttgtgtgttgagatgctaatagcagccattggtcacttatttgccttcccctacaaggaatatgcaggtccgaatgcccgcccttcaggtggtttcagagaaagccttcttcatgctttgaaattcaatgatttctaccatgacactgttcaccagtttgctcctacatacaatgaatatgtgctctacaatcacaatgagggagacaatgcagaaacgaaatttccctcagggagcactgccacaagtgggcagggtgtggagttggctggcattaccgttgtggcttcaaacagtccagtgacatcaagtgtatcatgcaaccaggcagatcaggaagagacaatgacaaccccaatcaaggacaaagtcgatcctggagggctttatgatctcacagaattgcttgatgtggatttgtctagctacccagacaaggttcctgcaatcaccgatgtaagaaaacaatgaccaagcttgatgagatgtactattagtagggttgcaaacttgcaattggggggaaattgtgattttgtcgaagagttgccatagttaacatttgtaaaaatgtgtgtattacttggtctgattttcccccattcaatggggtttattcattgtcaaaagctgctgccacatggcctccctcacccctgctctttactaactgtaaattgttgctcaaggtgaactttaggtgtcaaggggactccatactaatacaatattctgggtttctgatggagtattttccg

SEQ ID NO: 17465 - DNA, 3488 bp, Zea Mays
gcagtcgccacccccttctccctcccctcgcatgcagctctaacccataaacagtacccgtgggactgtagtgcccccagccatccataacaccacacctcatatagatattcaagacaaacattgtgccatttagcatgatagtccttatgagaaagttttagaaaaaaggcttctcttttgatgatatcgcctggttgggctgctgcttttgcatcgccaccagttgcaatggcattggccatgatggctgctggtgcctcaggaacagaaacaagaacacctcctaggaataccttgaataggcgtgacaaagcattgcctgagcgcaaggcagcagcaaaactacagactttctcgagtttccagatgcctatggaaacagcatctaacaagcctgggtccaccctgaaggacaaggcagcagcaaaagctgccgcattggcagccgctcgtgaccttgaacgaactgctaagattggttcaagaaggggccttagtgctgtagcaatggcaacatcaggacaaaggaggagttcgggtgacatcgaacgagcaaagaggtggaatacgtcagaagctatgagtgctgcttgggtggagtgtctgcaatcagatgattccaaatcagttgtgggaagggatttttcagccctttcatacaaatatgtcgcagtacttgtttcttgtttggccttagcacgaaacttacaacgagctgagatggagaggcaaacactagttgatgtgttaattcggcatcgcgcctcaactgggcttcgagcatggcggcatcttcttcattgcctaacagagatgggtagactatatggaccttttgaacatctgtgcactcctgatcgtgttttctggaaattagattttactgaaagctcttcaaggatgagaagatttgtgaaaagaaattacaagggatgtgatcatttaggtgcagctgctgattatgaggaccggaagcttcttaatacttctgcacagtcaaatgaacataactctgaggatgctaattcttcattaacaagcactcttccatcatctgcttctgtaattatggctgatgccatgtcgatgaatgacagaaatgtggaaaatgagcagttagaaactgacactactcgcagcagtgttgatgacgatcagcttcaacattcttcagcagctgatcaacaatcggtaaaaggatcgataggttcaagaacttctgacatttgtgctgatcgaaatttggttaggtctacagttcttgcacctagttatgtgcctagcgaagctgatgagagaattattgttgaactgccatcattaatggtgcgaccattgaaggtggttcgaggaacattccaagtaacttcaaagaggattaacttcataattgatgagcgttcaaatgacagtaacattgatgatgctgcatctactagtggccaatgtgatcaacaagataaagatcgaagctggttggtctcatcactttatcagatatatagcagacgatacttgctacgccgaagtgctttggaattattcatggtagataggtcgaatttcttttttgactttgcggatattgatgcccgtaaaaacgcttatcgggccattgttcataccaaacctcctaacttgaatgacatctttttagctacccagagagctgagcagattcttaaaagaactcagttgatggagcgctgggctaattgggagatcaacaattttgagtacttaatggaacttaacacactggctgggcgcagttacaatgacattactcagtaccctgtttttccctgggtagtagcagattacaaatcccgagtgttgaatctggatgaccctttgtcgtatcgagatctttcaaagccaattggagcactaaaccctgaacgtctaaagaagttccaagaacggtactctacattcgaggatccaatcataccaaagtttcattatggttcacattactccagtgctggcacggtcttgtattaccttttcagagtggagccttttacaacactgtctatacaactgcaagacggcaaatttgaccacgctgatcgcatgttttctgatctttctggtacatgggatagtgttcttgaagacatgagtgatgtaaaagagctagtacccgagatgttttacctccctgaggtatttaccaacataaatggcattgactttgggacaactcaacttggagggaagctagattccgtagaattgcctccctgggctgaaaatcatgtggattttgtccataaacatcggaaggctcttgagagtgagcacgtctctgctcatttgcatgagtggattgatctaatttttggatataaacagaggggcaaagaagcgataatggcaaacaatgtattcttctacataacatatgaggggactgttgacattgacaaaattacaaacccagtggatcggcgagctacacaagatcaaatagcttactttggacaaacaccatctcaactgctgactgtacctcacatgaagaggaagccactggcggaggtcttacaactacaggtggccacgttgatggttcattgaagttgatatccctagatggagcgaagacaattgaaactgcttctgggcatattgctccagtgacatgccttgcgctgtcacctgatagcaactaccttgtgacagggtctagagataccacagttatactctggaggattcatcagacaggctcctcacataagaaaaatgctcaagaacctccaccgactacaccaacgacaccacgcagtcctctctctggcagcactagcaccatgagcagcctctcagaaacaaagagacgtcgcgttgaaggtccaatgcatgtaatgagaggacatcttggggaagtaacctgctgctcggttagtccagacttaggacttgttgcttcctcatcaaatgcaacaggcattcttctgcattccttacgcacaggcaggctgataaggaggcttgatgtcgatgaggcacatgcaatatgcttatcttctcaaggaatcattttggtttggaatggaacaaagaaaacattatctaccttcactgtcaatggactccctattgctaactcagttctgttgcctttctctggacaagttagttgcatcgagatttctacagatggccattttgctttatttggaacatctttgttcaacaactacaagtgtgataacagtactgaaactggggatcatgagcttggacccaatggcactgatgatgtatcaaaaaattctgaacaatctgttcacgcgccttcaatctgctttgttgacctgcatacactgaaggtttttcatactctgaagctggcaaagggccaggacatcacagcaattgctctaaacaaagagaacacaaatcttttagtttctactgctgataattttttttatagtctttactgatcccgctgtaagcatcctcgatac

SEQ ID NO: 17466 - DNA, 155 bp, Zea Mays
caaagagtgcttgaaattgccgggagggaagcggatgggggctggcgacgcgcaccggccgtatgcggaacgggtcctgctggtccaccgatcggctcggggcgtggaccgttgtcgcccacgccggcggccaaagcccgggggccctaggcgcc

SEQ ID NO: 17467 - DNA, 613 bp, Zea Mays
atacttgattgcctcttgccattacatgatggtggattacctcttgttcatggttcgtgacgtgaagctcgacccgaatcctgaagaggtggccgatgtcaagtacatgaaccggcatcagctgaaggagctgctcaggaaagccgatgccggggaagatggcgttaagctctccccttggttcaggctggtggtggacaactttctcatgggctggtgggatcatgtcgagcaagggactctgcagggggcagcagacatgaaaaccatccataaattgtaaatcttctagatcgcttaagcacgagtcttgccctgttgaggaataagcgcttgtcctgctgtttggtgctggaggaataatcgataaaattataacagagtgatcttaattctggaacgtaactattaacattgaaccccatctgtgatgtgtaaatttctacctaagtatcgagacatacaaagaaaaagggggcacgccaagtcaattaggttaggcaaattgatacatactatacattcaaaggcaaaggccaaaggatgtttggaagtgaagtttcactgtcttgaaagaatactgcatgtttggaagtgaagtttcactgtcttg

SEQ ID NO: 17468 - DNA, 1321 bp, Zea Mays
ataatatcgtgacatcgtctgtccgccaccgggtatctctttctccgggtagtgcaccagcggaacggcgaggtgcagtcgtgcagacgggaacggggatgggaagcacaggggcgctgctttggcacccgtcgccgcaggtgcactccggtggcgtcctcttccgccagagccggcgcatcgtacgccagcgcaacttgcctctattatcgctagctgacgcggcgcttgagcccgagcgccgccgcgggcagcgcctccgctgcgctgccggcgacggggacggcgggccccgggaggctcagaaggagtctccgagcggcatcggcgcagcactcgaggatccgtctccaggacctcctgtggaaaacggttccttcagaagcccctcacaggaagaacagagtgctctgtataattttctctatccaagcaaagacttacttccagatgataaggagatgagtatatttgatcatctggaggagcttcgcgagaggattttcatctcagttttggctgttggggctgcgatactaggctgttttgctttttcaaaagatctggttctttttctagaggcaccagtgactgttcagggtgttcggtttttgcagctctcgcctggggaatttttctttacaacattaaaggtttcaggttattgtggccttttacttggaagtcctatcattttatatgagatcattgcatttgttatcccaggtttaacaagggatgagcggaaatttctcgggcctattgtgttgggttcttctgttctattctacctaggcattttcttctcctacacggttctcagccctgctgcgttgaacttctttgtgaattatgcagatggggcagtggaatcgttgtggtcaatagaccagtacttcgaattcatacttgtgctgatgtttagcacagggttgtcctttcaggtccctgttatccagcttctgctaggacaacttggattggtttctagtgaccaaatgctttcgatctggagatatgttgttgttggcgctgtcgtcgctgctgctgtgcttacaccttcgacggatccgttgacacaaatgttgttggctggtcctttgcttggtttgtacttgggtggcgcatggatggtcaagctaactgggcgataagtgagtggttcatgcaaggcaatgatgctccgggaagcaagagcgccactgtaacctagtcttgtaaaaatgaattcactctgttcatcagatgatattgttaccatttctctttctgaagttcatgagcagtagaaaatagaggaaacggttagttaaaaaataag

SEQ ID NO: 17469 - DNA, 2625 bp, Zea Mays
aaattccagttgctcgctccactccactcccctcccccggtcccgttccgtcggcggccggacaaaaccgccagactctctcgtcccccggcccggccctcccagacccagttccatccttttgcttgcttgcggttgcgggcaaccgctgtgatagagcgagcgaccgacctgtagtacgggagagggttggaaggagcgaaaggagagagaggttggtggttgtttggtggaggagaatagttggttgtcttcagggagggagagagggaaagatggagcgcaaggcggtggtggtgtgcgcggtggtcggcttcctcggcgtcctcgcggcggcgctcggcttcgcggcggaggccacccgcgtcaaggtttcggacgttcaaacaagcggcagtcctggtgaatgcatatacccaagaaccccagccttggcactgggtttaatatctgccgcctctcttatgctcgcccagtccatcataaacgcagtcgctggttgcatctgttgcaagaagcatcctgttccctcagacactaactggagcatagccctgatttcgttcatcgtatcttggtgcactttcataatctcgttccttctcctactgactggggccgccctgaacgaccagagaggcgaggagaacatgtacttcggtagcttctgctacgtggtgaagccgggggtcttctccgggggagcggtgctggccctcgccagcgtggcgctagccatagtctactacgtcgcgctgtcatcatccaagggccctccgccggcgttcgcagccccgcagaaccagggcatcgcgatgggccagcccgtgatcatcccgcagcagagcagcgagccggtgttcgtccacgaggacacgtacaatcggcggcaacaggtcccgtgacctgaccacacagaggtctatggttggttcggttggttgtgcttggtctgtataggttgcaggttagaacagtagccgtcgccattgctgttatagctagatcctgttctttttgtttttgttctacttgtaccctcgtgtttgtcgagcatggaatgtttggttctgaatgaactgggtaatgttgaagagagcctgcttgtttcgtgttctgtaaacgtgggggctcgccggcatgaagtgcttccctttcgtcgacctccgcagcattcgctcactagatatcctcgtgtctgttacaaaatattgtatattgtatatgtgaccaatccaaagggtgcgacagattctccctaagggacataccccttgagagacaccccttcacatgtatataatcaggactctcctgcaataataaaggacaactgtcatttgcactgttcctctgttcacttgttttccactgagttacaacacgttatcagcacgaactctctccactgaacgaggaaaagtcttgcgtgtgcaccagcgacggcggttaccggatcgtcttcggcaacagtgaacatgacgatgtgcaggcaggctgatgatgtgcaagcacggatgcagtggttcatggcgttggccacgtgaacaaccaaaaatgattgggatgtgtcgcttccgttcgcacgtccacgcatggcagcgacggcgagtctgcggcaacagcgaaatgcactccgcgggccacgcatgcagcaaacgctatgccgctggcggggctgagaagcccaccaccgtaatggtgcagttgcaccggaccatgcaatggtgcggttgcaggcttgcagcagcgctcgcatgcgtgttcggacccgagcggcgtaggaggttgggcattggctggggctgttgcgcccgtactgggccgtcacatggtcggagcccatgctggaggaggacgccggggccgcgcaccggagtgtgttgtggccggcaaagccagcctcggagccgtgcccggccgaagcgccagcgtcgggacgccgagccaccaggggccgctcccgcgcacccgcacaggggctgcgcgcagccaccgccggctgtgcgcccgttggggagcgcctgcagtgtggccgtcgtagggcggcgtgccccgatgacggggccacgacaccggtggccacgcccgcgtccgcagggctgctagggccagggtcgccgtgcccaggccgcaccatggccgcgcccgcgcgtgcaatgctgctggggccggagtcgccgtgcccaggccgcaccatggccggatcccgtgcctggccgcatgccgcgccatcggcagtggccgccggggcttggccggagcaaacaccatggcggcggctgcaagaaggtaggagcggttagggtttccaatacccttaataccgtgtctggccgcctggccatgcttgggccgcaccaggcctcatgggctggccgcgcctggccgcgtgggtcgcgccagaccgcctagatgcttggaccgcttgggccgtgcctggcttggctgagccgcccggccacatgtatgactggctaaatttactcattattttctgcaaatttaattacaagactctatgatgtatcacagtttcaatcagtatttagtatctaaatttgaatatttagactgctgatgatatatataattgtgatagtcatctgtttttattataaaaaa

SEQ ID NO: 17470 - DNA, 1857 bp, Zea Mays
cgaatttggacagacgagaatgacgatggtggcagtggtgagagccattgcttggatcgtggtgcaaaggaagagccaacatctagcggaacaagcacaccaagaggggatgcaccacatggtccctttgctacagaagagaactcacctgggaaatcaacgaacccaaacagcgacgaatcagaaggaaaagtaggtctgcacaagattttgggttctaaggcagaggcactattgaacaagaaagggatatcatggccttggaaagggcgcgagaatgagggacctgatgaaagaaaccatgtgatattgccgtggttgcatggtggccaagagaatggtgtgaatcatcagaaggtttctgattctagtatatctccagacgcccaaggcgctgaacacaaccaacctagcaaaaatgaggcatcaggttcctggtcctctttcaacaataacagcacaggcagtgcaagcagcacgggaagcactaatagcagtgctctctacaaagtagatcatgaagcagattgtctggattatgagatcctgtgggaagaccttgtcattggagaacaaataggtcaaggctcttgtgggacagtatatcatgctttgtggtatggttcggatgtggctgttaaagttttctccaagcaagaatattcagaagaagtgatactgacctttcgacaagaggtatcccttatgaagaaattgcgccatcctaacatactgctcttcatgggtgcggttatgtctccacaacgcctttgtattgtatcagagtttctcccccgtggaagcttgtttcgcttacttcaaaggagcgctaccaagttggatgtgagacggcgtgtccacatggctttagatattgtaaggggcatgaattatcttcaccattccagcccgcctatcattcatcgagatttaaaatcatctaaccttttggtcgacaagaactggattgtgaaggtggcagactttggtctttcacgtctcaagcgtgaaactttcttgacaacaaaaacaggaaaaggaacaccccaatggatggcgcccgaggtgttgcgcaatgaaccttccgatgagaagtctgatgtgtacagttacggggttatcctgtgggaacttgttactcagaagataccctgggaaaatctgaactcaatgcaggtcattggtgcagtgggttttatgaaccaaaggttggatatcccaagtgaagtagatcctcagtggaaatcaattatcctgagctgctgggaaagcgacccgcagcaacggccgtcgttccaggagcttcttgagaggctccgggagctgcagaggcactacgccatccagcaccggaacacaaagaacagcatcgaggagtaaagaacacaatgcgacctctcagagcggcttgcttcgaagcattttgcgagcgaacgaacgaagaaccccaggtctctagaagggcctggaccctcctgtactgtatggttttgcttctgcggaacagccaaggctggaagaagtttgttgtacagacgggggtacgttcttctttgtttgacagggcaattgtgactgtaatctctgggtcctgacacccaagggtagggtagagactatagagtgagtagtgactgagctccggattgctggcgcatttgggttcttctgattcgtggcaatgcaaatgcgtggttaacaataacatccaatccggggcttgtgtttctggaaaagggcatgatgatgtgtagattgtttgctctgacaagagtggtgcgtacatgtgatcggttgtgatcatgcgtgattgtgagtttaatcgatgtagtaaaatcttaatattctaaaatgcct

SEQ ID NO: 17471 - DNA, 153 bp, Zea Mays
ttttagtttttcttttttttttttttttttttttttttttttccctcttttttttttttttttttttttttttcatctttctttttttttttttttcttttttttcttttcttttttctcttctttttttttttttttcttttttttttttct

SEQ ID NO: 17472 - DNA, 1485 bp, Zea Mays
cttattgtccgccccgtgaagagccgaacatctttgtaggaatgcaataagagacatggttgtccgtggtgctccagcaatagccatagcagcggcactagcattagccgttgaagtttctgatttagattttattggtacgcctgaagaagcagcttcttttgtttcaaagaaattggaataccttgtatccagccgaccaactgcagtgaacctatctgatgctgcaacaaagctccaaactttggtatcaaaggcagctgaaactgcaaaagattccaagtctatctttcaggtctacattgaggccgcagagacgatgcttgttgatgatgtggcagataataaagctattggctcacatggagctgtatttcttcaaaggcagcttgcaaattcaaaaaagatatctgttctaacccattgtaatactggcagtcttgcaactgctggttatggaactgcccttggggttatacgcgctcttcattcggggggagttttagagaaggccttttgcaccgaaactcgtccatttaaccagggatccagacttacagctttcgagttagttcatgaaaaaatacctgcaacactgatagcagattctgctgctgctgcgttgatgaaacaagggcatgttcaggctgtcattgttggtgctgatcgaatagcagcaaatggtgacacagccaacaagattggcacatacaacctcgccatctccgcgaagcatcatagtgtccagttctatgtgtcagcgccggtaacttccattgatctctccctcccatctggggatgagatagtcatagaagaaagatcaccaaaggagttgctgaactctgaaggtggtctgggaaagcaagttgctgcatccggtatatcagtctggaacccagctttcgatgttactccagcaaatctgatcactgcaatcataacagaaaagggtgtgatcacaaaaactgatgctgatggatctttcgacatcaaaggattccttctgcccgcaaaataatactctagcgtggcttccattctgaatgacaaatgtctggatcgacactgttgtattctgttttctctattatacacaataataaagtcatgtcctcataggattttggtgtaagttttatggataggagatcgacgctagggtgtgtacccatagcggcgcgtatgagccgtgttttcacacgagtgggcaagtgaaaaagagatgtgggagatgacctctgaggctagggatgttttgtttctagagactaattttttagtctctttattttattttattttagttcctaaattgctaaatatggaaactaaaatagagttttagttttcgtgtttgataatttaggggctaaaaaaaataaaataaaatggaaggattaaaattagtctctagaaattaaaccccccctaagcaagatgattgtcttgcttgctttcaaaataatacattatctctatatt

SEQ ID NO: 17473 - DNA, 879 bp, Zea Mays
catctgcatcctgtcacaaatataaaatgagctgttggcgctgcagtcggaaagttttagttgatatgatccgtgttcctgactgggcatttgaggctgttggcctggaaatgagagtgggtcaagatactgcatatcatcctggtctttatttaactgatgctcagagagaagcagttgaggcactgattcaagagcttccaaaattcaggctgaaagctgttccaacggactgcagtgaatgccccatctgccttgaagaatttcatgttggcaatgaggtccgtgggctcccatgcgcgcacaatttccatgtggagtgcatcgaccagtggcttcggctgaatgtcaagtgcccacggtgccggtgctccgtcttccccaacctggacctgagtgcgttgaacaatcttcggtcgaccagcgagccggaccatccatccgccagcgccagcaatgtaacgacggcaactgcagcgacgagatacgtgaggtcgcagccggcaggtcaaagctatttggtgcggttgcaggggctgctgctccgccctgtccggcacgatagcgtggagagtgacggtgagccggcggtgggcaacagtcgcttggttggcaccgaagagctgcctagcatacttgtagacgatggccatcagctgccagatcgctgactgatttgatgacctgatggatccagcatacttgtcagcataatttaggatacttgtcagcttttcttttacagttttcttttgcaaatgaaatgcgagttttgttgaaagaattttttttaactgaacactgaaataagcaaataaaattatttagctcaaaggaaataaaattacattacttaaagaaatcacacaatacatacaa

SEQ ID NO: 17474 - DNA, 2723 bp, Zea Mays
tgcagcaacaattatcttactgatttctgacaattttcccttagcaggatcatactgtcttttggcgtttcttctccggctctttttcgtttgcctgtcggttacaaggtggaacgtcttcagaagcttctccactagattagtgtaaatagtagacttgttcaggtttagtttggttggaagaattagtttctggttcgtgttcatttctgctagcaataatggctgcgatgaacggaaaggtattgggtaaatgtggaaggaacatgaatagtctcaagagaaagcgggagaaccccgctgcatatgatgctgacatattccacaactctgaattgcatcagcaccctgtcaatgattctgctgttaggtttcatgttgataaagaccgcaaggcaaagatcgtgtgccacttcaacaagcaggttttgcagagctataagaacttcatgagtagcgcaccacctaaacgtattttgcttcgcataggtgctgtctggaaagacttcccagaaaagattgtcaaattggcacaagctgacttcagggcgaaaaaaacaatcacagaaacaggatatcagaaccagctatttttgctggattttgcccatatgacattcatagacacgaagacaggtcttcagaggccgattgcttggatcgatgaaaatggaaaccgctacttcccagaatcatttgtgcaagatcagaaaatatttatgaagaaagattttggcaacggatatcatgattacattagtgttgagtcaaatgggacacgagaaatgaatgaccagcttggaacatcagaaagttccgcagaaagttcaaacttcggttcaagtactgaagatgtttccagtcctaagagagctagagctgaaaataattccatcataaaaaaatactgtgatatgggagaagctattggagaaaatgagccatgcactttgttgcctacagcctgtaacctactaccacgccaagctaatctgggtgaggtatcacgtgcccagcgcactattgaagccgtggagaagctgttgttgcaggggatgggttcagttattgaatccaaggacattattggaatctacaggactccattattggatgaccatggacaagtccgttaccataatcacgaaaagcatgtacaggttaccagatgtcatcgtggaaacgcaaatgtccgttatgcatggcttccttgctccaaaagcactgtgcatgaaatgatgctgaatagttctttacaagttcataagccgcccattaagtgtgcagcctatggagagggcacattccttacaccagcaaatcgttctgatgcctgtgtgaaattctctgctgttgatgaaaatggcattgtccatatgatgttgtgccgtgttataatggggaacgtagaaatagttcaccctggatctaagcagcaccaacctagtagtgactattttgatagtggagtagatgaccttaaaaacccacaacattacattgtgtgggatatgaatctgaataggcacatctatcctgagtttgtagtcaccgtcaaattgccttctaaaacaaaagattacttcgtatcgcaagaagactgccagaattcatctgatctgtcactggtgttgaattctagttcacccgactgtatttcagaggtaagatgcattaacaagatagtactccaacactagagtcaactcctgttactaacttgatatacagacgagttccactgttggagcagcaagagtgcagtaattcagattgtgtgatttgacacaatacttgacttgtgtttgcgttattgagattataacttggagctgattatattcgctatctatgatagaaacctccaaatatgataagtttccttgtgaaaccatgctgttttagtcatgttggagttggttaaagaaccagttaacaacttccttttatgcataaaacaggagatgaacctggaggcacctccagcattgggaggtggatgtgcagcccccatgctaggagattcgatggcaaaggctccaagctcaccttggatgcctttctctatgttgtttgcagcgatctcaaccaaagtgtctcctcaaattatggacatggttattggttgctatgaagagtttaagagtaagaaaataagccgatgcgaactaataaaggagctgaggcacgtagttggtgatagagtgctaatatcgacgataatgcgtctccaagataagttgcctcctgtggagaggcgtgagggaccgggtgcatcagctgccaagatggtggcgaaaccgtgaggcgggtgtcggtcggtcggtgggcgaggaatgcagaagggaggaagcagctgactttgacaaccctgtgggaagcagcaactatgaagcctcttgtgtcagtctttgtatggcggctgatgtttcttctttctgtgtcgtatgagtatgttttttcctagtagattgtatcaggagtttttcatttcaaattgagctgcgcatgttcttttgagcctttggaatagttcgtcaacgaaaaaggctccttttacctttctgataacagtgttgtgcattgttaattaatgtgggtcatatagaataatatatgatgtatacaatgtttttgagtttggctctcgctgccagtcgtgtgtttattctgcacccgtggtaccccactaaacgttagtcgagttcattttatgcatcaac

SEQ ID NO: 17475 - DNA, 1688 bp, Zea Mays
gaagatttctggaatactagggctattagagggaactgtccattttaaagaattgcatgagattattgaagatgcaaaagcaaaattggaaagtgaggttgggccacttgatggaatgtcggcaaagaatgcacatggtatcgtaagcaggttctcagctggtatcgctgtgcagaaactatgctctacagcaattcaaagagctgacgagtggttgagttctcctgacctgcatcttcgagattcattacctgttgcctgtagatttaaatttgtagacataacatcttcttccctcattgtcatcttgaaagaaacctcgtcttctgacactatcaaaggttataagctatggtactggaagagcagagagcaaccaagtatggaaaagcctgttattgtgtccaaagatgaaagaaaaatacttctttatgaccttaccccatgcacagaatattctttcagagttatatcattcacagatgatggggtacttggccattcagaatctagatgccgtactgaaagtagggagatatttgtcatgcgtgcaccaaagaatgcagtgggaggaggggctacacatgcgcaaaaaaaagacaggaaccagtcttgtaagtcaactgggttcaagatccgagatatttggaagaactttcaggaagctttagatgcagaaggctgttttgaaggattttctgaagatgtacatgaaggttcctgcagcagaagtgttacagagacagagttatctggagcttgtcgcaaacttcatttcaactcatcttctgtccccgacctaaacgccgaggttcctgtacccgtggactacactgagaaccattattattctaagaagggacttgtgaggtcaaatgacagtggtgactctgagacctgcgccgttggccagactgcagagccgcctgcagttgaatctcggcaagtaagcaaggtgaatagcgtaccagttaataaatgcgagcagaatggtgcttctgctatttgccatgaaaagatgctctccggatcgacgaggcaactggatggggattatgagcactgcgtaaaggtagtaaggcagttggaatgcgatgggcacatcgaaaatggtttcaggatgaagttcttgacatggtatagtctaagatccacagaccaggagcgcaaggccgtgagcacatttgtcagaacgttaagcaacgaaccaagcagcctggccgagcagctcgtcgattctttcggagaaatattaaacagcaagaaggccaaaaccggtttctgcagcaagctatggcattaggacaaaaaggactagatctcaagatactgctaactcactgattatccatatttttcactgaccggtgcagtgaaattctagtttattccatcaaatttgacagcgatgaaaagggggcatctgtgagaataggagattattttgggcagcaagtagcctgctctgaaataattcttttccatcaggaagtagtggaaacttgattttcattggattacctgggtcaatccagaaattattgtagaaggttgtctttttttcccctttgttgttgtggttcgctgagaaattctttggagatagcagtccgttggttattctgggttattatataaatcatggtaaatggaatgtgatggtacaaagtctctggtttacttgtgct

SEQ ID NO: 17476 - DNA, 632 bp, Zea Mays
cagcacaacgcaacgtgggtcccttgaatagatcgtcagtacttcataccattcataatatatagatctgcagcactacaaacaactacaatagctcccagaccatttgagttatgtacagaagccatcaggtctctcacagctttgaaactctcagtggcggcagaccacaagcttcgaacttcttgatgtagtcatggatgtgctcactgatttcctgcgctctttcctgctggatgaagtgcccagcgcccttgatgaccaccacctcctcaagcatgggcacgtccctcttgaacccgcccttgtggatgtacctcttcactccagggtgatggtacgccaggtcaccgtccccaacgatgaacttggttggaacttgcacctttgctcctgtccaagcagcgatagtaatttactccaccagcaaatccagtttttgagtacacacttgcaaggtaactgacatcttcctcagatagccaagaaggtagcaccatttgcttactgtaagtttgcatttttcgaaggtccatagctgaagaacctgttgcccgaagagtcaatgccaatgtgaagaaactcttcaagtcaaacgtagcaaattctgcttcgagtcctggttcctgcca

SEQ ID NO: 17477 - DNA, 1231 bp, Zea Mays
ctcaataaaatatgtactcggaatcggaagaacctaccttacttttccatccgcggaacgacgcacgcggacgcctccttgttccgggtcctactcccgccgccttcgcctaaagaggcctcgccctcccccctccggcgaaaaccgattcccttccccgattccctccggcgtttcctgaaagatgattaatcttttcaaaataaagggtcaaaagaaagaagaggcagcaagtgctgctggaaaggcccctgttaagaaacagtctgctggggagctccgtcttcataaagatattagtgagctcaacctgccgaagaccacatcaatttcttttcccaatggcaaggatgatctgatgaattttgagaccaccatccgacctgatgaaggatattacatgggcggcactttcgttttcacctttcaagtgtccccatcttatcctcatgatcctccgaaggtcaaatgcaagaccaaggtgtaccatccaaatattgatctggaaggcaatgtctgtctgaacattctgcgcgaagattggaagcctgttctcaacatcaacactgttatttatggcctgaatcttctttttacgcaaccaaacgacgaggatcctctgaaccacgaagctgcagttgtccttcgcgacaatccaaagatgtttgaggcaaatgtgagaagagccatggctggaggctacgtcggccaacactatttccaaagatgtgcttgacttgatgtggtggtggcttgaaaacgatcaacagagcccctccccctgtatcagcaccagcgcgcccagctttgtgtgcggaaagtgcttctggaagcaaaatccaaaccgttcatggtgtgacatctgtttgcccgcctttgtgatgtgtggtatagtggtggtgcataatgacagggaaatgcttctctaactgtatcattcattccataaatcctaaacgaggaatgggaagtggattgttaagcagattccttctgcagatgttgatgtcgtattcggcgtgtattcattgtcgcatcttccaggtcgacgttgacatgcacgtctagcttcggatgccgttaccagatgcctcttgcaacttatctgcgccagaagcaatttatgatccaatttgatatctttgtcagcaaatataaggatttgtataataagtagaagcaaatctaaccattttagtgttcctttttttttctgcaggtgatttgcgtg

SEQ ID NO: 17478 - DNA, 838 bp, Zea Mays
cctaaagtcatcccaatccaattacgccacgcctgcgccgccagcccgccacatctgtcacaccgcccaaagttcggagggaagtcctcaacgacgtcgcggccatttgcagctcggacgatggcgtccaattccgcggccccggctgccgccgacgggggcgacgacctcgaccagctcctcgacagcgcgctcgacgacttcaccagcctcgacctctccgcatctgccgcccccaaaaggatatggactccattgttgaaacaatgatgcagcagcttttgtccaaggagattcttcatgagcccatgaaggacattgtggaaaaatatccaaaatggctggaggataataaaaacaagataagcaaagaagaatatgagcgttataataatcagctagaactcatggtgaagcttattgaggtctatgaaaatgatcctgagaacatgactaagatttttgacatcatgcaaaacatgcaagaatgtggtcagccccccagtgatcttgtccaagatactgtacctgatctggatctgagcaagttgggacagctgtctcctgagatgcttgaatcagcaccaaattgttgcgtaatgtgaagacaaaaaacattccacttgggattcaattccatgaagtttcttagcctgtacgaaccgcctcccccctttctggcttgagtagattcaagataatttccatctggataatctgtaaagccttgcaaatatataatgggctcaatgttctttctggttctttctgttatttttctgtaacactcccgtcgttcctatatacataccttacgtgtcgaagccccttacgtttt

SEQ ID NO: 17479 - DNA, 1249 bp, Zea Mays
tatcctgtgaaaacatcatctttggatgactggagggagcaagtttctagggtggactacaccactgtcttcatcttccgcctcctaatgtttgttgataatggtctcgctgcaggaatgggattagatctcggatggcaacagagatatgctcgtttttgtggaagaataattgtcctctcagttcttgtgctacttctctacccctttctctgggtttggactgtgattggaacattgtggtttagcactgcaagaggctgcttgccagaggaaggacaaaagtggggcttcttgatatggctgcttttcagttactgtgggctcgcctgtattgcttgtgtagctattgggaagtggttacaccgaagacacgcacttcaacagagagcacaacaaggaattccagtctctgaacatggggttttagttgatatgatccgtgttcctgactgggcatttgaggctgttggcctggaaatgagagtgggtcaagatactgcatatcatcctggtctttatttaactgatgctcagagagaagcagttgaggcactgattcaagagcttccaaaattcaggctgaaagctgttccaacggactgcagtgaatgccccatctgccttgaagaatttcatgttggcaatgaggtccgtgggctcccatgcgcgcacaatttccatgtggagtgcatcgaccagtggcttcggctgaatgtcaagtgcccacggtgccggtgctccgtcttccccaacctggacctgagtgcgttgaacaatcttcggtcgaccagcgagccggaccatccatccgccagcgccagcaatgtaacgacggcaactgcagcgacgagatacgtgaggtcgcagccggcaggtcaaagctatttggtgcggttgcaggggctgctgctccgccctgtccggcacgatagcgtggagagtgacggtgagccggcggtgggcaacagtcgcttggttggcaccgaagagctgcctagcatacttgtagacgatggccatcagctgccagatcgctgactgatttgatgacctgatggatccagcatacttgtcagcataatttaggatacttgtcagcttttcttttacagttttcttttgcaaatgaaatgcgagttttgttgaaagaattttttttaactgaacactgaaataagcaaataaaattatttagctcaaaggaaataaaattacattacttaaagaaatcacacaatacatacaa

SEQ ID NO: 17480 - DNA, 562 bp, Zea Mays
agttggttctcatcaaagctcgcaactacttcctcccctccccttccttcccttccggccgcctcttgtcctcctcacctcccaaattgaaatcctcctccctccccgcctagggttccgcttcctcccccgtccgagcaccactcaagcggcggcagcagcggtggcagcctggaagcagtcccatctcgtcgccctagacttccctgccgccgcacgtctcagtttcttgttcgcccgctctcctgccggtccgcccatcgcctgaggttcttacggtgccacggagttggcaactgcaaggagtgatattgtggtacaacactagttctaattgaagtaataaggcgggggtgaaactgtctgctaccattgcttccatggcaactaatgagaacctcccgccaaatgtcatcaagcaattggctaaagaactgaagaaccttgatgagtcacctccagaagggattaatgtgattgtcaatgatgatgacttcactactatttttgctgacattgaaggccctgtacgtcttaaaattttaatctggacatggtgcag

SEQ ID NO: 17481 - DNA, 1935 bp, Zea Mays
ttattctcgagttcatgcggggaacagcaagtcaactttgcatggtcctattgaggagatagcttggaaagaagcgggagaagctgaaacattgcttcatgacttgggaattgcagacccgttttcagtaagacactctcctcgtggaattttctgcaccaggacactaaatcttcgatctatcagtgtagttggctacgatatggactatacattaattcattacaatgtgatggcctgggaaggacgtgcatatgactatgggatggacaacctcaagagcatgggttttccagtagatgaccttaaatttgaccctgacctggtcataagaggtcttgttattgataaagagaagggaaacttggttaaagctgatcgatttgggtacattaagagggccatgcatggtacccaaatgctttccactcgtgctgtgagtgaaatatatggaagagaattggtggacctgcggaaagaaattcgatgggagttccttaatacccttttctctgtttcagaagctgtcatgttcatgcagatggttgacaagttagatcagggattggtgccagctgaacttgggccactggattacaaaggactgtacaatgctgtttccaaagcactttttcgagcacatgtagaaggccaacttaagagagaaataatggctgagcctgatcggtttgtagagcctgatccagaacttcctttagctcttcttgatcaaaaagaggctggaaaaaagttgcttctcattactaattcagatttccattatacaaacaaaatgatgaatcatgcattcaatcgctttcttcctaatgatgtgggatggagagatctgtttgaaatggttatagtctctgcaaggaagccagaatttttccagctttcacatccattgtatgaggttgtaacagatgatggactgatgcgtccctgttttaaagtaaattcaggtggcttatattctggtggtagtgctcagatggttgagaaatcactagacattcatggggatgagatattatatgttggggaccatatttacacagatgtaagccagtcaaaagttcatttacgatggaggacggcattaatctgcagagaactagaagatgagtttaatgcactggtcaaaagccatgatcagaaagaaaagcttgttacacttatacaacaaaaagaaattgtgggggatcttttcaaccagcttcgcctggctctgcagaggcgctctaattcacgtcctgcacagacgcttgctgcaacttgtatggatgaccaggagcttacggagagtatgcaaaagttgctcattgttatgcaaagattagatgaaaagatcgggccaatgctagaagcagatggagaacttttcaataaaagatggggttggttgtcacgtgctggtctatgggataagagtcatcttaccaggcaaattgaaaaatatgctgatatatacacatcaagggtttcaaattttctgcactatactccattcatgtatttccaatctcaagaacagacacttgcgcatgatgcccattcctattctggaggaaaggacatcaaagttcattgagcatccgttcgtcacaatctggagattaggcaggaaagagcgaacgtgatcattgtgattatggctgcgatggctacacaataacaattgtcgttttgaacaaattaattaatacaccttgtaagattgtatttatatataagtaaatctttagctatagcatgctgaatgattgttctgatagtcagtttgtttgtcgtggcctacctagagtttcatattgggaggcacagtacctgttttggtgtacctgctgctatttgcattgtatatgtgaaatgcgaagtgaagtatgacaaggtaacgataagtgacaaatcacgtcatttgatcctgcgcaa

SEQ ID NO: 17482 - DNA, 4259 bp, Zea Mays
ccgccgccgtttcttgattctcccatctacatcttcctcgcagcgccggcgcggcggcgctccatcttccgctccctcccttacttgcgcttggcacgcaggcgacggcggcggcgcccagtctcgtactctcagcggcggcgtcagtggcttcccctcccgcctctcgccagtcgcctcgcgccctcgcctccggtcctgcgcacgccggcctgttaccctgcgtgcgtgcctctctctctcctcccgcctcctaatctcgttacctattttgttttccagcaggacattgttgaattctctgaagtgtgtgctcttgtaaaggcttgctaaaatggcaaatttaaacataaccaacatcttggagaagatgacagggaaagataaagactacagatatatggcaacatcagatctgcttagtgaattgaataaagaaagcttcaaagctgatcaagaccttgagccaaagttaacgattactgttcttcaacaacttgaggatgcttcgggagatgtttctggtttagctgttaaatgcttggccccactcgtcaagaaggttggtgaggacagggttgtggagatgaccaataaactttgtgataagttgataaatggaaaggaccagcatcgggataccgctagtatagccctcaagacaatcattgctgaagttactacaccgtcacttgctgaaaagatcttgctttctcttgccccgcaactcatcaagggtgtcaatactgcaaaaagtgctgaaattaaatgcgaatgtcttgatatattggcggatgtgcttcatagatttggcaacttgatcacaaaagatcatgagtacatgctcaatgcacttttatcccaattgggttctaacccagcaagcgtcagaaagaaatctatttcttgcattgcatcacttgctccaagtttatcagatgatttgttagcaaaggcaactttgcaagttgtccagttgctgaaaaatagaggtgcaaaatctgaaattacccgaacaaatatccagatgattggttctctaagtcgttctgttgggtaccgttttgggccacaccttgctgaaactgttcctttgcttataagctattgtacaagtgcatctgaaaatgatgaagagctccgtgaatacagcttgcaggctcttgagagctttatgctcaggtgcccaagggatatatccccatattgtgagggcatcttgaatcttgctttggaatatgtgagctatgatcctaatttcactgatagcatggatgaggatactgatgaggaagcgaaggaagaggatgatgacgatgagagtgcaaatgagtacacagatgatgaggatgcaagctggaaagtccgtagggcatcagcaaagtgcctatctgcaattatagtgtctcgtcctgaaatgttgtcgaagatgtttctagaggcttgtccaaagttaattgaacgatttcgggaaagagaggagaatgtaaagatggatatatttaacaccttcattgagctgttacgccaaactggtaatgttacgaaaggacaaggcgacatcgatgagtccagccctcgctggttgctgaagcaagaggtcccaaaagttgtcaagtctatcaacaggcagttacgtgaaaaatcaatcaagacaaagtactgaaggagcttgtggttgtattaccagactgtcttgctgatcatttcgggtcacttgttcctgggattgagaaggctttgaatgacaagtcttctacctccaacctgaagattgaagcccttgtattaacaaggcttgttatggcttcacattcaccatctgtgtttcatccatacatcaaggctctttctgcacctatactgtctgctatcagagatagatattataaagtcactgctgaggctttgcgggtgtgtggagagctagtccgtgtccttcgtccaaatctcgagacaacctcagttgattttaagccatacattggtccaatctataatgcaatactgggacgtttggccaatcaagatcaggatcaggaggtaaaagaatgcgccatatcttgcatgagtttggtggtctctacttttggtgatggtcttgaaagagaattaccagcatgccttcccatactcgttgacaggatgggtaatgaaattacaagacttacagctgtcaaggcattttcagttattgcgaattcacctctacgtattgatctctcgtgtgtcctggatcatgttgtttctgagctcacagctttccttcgcaaggccaacagagctcttaggcaggcgacgttgggaactctaaattctttggttgtcacatatggtggtcagattggctcttcttcgtatgagacaataatcgcggaactttcaaccctcataagtgacatggatttgcatatgaccgctcttgcattggaactttgttgcacaataatggttgacagaaaatctattcaaaacgttggtttagctgttagagataaagttttgcctcaggcccttgttttgatcaggagtgccctgttgcaagggcaggcactgcaggctcttcagaggttttttgcatcacttgttcaatctgcaaatactagctttgatgctttgttggagtcccttatttctgctgctaagccatcacattcaggtagtcttgctaagcaagcactgtcttctattgctaagtgtgttgctgttctatgcttagcagctggtgaccagaagtgtgcatctacaattgaaatgcttaaaggcattttgaaagacgacagcactactaactctgctaaacaacacatggccttattatgtctgggagaaattgggaggaggaaggacctcagcaatcatgttcaaattgagaacatcgtcattgaatcgtttcaatcaccttttgaggagattaagtccgcagcatcctatgcacttggaaacattgctgttggcaacctctccaagtatttaccatttattttggatcagattgacaatcaacagaagaagcaatatctgttgctccattcacttaaagaggtaatcgtgcgacaatctgttgatcatactggccagagtgagctacaggattcaaacattgagaagatattggcattgctcttcaatcactgtgaaagtgaggaggagggagttcggaatgttgttgcagagtgtttaggaaaaatttctctaattgaaccaaaaaaactagtccctgctttggaggtacgcacgtctagcccagcagcaaatacaagagctacggttgctattgctataaaatattcaattgttgaacgacctgagaaaatagatgaaatcatgtactccaagatatctactttcttgatgttgattaaagacagcgataggcatgtgagaagagcagcagttctggctttgagcacagcagcgcacaacaagccaaatttgattaaaggtcttcttccagagatattacctcttctatacgaccaaactgttattaagcaagagttaatcaggacagttgatcttgggcctttcaaacatgttgtagatgatggtcttgaactcaggaaagctgcctttgaatgtgtggatactttattggacagttgtcttgatcaagtgaatccatcgtccttcattgtacctttcctcttgtctggtttaggtgaccattacgacgtgaaaatgccttgccatttgattctatcaaagctagcagacaagtgcccttccgccgtccttgctgtcctggactccatagttgaaccaatcgagaaaactataagccacaaacccaagggggatgcagtgaagcaggaggttgatcggaacgaggacatgatccgcagcgctctcagggcaatatcttctctaagccgcataagcggcagcgactacagcatacggttcaagaatctgatgaacaagataacggccacccccgcgctcgccgagaagtacaactcggtgcgcggcgaatgagacctgggttcttgtacatggtagaggaataggttaaacacccagagttgtcgcgcgctcgtcaatcctgttgccgcttccccgcatggttgctgaggcaaaagtctgtactctgatgatgacggtggttgatttttgactgctggacatagttgtcttgtacaaaatctggtggtaaattcagtagaattgccgccgatacatttacctggtggttctcttgtcgcagttcagtttcagttgacctatgaagcgctgatgcagatcagactattctggca

SEQ ID NO: 17483 - DNA, 1999 bp, Zea Mays
cgccactcgccactgccgtttgatccctcccgctcccccgctccgccatgcgtcccgccgtcctcgctgccctccttctagtggcagcggccgcctccacggccgccgcactctactcatccggctcccccgtcctccagctcaactccaacaacttcaaatcgaaggtgctgaactcgaaccgcgtggtgctggttgagttcttcgcgccgtggtgcgggcactgcaagcagttggcccccacctgggagaaggctgccggtgtgctcaagggcgtcgccacggtcgcagcgctcgatgctgatgcgcagcaggcgctcgcgcaggaatacggaatcaagggatttcccactattaaggtgttttcccctggtaaatctccagtcgattatcaaggagcaagagatgtaaagccaatcgtagagtttgctctgtcacaggtcaaggcccttcttagagataggttgagtggtaaggcatcagcagggtcaaatggcaagacatctggaggttcaagtgagaaaaatgaaccaagtgcatcagtagaattaaattcgcgtaacttcgatgaactcgttgtcaaaagcaaggacatttggattgtggaattctttgcgccatggtgtgggcactgcaagaaattggcacctgaatggaaaaaggctgcgaagaacttgaagggccaagtgaagctaggccatgttgattgtgatgctgaaaagtccttgatgagcaagtacaaggtggaaggttttccaactattttggtatttggtgctgataaggagagcccgttcccctaccagggggctagagttgcatctgccattgaatcctttgcattggagcagttggaagccaactctggcccagttgaagtttctgagttgactggcccggatgtcatggaagagaagtgtgcttctgctgccatttgttttgtatcattccttccagacatcctcgattcaaaggcagagggaagaaacaagtaccttgagctcctgctctcggttgctgagaagtataaaaagagtccatacaggcaagtgtcagcttagctaattacagaccttacgaaaatgtgtctgcttcgtcactttcaaaagaaaggaaaaaggtcaagagtttaaccgatacagtagtttcctttagtgccatgaaaaaggaacagtaatattggcattcaacagtaacaggtgtgtattttaaatgctaacatatagaggtaaaacaagatgcagggtaaccttgcgtgaacaaaatatttaggttgatatttaaaaccataaactttacaagcatactgcaacgactagtgttctattctatgtcaacaaaagcatgccgtgcaatcgtttttcttgaaattccctcttctttggtagtactacacaccctgtgccggatgctttttgccatgcagttttgtctggacagctgctggcaagcaagctaatctcgagaaccaggttggagtgggcggctacggctatcccgccatggttgctctcaacgtgaagaaaggtgcatacgctccactccgtaatgccttccagcgcgacgaaatcatcgagtttgtgaaggaagcagggcgcggtggaaagggaaatcttcctctgaacgttgcgccgacagtagtcacttccgagccgtgggacggcaaagacggagaggtcatcgaagaggatgaattctcccttgacgagctcatgggcgacagctcctcagtaaacgatgagttgtagttctgacgattctgtaactgatctgcgtgccgattagcctgactgtaaatctgaggaactctgatgttttaaaaactcattaaattttcagattttggatgctagaattagaatggttaagattaaagagaactgatgtgataggcacatctttttttgtccctgaaataaagtcagttgtgggcgttgcttgccgcaacaaatggtgtcgctttagatggtctcaagcaacatcatctatatttatcttc

SEQ ID NO: 17484 - DNA, 512 bp, Zea Mays
gtccgactaaaattacagcactacagttataccattgcttggttgatggggcagatgagtatctacagctgctggatgtcgccagcgagactatccgctctcttttcaacatgccgcggacgctggtcttctaagagttcataaagaggaatggcggttccgatccttggcgaaaactttttcctgcctcttagatgccgcccaaggttaatctgcctcccctaccgctctgatgttggtagcttcggacgggttgaaaaagcgatgaactcagacttaaaatcccgctgaactgtgcctgtggatggatgcccaatatgacaatgaacatttctcagcgttcatcttgtgtgttatattccctcttctacttccgcctccagagtgcagcagttgacgttttttttttcgcactatggcattgcagtcagattttgttattgtgacttcttcgtggcacaggtcctataacaaagttacattttttgggtgcagtatataacaaggttgcg

SEQ ID NO: 17485 - DNA, 804 bp, Zea Mays
aaaagatctaccaggatgaggctaccggagatccagcagctgcttcagtctctcgccgtggagaacgagagcctccgcgaggagatgcgggatttacagagagcttgcaaggcgctgtcgaaagaaaacgacaagcttgagacaaggttagggcaatcaatctctcagaatgaagtcactttaaaggagcagaaaggaaagcaacaacttgatcagcagtcggttatgcagtccgcacgagacagcttcgtgctaccagatctcaatctccccccacaggactctgccgatgtttcaacagttcattgatcactccagattgctgcgactttgttaaccgaataacaagtgtacatagaggaagcagggtaccaatctacggtggcggcaccaccacgtcatccttctgagaatgacacgcatttgataagttgttactagatcagagttttactaccactatagccgcaagttacaagccacatttgtagctgagggaagtctagttttaacccacctgacattgttttgcctagtgcgtttgcatatggtagagctgaagtcttcttcagctcaaactgatctccacgctgtagtggacttagatgaatttgttcatgttatttcattcaattaggtgaaatgtcacttgtgaagatctgacatttatgagaaaactgttacttatttctgtacggttttatggatcttttgttacttcagttgtaattgtatcatgccttttcgctggttggtctaccaatttctgtatcactaataagttgctaatggttattgcctcta

SEQ ID NO: 17486 - DNA, 727 bp, Zea Mays
gttatccttcaattttgaaagtggatcagcgtgtacttacatctgtggtgggaatctcaaggattctttaagcctaactttgaccgtggaggagatccatttgtcatcccgatgccaccaccaaatgttaccggatcactgcatatgggccatgctatgtttgtcacacttgaggatataatggttagatatttccgaatgaaagggagacctgcgctgtggatacctggcactgaccatgctgggattgcgactcagttggttgtggaaaagatgctggccgctgaaggtgtcaagaggacagatatgacgcgagaggagttcaccaaaaaagtttgggagtggaaagagaaatatgggggtactatcactaatcagattaagcgattgggtgcatcttgtgattggagtcgtgagcgtttcactcttgatgaacaattgagccgtgcagttgctgaagcattcgttaggcttcatgataaagggcttatatatcaaggaagtagaatactctgaagaacctggaaatttgtacttcatcaagtaccgtgttgctggcggaaccagggatgattttatgactatcgcaaccacaagacctgaaacaatatttggtgatgttgcaattgctgttaatccggaggataagcgttatgcacaatatgttggcaaattggctattgtaccgttgacatgtgggagacatgtccctattattgctgatcgg

SEQ ID NO: 17487 - DNA, 873 bp, Zea Mays
agaatggtcaataacaatgtacaggccgcgtcctggtgccacagctcgacgacgtccagatttgtctgactgaatgatggcgtgttccgtccaatccagcgagcagagcaggcggcggcagccccgcacgcgccgcgtccgtgcgcggcggccgaaaaaacgcgcgaggccgcccgcggtccgacgagaccgcggcgggaagagggaagcgatcgacggccggccgggcctagagctagagggcggaggcgaggtgcatcgtctccgccgcgaccgcgacggtgtcggagaaccgctgcagcgcctcgcgcatccacgggtgggggcagcgcgcgatggcctcggcggcggagacccactccctgcggcgcgcggccatctcgggccaccggtccagctccgcggtgacgcgcagcgggagcacgaagccctcgtacgtggcgtcgtagctgcggctgcggtagcaccagcggcccagcgcggggcccgtctcgccgagcacgccggcctcctccgcggcctcgcgccgggccgcctcgtccatggactcgtccagctcccacccgcccttggggatcagcacgccccccgcggggcccttcttctgcgagctgatcaccaggacctccacctcgccgtcgcccccgcgcacgcggtacgggacgcagcccaccaccacgcgcccgcccgtgctcgcgctgtaccgctgcagctcccggccttggcgagacaccataactgctgccatctctgtcggtctctgcctcaaattactcgctccttgtgggagaagggggattctctcaatgggagggaggaggatgagtgggcacggcacgggcaccacgcgacataagagaagacaagggaagg

SEQ ID NO: 17488 - DNA, 1366 bp, Zea Mays
ctagcctgtttggtaattggtactcggctccactcggcgagattcgggagcgcgcttccaaacgccgccgcgattcggcatcctgctcgcgtgagaagcgctcatccggcattccggctccaaccgtccattctccgccccgcttcgccttttttcccgtcgcttccttctccgctgctcccgccgcccttctccggcaggattcgacggcggcggcggtctctgcgagcctcctcttacttcacggctgcctggagggcttcccgagccgcggcgatctctcacagctcgccttcctcgtcatcctgcaccgctgcggcctcccgcgccgtcgagagtgagcgagttcgggagcgctaccgctaccaaacatggagcttagctggagcgggagcccgtgtgagctggttgggagtcctaccaaacaggcattctaaccctaatcgagtggtgccttccctagccgtcggctatggacaagttcctcgtgccggcgccgcctcattgtggcgaggagcccgcgccgcctcctaggagacaccggtggaggcgcatcatcgcggagctggacggccgcatagactccaggttccagcacagagattcgcgcctccttcttgattccttcaccgaggttggggccttcgatcacaagtattacattcatggcgaggaaaggtgtcggacatacgtggatcgaataattagtgcttcaactataaattttcatccagtaagggagggtgtttcagcaatagaattcgatagaaagggaatatacattgcatcagtgacactctcagggtgtctgacggtgcatgactttgagactttgtactgctctaaatatggcccaccatgcagtatgccagatgaatcatcaaattatgtgctccatatatctaaccgaattcccctaaatgctgtccgatggaatccaggaaaccaagacgagattgcttgcacatcaaatcaaagtgataacgttttcctctttgatattggctatgtctcatctacaccaactgaagttttgcataaaggaaaatcgaaattcccctcgctctactctgaatcctgcaagagtttgactgatataacttttacttcagatgataagtcacggatatttgcatctggccttgatggggcagtgtacatgtgggacaggcgatcaagtaagacacactgtcttgagcttgtggcatctccagaagctcagttcaacactgtcaagttaactgtggataatcggactgtgtttggtgcaactaaaaatggcacaattcatgttgggatctccgtggagggagggcatcagctgcttttcaaagccacaacgaggttcagcaattgatgtcagtgc

SEQ ID NO: 17489 - DNA, 2930 bp, Zea Mays
tcttcctcggctcctccaccccggtcctctcctgccgcgtcgcgttcgcccctcgcagcgggcaactcccaccgccgccgcttcgcatccgcccatctgcttccatcgtctcacggaggttttgccgctcgagtttagataagttccttcaatgcatcgtgttgggagtgctggtaacacagctggctcgactcgaccgagaaaagagaagcgcttcacatatgtactcaatgatgctgatgataaaaagcattgtgcggggatcaattgcttggcttatctagatggttccatatttagtacaagtgatcatctttttagcgggagccgtgatggtaccttgaaaagatgggaattaaataatggggatgcaagcttctcaggaactttcgagtctcatgttgattgggttaatgatgccattatagttggagacaagcttgtttcctgctcctcagacactacaataaaggtgtggaattgcttctctgatggtgcctgtaccaggactctccgccggcattctgattacgtgatttgtcttgctgctgctgagaataatagcaatattgtagcctctggtggtcttggtggtgaggttttcatttgggaccttgatgctgctcttgctcctgtagccaaatctgtggatgcaaaagaggatgaggttcctaatggaaactccgggcctgctttgacaacactgtgcagcataaattctagtagcaatattgcttcctctaatggtcaatcacatgggtacagtccaatagctgccaaaggtcacaaagattcagtttacgcactggcgatgaatgatacaggaacccttcttctctctggtggcactgagaaggttgtccgagtgtgggatccgaggacaggatcgaaaaacatgaaattgagagggcacactgacaatatcagagccttgcttgttgattctacagggaggtattgcctatcgggatcatctgattcaatgataagactatgggatctaggacagcagcgttgtgttcattcttatgctgtgcatactgattctgtttgggcacttgcaagcactcctgcatttggtcatgtctacagtggtggaagagatcaatctgtatacctaacagatttgtccacaagagagagtcttttactctgcacaaatgaataccctgttctacagttgtctctgcaagatgacacaatatgggtggcaacaactgattcttctgtttatggatggccagctgaagggcgcacaccccaaaaagtcttcgaaaagggtgcctcattcttagctgggaatttgtcattctcaagggcaagagcatctttagaaggatcggcacctgtccctgtatacaaagagccatcttttgttatcccaggagttccagcaataattcaacatgaaataatgaataatagaagacatgtactgacaaaggataccactggttcagtcaaattgtgggagatcactcggggtgctgttattgaagattttggcaaggtttctttcgaagacaagaaaaaagagttgtttgagatggtattactgaaatatgtcatgatttctatgttttattaaaaagtttggtacctactactgtgtaatttgttaattgattattaggtaagcatacctgcttggttcaccatggatgctcgattagggtgcttgtctgtccacctggatactccacaatgcttttctgcagaaatatatgcggttgacctaaatgttgctggagcacaagaagatctcaagattaatttggctcaagagacccttcgtggtttgctaattcattggagtaaaagaaagcagaaatctagttcacacagcttgtgtaatggtgatagttcaatagggaaagatgttccgtcgaaagactcgccccggtcaagacctgaggtcgacgatgccactcaaaaccatgcaactcatgtgcttccatcatttgagttttctacagtttcacctccatcaattatcacggaaggttctagtggagggccatggagaaagagaattaccgatttggatgtaactgagggtgatcttccatggtggtgtgtggactgcattactctcaatcgatatccaaaggagaatacaaaatgcgggttttatttacaccctgctgaaggctcgcctgcaccaaacataactcaagggaagcttagtgctccacggatattgcgaattcacaaggtagctaactatgtggttgagaaactcgttcttgacaaaccattggatggaggctctgatgcgtttgttatgggattgagttctgctcaatcacagctctcagttctagatagttcttcgcggcttggactaaagccatggcaaaaaacaaagccatgtattgagatattgtgcaataaccaggttctatcaccagagatgagtttggctactgtgcgaacatatatatggaaaaagccagaagatttgattcttcattacagagtggtccaaccgagatgatcacggcttcagatcacatggttctcagcatgcctgcaccataaacggtgtggttgaagacacccttggcttagcgaggaaaccgtcagaaatattttgctcttgggctccggtagcctttctcctagaatcccgacttcgtttgcttctttgtaaagttccttcctgatcttgccctggtagtaagatgtatcatagcacaggtataaggccctctgcttgtacatgtagaagatttgggtgcttaataaaggtcaaatggatttttttcgtttttctttgataaagtttgtaagaaaacgggctggttctcggctcagaccgtgacgttccgacgtcgattattggatttaaccctgtcgcatcctcttggttctgttagcgtaagaggtggacgggatgtcgggagcaataaagctgtttttttatatat

SEQ ID NO: 17490 - DNA, 4838 bp, Zea Mays
aggggcttcgttgaacttcgtttcacgagctgcctgctattcatgtgtccctgcagtgtcagacaggctcttcctttccatagtttcagtcgacagcggaaggacaattgcaaagtccagcaaagtagcttctcggagtgggatatgccagtggcctgacacaatcttggaacccatatggttctccaaggacgaagtctccaaagaattcgaagattgccagtacaagattattgtttccttgggatcgacaaaatctggcattcttggggagatttttctaaatctgtctaattttctgaatatagtcgatccaaccgcaatctctttgccactgaagagatgcaacgccggaacagttttacagcttaaggtccaatgtcttggcacaaagtctaagctgagtggtgtcagatcactgagggacatggctccccgtctcgatgaccgtagtccaacgccaaccaatgatgagatggacaataagtcagattgctctgatggtatgttcaacaggagtgttcgttcttcatccgaaaatcatctggttggaacttatcaagatgaatctggaaacagggaaacaagtttctctgcaccagggtcccatcggagttctaattctggagatagtactgcggatagaacaaacttctctcctagagacaactctagtggaggactttatgtgggaaggcaggattctgctagttcctatgctagttatgttagtgctggtcgtggcgatgatgggcttagatccaataattcatcttttagttctcgggcttcaggcccaaatttgctgcaagggaatactccaaaaatattttcaaatggcctttctcaattatctatgggggcatctgactcatctaaagatcttcttgaagctgctgaagaaacaattgaggagctccgtgatgaggcaaaaatgtgggaacgccactctcgtaagttgaaggctgatctagagatgctaaaaaaggagtgttctgaaaaatcaaagcaacatgctgagctagcaggcgagctatctgctgcacaagctgaacgggattcctataggcatgaaatagaagaattgaagtcatccttacaagatgtaaacacacggcaaacaattacaggaacacctaaacgttcagactggatagacctgcagaaggaacttgaaggtgaggtgaagtttcttagagaatcgaatgcggacttaaccatacaactaaacaggactcaagagtcaaatatagagcttctttctattcttcaggaactggaggaaaccattgaagaacagagagttgaaatatctaagatttcgaaggtcaagcagactgctgatcctgagaatgggcttttagtaaaagaagacaaagaatgggctaagaaactgtcaatgaaagacgatgaaatcacagttctgagggagaaattggatcgggctctcaacattggaaatgcaggtggtgctggttccaatgccatttatcttgaattggagaaagaaaatgaaattttaagggctaaaatacaagagcttgagaaggactgctctgaactaacagatgaaaatttggagcttatatataagctgaaagaaaatgggctcacaaaaggtcaggttccacgtatttcaaacaacaatgagctgcaatttgaaaagcttacatcccggattcgtcaactggaggaggaacttaggaataaggaaatgttaagagacgacagtttttctgagtcatcaacgtctaatgcagatgagttacagagaaaatgtgctgaccttgagctgaagctgctaaattttaggtctcaaacctgtgagctggaagaaaagttccaaaaaagccaagaggaactggaacaaagaaatctcgagttatccgaactgagaagaaagctaaacggtttacattctactgaactggaagtttttgaatctggtgcgacatggaagtaccaatctagaacagcagatctagaggatactgaacctgagacagatacgctaaaggctagatttgaactgcaactacaggaaaatgatgaccttcgaagttccaaggttgagatggaaaattttatttctgagattcaggcagagaagagtcagcttgaggaacgcctgtccgtgtcgcttaaagaaagcagcatcacatctaaatgcttggatgaagtgcggaaagatatccttgtgctttccagcagtatagattcccatgtttcagctaataaggttcttgagaggaacataattgagctagagagctgcaaagctgaactagagttgcatgtatcagagctggaacaggaaaacatagagttgtcagaacggatatctggactggaagcacaattgacttatctgacaaatgaaaaggagtcaagcgagctacagattcatgactccagatcgctcatcattaatctcaaagataaagtagagcggcagcaatccgagatggaaactcaaaggctcgagtttaagcagaaacaacaagaatctcaaagaagattgtcagaaacacaggatgattctgaagttctgagaagatctaattctaaactacaatctactgttgagagccttattgaagagtgcagttctcttcagaatctaactgctgatctgaaaaggcagaagttggaaatgcatggtcatcttacgcaaaaagagcaggaactggatgagtcgaaaaaaaggaactttgagtttagcaaaacagtggaattccttgaggcaaagctttcgtcactacataaggacgtttcttctaaagagcaatctttattgtcagaattggagagtatattccaggagcacatggaacaagaagaaagaattaatcgcgcgcatttcatgctcaataagatcgagaaggaaaagactcttgaagtagagaacctcaagagggaggtcgtcagcctcactgcacaggtctcctccacacatgaggagcgagaaagtgccactctggatgctattagagaggtatctgtcctacgagcagacaaggctaaacttgaggctaatcttcaagatgtcagtacacaattgagacattacgagtctcaattggaagacctccgaaaggagtctaaaaataagattaaagggttggttgattcccttaatgcctccaaacaaagcgaggaaatgttgacatcagatgctgaacatatgaaaaagttgatggaagctgctagatccaatgaagacacgttaaggaagacttctaatgaactagaattgaagcttaaatccagtgattatgagaaacaacaaatgctggaagaaatatctggcctgaaactgcaggtccagaaaataatgaatcttcaagatgaggttttcaaacttcagagttctcttgatgaggccaagttcggaaaagggaaactggaggagattctacgctcggtgaccgaggaatgtgaagaactaaaagcacagaaggctatgctaacagataaagtttctgatatgcaggagactttgagaaatggtgaagaagaaaaacgaaacagaatagctatgcaggcaaagctcgtgaggctggagagtgatctgtcagcatcagaagcatcacatgtacatgaagcagaattaaagaacgaactcagcaggatcaagagatcaaacagtgagtaccagaggaagatacaatctcttgagcaggaaaatgaggatctcactagaagagttcaaactatggaaaagggatttgagcaaatgtcccacgttaaagagaaccttggaaagcaggagcttggaggagataaccaggcagccattcagtcaaaaattgagttattggaaacgaagctcgcagaggcattggaggaaaacaagatgtacagagctcaacagaagagtccgatgcctgaggggcaaccttctgcgggagcgggagacggcaaggagggcaataccgataggattttgcaattggaaggagagctaagagatatgaaggaacggttactgaacatgagcttgcagtatgcagaggtggaggctcagagggagcggttagtgatggagctcaaagccatgaagaaaggcaggtggttttagcaatgatggagaactgttgcctgacataaaacagacacaggctgactgacagcacagatgggcatgtcatgtgagagcaagcaaagcaaatgcaagtgatgcagagcctggacctgctaactggtgctggaagatgtgtatcccaagacgacactgaaggtccctgtgaccacccagcgcccctacatgacatgatgatccaattgttattggtatttatttttaatggcgtgccttttcatcttgtatataatatacgccggtttgtgaggagcttgactggtcagttgttgatatgattactgagatcgatgactccgatctctctattttacacccttaattgtcgataaatgtagttactctattctttctttctttcttttttgagacagcagtggagtggctgggttagtgggtagcagtcattatgttgcactcatacaatattgttttagtttgggtgtagaataatgtgacgaagggagacccatttgttcatgtaagtttgtttgtttgtttgtttgtttgtttttacagcgtagatcacggataataatgaagtttccgttgtgcggttgtggtacgtgcatcgcattattgatgaaacttttaacctcaggagggcaaagtgttgccagctgaattagggaccacacgattgcattggtttagaagtgttgtaactaaagatatactactaattagctagtgtttgtactacatctcctctcaccctggtaccagtgcacttgcg

SEQ ID NO: 17491 - DNA, 2694 bp, Zea Mays
ggattgacaaggcgccacaccaaaacacgccgcgggtggggcgacaccatccgctggcgtgggcacacgtgagcacggtgccccagcagccaccagatgaagcagcgcacctgtcgtcgacacgctgccgcacggtggtagaaaagcagttgaaacaccttccgtgaagatcaccaggaacaaccctgggaggtggcttcgagggacgagagcgtcgccgccgagctttttcgctttccaccttcacccaaccgtcgccatcctcttttttgttggggcaaaagacaggagacttggtagataacaaagcgtctttgaagaaatcccgctggacaggacaaccatcaatggaggaagcagggtagtcgtccctccatcgctgggctttggatcgactagtagccagagaaggggatggagtggtccccggcgccagggaaggaaggtgggtggccgccgggcttggagcagacaccggcgtggggctgagaggccggagagggagtggagggtgggggactgggggtgagacgacacatagtagatctaggagtcggtttagctagataaaagggagaagattatctaggagtcggttatcagtccttgtttagtcttatgccttcagtagttcaattactacgtctttgaaataagtgatgaaaactattgttgtgagggcctgagcttcctctaggacttagggcatgtacaacccagagactttggaacgggttttccaagtataatacgtgctacatccctaagcttttagatcataaatacaattaagatacaatatatataaagagtcgtgtagagacagtctgttcgcgaagagcctgcctcttgtatttttttttcaattaccacttggagacccctcaagagaccccgtattaaatggagttgtacatgcctagcgaggccacacggctcgattgatttgtttgttgtgttagaagccttgttgctgtttgcctgtaagcttattccggtactgatttgtgttttaggcgtcgagatataagtgtcacgggagcagggagtactgaaagaagatttttgtgactggttcaggaggaaatttgttcctaattgttgtgtagcttagatcttgtgtggaggtttcctatttagttgggataaaggatgttttctgtacttccatgatggtgtattcagcaacttgttgatcactatgctagcgagttccaacactggtttgtgctttaggtgttccgactcaatcaagcatgaatgatcaaggaggaggcgatctagttaatttaggagaaatttggtttataggcgtgaccttagatctaattggtcttctcggtcttttctgggacaaaggcaattttattgtttgattatttaatcagcagcttgatgcatcttatctgtcaatcactactcctttgaaaactgacggaacatgttgctccttttaggttaaggttgcaggcttttagcttgggattctgaaagatggggacctcttctggcgcgaatttccatcagcaacctcctccgacccaggggatgttgcctccaaggcatggtccacgcccctcagggttgcagacctcgctctcgctggcctcttcggagcaggttggctcgcctgacatgcaggagcctggttcaaactcggagccagggcatgattccgccactgagagcgccagttccaaagacacatggccagctgagccgaaccagagcaatggtggagtggctgccagtgatgttgtgagtaaggcggcggagaaggaggtggcaaatggtgtatccaagccgcaggttatccatggaccctcctcccgtatgagtgggatgcttctgcgggaggttgcacgggagagggttgatctggtcgctgagaagatgaagatgatgtcggatgagcacctagaggaggtcaagaatgagctcaggtcgattctggagggcactggaggttctcaccacatcgaggagttcttgtacttgcagaagcttgtccaggacaggcatgatttgacaccatccatgctttcagtggcacaccatgtgcagcttgagatccttgttgcaatcaagactgggatacaggcctttctgcaccccagtgttaccattccacacaatcgcttggtggaggtcttcttgtacaagaggtgccggaacattgcttgccagagtgctctccctgctgaggagtgcagatgcaacgtgtgcgctagcaggaatggcttttgcaacctgtgcatgtgtgtcatctgcaacaagtttgattttgaggtcaatacatgccgttggattggctgtgatttttgctctcactggacacatacagattgtgcaattcacaatggccagatcggaatgggacaatcagtgaaaagcagcattggtcatgctgaaatgctttttaggtgccgagcttgtcagaggacctcagagctgctgggttgggttaaggatgtcttccaacaatgcgctcctggttgggatagggatgctttgttacgcgagcttgagttcgtttgtaagatattccgtttaagtgaggatgcaaaagggagagtgttgttcaggaaatgtctagatctgattgaaaggctgaggaacactccagctgattccatcaatcctaggatgatactacaagcactccaagctttctgacttctgagtatattgatg

SEQ ID NO: 17492 - DNA, 1087 bp, Zea Mays
caacacgttctgtcgttctcgcttgaggcggcccgcggccttctcgaagccctccgctcgctccgtgctcgtggctcccgcacgatccccacattccttggccggctccgcgctcgtgctctcgttgggatcgttgtcagttcagtggaaatgcattcttcggcaatgccacacccagtgatcagaggcacattgagaagccttttaaagtgaaggaggcagaacctgtgaatgtgacaaaaccttcaccacacaagctgctggttctaggaggaagtggtttcgttggatcacacgtttgcaaagaggctttggacaaaggtttagttgtctctagtcttaatagatcgggaaagccatccttaaatgaaccttgggctgacaaagttatatggaaccaaggcaacctccttgaaccagcttcattgaaggatgctatggataatgtttctgcagtggtatcttgtgtcggaggttttggatcaaattcattcatgtataagattaatgggactgcaaacatcaatgccatcagggctgcagctgagaaaggtgtaaagagatttgtatatgtgtcagctgcagactttggattagtgaattatttattgcaaggctattacgagggcaagagggcttctgaagctgaattgttgtcaaagtttacatatggaggagtgatactgaggcctggttttattcatggaactcgtcgagtgggcagtgtaaagatacctcttggtcttgtcggttctcctatgcagatggtgctccaaaatataaaacctttgactaggttaccacttatcgggccgctattgactcctcccgtcagtgctgcctccgtggggaaggtcgctgtgagagcagcgacggatccggtgtttcctcctggcatcgttgatgtctacgggatcatgcgttacagcgagcaaaactaagctgcctcattcaccgggcagtatatacatgccgctgtacttttgttacagctgtttctttgtttgttttacatgtactggtatccttctttaactcacttgtttacgagacgataaacattcaataaatatgtattttagcgaca

SEQ ID NO: 17493 - DNA, 1714 bp, Zea Mays
cccgattcttgcctacttcggggagcagtactgcgcatcgaatccggctattttcatgcgtttcctcaagattcttgctctcgtggactcaaactagagctggcttcgccatagacttctggaggaggcaacgggattgggaattggaacatggggagttcggtcggctgcttgggaggcggctccaagtcgaggcaagatcagaatggtcaggtcgtcgcgggttcgtctccccgttcaggtcatgaattatcaagacctggaaataatgtacatgtattctccctaaacgagttgaagactgccacacgaaactttcacatgttgaattgcattggccgtggggggttcggagcagtgtataagggaaacctgaaaaatggcactccaattgcaattaaaaaacttgcagctgagtcaaaacaaggaattagtgaattcttgacagagattaatgtcatatcaaatgttaggcacccaaaccttatcaagctgattggttgctgtgttgaagggagtaacagactattggtgtacgaatatgcagagaataatagtttggcgaatgctttgcttggaccaaagaacaaatgtatcccattggactggcagaaaagagttgctatatgtattggaactgcttctggccttgcttttcttcatgaggaagcacaaccacggattgtccaccgtgatatcaaggctagcaacattttacttgataagaagctgctgccgaaaattggagattttggattggcgaaactctttcctgatactgtcactcacattagcacgcgtgttgcaggaacaatgggttatttggcaccagagtatgccttgttgggacaattgaccaagaaagcagacatatatagttttggggtgcttcttcttgaaatgataagtggtgaaagcagcagcaagtcgacttggggacctaatatgcatgttctcgtggaatggacatggaagctgcgggaagaaggaaggctcttggaaattgttgatccagaactggaaaagtacccagaggagcaaatgcttcgtttcattaaagtggcactgctgtgtacgcaagccacgtcccagcagaggccgtccatgaagcaggtcgttaatatgctatctaaccaaacagaaattgatctgcaaaatgtagctccaccaggtgtgctgaaagaacctcggcagcgtaccggtggctttgggggtttgatagcagacacgtcctcaagccaaagcactaaaggcaacccagctgaatcatacagcacacagaccaacatgaacagctctcagtttagcacaactgatgtatcaccacggtgacgttgtcgactattgtttgacgtcttcagaggtgtctcgcgcctcccacaaggtttattgtgctgagcccggacaaaatcgcttgatatggaaggcctgatccattttcatcctgttttagagctacgtaggatgcgaaggccgctgtgaattgctgatgtacaggaattgtagctcatctgtttttcttttctgcggaggatgatttgcagttaaatttgacattttttttatgttctccattaaagcctgttgtaggtatacattgcaagagtacaagacatgtattcgaaatttcaaaaattcatgaagactactgtagctttccttcatgctttcaacaacccgtgaaactcttcatgagttagaaaaaaaatggtga

SEQ ID NO: 17494 - DNA, 2410 bp, Zea Mays
actccttttttctcctctcaatctcccccgtctcccccctccctctcccttgcttccctctccagtccccagcgcgcgcgacacgacacgggccaatcacccagccgccgccgccggcgatcgccggaactcggcgccggtgcttccgagcacgctccgctcggaaccatggtgaggagcgggagcatacggcggtccgcggtgcccgcgcctatgccggcgccggcgtttaccgtgtctcccgccgactacaggctgctggaggaagtgggatacggcgccaacgccgtcgtataccgcgcggagttcattcccaccggccggacggtcgctgtgaagtgtctggatctcgatcgggtcaacagtaacctcgatgatgtaagaaaggagactcaaactatgagcttgatagatcaccctaatgtcatcaggtcttactgctcatttgttgtgggtcataatctttgggtggtaatgccattcatgtcagagggttcatgcttgcacctaatgaaggttgcatatcccgatggttttgaggagccaattattgcctctattctaaaggaaacactcaaagctctagactacctccataggcaaggacatattcatcgtgatgtgaaggcaggtaatatccttattgataatcctggtgtagtcaagctcggggactttggtgtctctgcttgcatgtttgatagaggcgatagacaaagggctaggaatacatttgttggaacaccatgctggatggcaccagaagttctccagcctggaactggatataatttcaaagctgatatatggtcgtttggaataactgcactagagctggcacatggacatgctcccttttcgaagtaccctcccatgaaggttcttctcatgacgctccaaaatgctcctccaggtcttgactatgaccgtgataaaagattttcaaagtccttcaaggaaatggttgcgatgtgcttggtgaaagatcaaacgaagaggccaacagctgaaaaattacttaagcattcttttttcaagaatgcaaaacctccggagctaactgttaagaacattttaactgatttgccccctctttgggaccgtgtaaaggcactccagctaaaggatgcagcacaactagctttgaagagaatgccttcttcagaacaagaagcactttctatgagtgagtaccaacgaggtgtcagtgcatggaacttcgatattgaggatctaaaggctcaggcatcactgatatgtgatgatgatccacctgaaataaaagaagacgatgacactggtagaataactgacattgataaggatacatcttctgacgattattttggaaagacagcaccatcgaatggaaataactgcagtgatcgttcttctgtgccagcaaatcctggtcaaaatggtcccgaaataaatgaaatattgtcttccaacaatgggaatgcctacagtgaaaggaagcctgatggacgtaaaaacccagaatcagaaaatgattcattgccctcgacgtcgaagcatgatgctgatgggaaagattatagatgtgatttcaggcaaaaacagaggacatactcaggtccagttctgcaatctggtccgaataatagttcgatgactgaaaggggccacattattgaaagggatgcaggagttcaatctgtatctgataaacaaaagaatggtacaagaagagccaataatcttagtggtcctttgtcacttccaactcgtgcttctgcaaatagtctttcaagagccaataatcttagtggccctctgtcacttccaactcgtgcttctgcaaatagtctttctgctcctattcgatcttctgcaggttatgtaggctctttgggtgataaacctaagcgcactatggtggaaattaaaggccgcttctcagtgacatctgagaatgtggatcttgcaaaggttcaagaaattccagggagcagtgcctcacgtaaattgcaagaggggccttcactgagaaaatcagccagtgttggtgattggtcagcgaatgataagacaacgtctactaatcatcaaaggaaggaactctgcaatagctctgtatctacatcaattctgattccgcatcttcaaaaccttgtgaagcaaactgcattccagcaagatctgattacgaacctactaagtagcttgcaacaaaatgagagagtcgatgcagctcagtcaagagtccagagcacgacgagtgatacagtggttgaagctgctactgctgagagagaacactcgttacttgttaaaatttttgagttacaatctaggatgatttctttgactgacgaattaattgcggcaaagctgaaacatgttcagaaacacgctttcaaaaccataataaacgatcgactcaggc

SEQ ID NO: 17495 - DNA, 1076 bp, Zea Mays
cttacctatatcgcagattggttgttaatccggcctattatggattggaggatactgaaacaaacacattgaattcttatctatcaaggttagtcgaaactacatttgaagatcttgaggacagtggatgcataaaagtggatgaccactctgtaaagtacttgattttggggaaaatagcttcacagtattacctgagctacctcactgtttcaatgtttgggtcaaatattggccccaacacaacgttggaagtctttctacacatactgtcagctgcatcagaatttgatgagcttcctgtacggcacaatgaggacaatttgaatcgaatactcagcggaaatgtcccgtatccagttgatcaacaccaccttgatgatccacatgttaaagccaacttactctttcaggcacatttctccagagcagaattgccaataagcgactatgtcactgacttgaaatcagttcttgatcagagcatacgcatcatacaggcaatgattgatgtatgcgcgaatagtggatggcttacgagtgcattgacttgcatgcatctcttgcagatgatcatacagggtctctggtttgagagagattatgaatccctctggatgttgccatccatgaatgatgatatattagaccatctcaagagtagaggagtctcaacagtcccctccttactagatctttcccgtgaagaattgcgtagggtacttcaaccattttctgcgtcagagttgtatcaggatctgcaacatttccctcatgttgatgtgaaagttaagcttcataatgaacaggagcgatccaaacctccaactttaaacatcaggttgcaattgaaaaattcgcgacggtcagcatcaagagcatttgcccctagatttcccaaggcaaaacaagaagcttggtggcttgtcctggggaatgctacaagttcagagctgtatggtctgaaaagaattagttttgcagatcgggtgattaatactcgcatggaattgccacagacgttcaatgtgcagattgtacagttgcgcctgagacatctattactacacagttgg

SEQ ID NO: 17496 - DNA, 3955 bp, Zea Mays
cagatccgcagcgattcggccaagtcccgaacggccgaacccctctcccgctgcatcaccaccacctctcttctctttcctcttcgatctcgatcgccctcgcaattcctccgtaaagcgcccctgccctgggcgagctatagcgcgcgcgcccagatctgcgcggtctcgccggcgatggcgtgcatcaagagcgcgcagcgggcggcgctgacggcgttggcgccggacgcgccgtacctcgccgcgggcaccatgaccggcgccgtcgacttgagcttctccgcctccgccaacatcgagatcttccgcctcgacttccagtccgactccccggacctcccgctcctcgccgccgcgccctccccggaccgcttcaaccgcctctcctggtcgcgcccgggcgccgtcgagggcgactccttttcgcttggactcctcgccggtggcctcagcgacggttccgtcgccgtgtggaacccgctgagcttgatcagctccgaggggaaagcggaggacgccatggtcgcgcgtctggagaagcacaccggaccggtttgtggactggagttcagtgagctgacaccgaatcggctcgcttctggggctgagcagggggagctttgcatctgggatctcaagaaccccgttgagccaattgtgtaccctccactcaagagtgttgggtcccatgctcaagctgaaatctcttgtttatcctggaatcccaagtttcaacatatagttgcctcaacttcgagtaatgggatgacagttgtttgggatttaaggaaccagaaaccactgactagtttttcagattcaaatcgaaggaaatgctctgttctccagtggaatccagatatgtccacccagttgattgttgcatcagatgatgacagttctccctcactgagagtttgggatgtgaggaagaccatttcaccagtaagagaatttgttggccattcaaaaggtgtaattgctatgtcgtggtgtccttatgatagttcattcttgcttacatgttcaaaagacaacagaacaatttgctgggatactgttagtggagagattattagtgagctacctgcaagtgctaattggaactttgaccttcactggtaccggaaaataccaggtgtcattgcagcatcctcatttgatgggaagatcggcatatacaacctagagttctctggtatttatgcggctggcgatgctgttggtgccccagcgcgtcaaagggctccggttccaaaatggttgaaatgctccactggtgcatcttttggctttggtggtaaacttgtttctttccatccggtggcacccacccaaggtgcacaagcatctacatctgaggtgcatgtgcacaatttggtgattgagcaaagtctggtgagccgatcagctgagtttgaagatgctattctgaatggcgacaaaagttcgctgcgtgctctgtgtgaaaaaaaatcacaagaatctttatctgatgaggagagagaaacatggggcttcttgatgattatgtttgaggacggggattttgtaaggacaaaattgcttgctcatcttggcttcgaaccacctcaggcaccacctgcaagttcacctgatgaattgagccaaacattggcagatacacttaatcttgatcacgccacaataaccgattatgcagatgcccaatttcttactgataacggggatgattttttcaacaatcctcaaccttcagaggctagtttggctgaagatttagtttctacaaatggtcaacagacagagcaggaaatgtctggagatgttgtgccgtcagatccatcaattgacaaaagtattcagcatgcattggtggttggagactacaaaggggcggttaaccagtgtctttctgctaatcgtatagctgatgctttggttatagcccatgccggtggttctgctctctgggaaagcacaagaaatcattatcttaaaaacagtatctcaccttacttaaaggttgtctccgctatggtgggcaatgatttaatgagttttgtaagtacctggccactaagttcatggaaggaaactcttgctctgctttgcacgtttgcacagaaagaggagtggcatgttttgtgtgacacgcttgcgtctagacttctaaatatcggagatacactagctgcaaccctctgttatatttgtgctggaaatattgataaagctgttgaaatatggtcccgcaccttgaaatctgaagatggtgggaagatttatgttgatcttctccaggatttgatggaaaaaaccattactctcgcccttgctacgggccacaagagatttagctcatcactgtctaagcttgttgagaactacgctgaattgctggctagtcaaggtcttcttaaaactgcaatggagtatttaaaactgttgggatcagatgaacattcaaatgagctggcaattttgagagatcgaattgcatgttctatggaagagaatgataatgctaggagttatgtttctgaaagcaccgccactccttccctttatggcacaaatcaatcttatacagccccagaccattctcagaatgtttaccagccatacaatgtaccaagtaatacatattcagaagcttacccacaacaacctactggcgcctatggatacaacaacacatatcaacctcaacaaccaacccatatgtttgttccacctagcgcccctgccagctctcagcaacagccaggcccttcacctgtaccagtgcctcagcaaacagtgaaggcatttactcctgcgaacccagctggtctaaaaaatccgggacaatatcagcaacctaataccctaggttcccagctttacacgggcactgcaaatcaacagtatccttctggaccatctgcttcttatccaagcggacctccaacaacatttcatcagcctgtatcacctgttcaataccagcctgttgctccaccagtatcttcttttggtccgagcgctcctgtaccagcaacagtccctaaccagatgtttccccattctgctgctgctaactcaacttcaaggttcatgccatcgaacaatcaaagctttgctccgaggccaggtctaagtcccgcacagccctcaagtccaacacaggtgcaggcacagccagctcctcctgcaccgcccccgactgtgcagacagctgatacgacaaaagtgtctgctgagttgagacctgttattggtacactaactagactattcgatgagacgtccaaagctctgggaggatcacaagctactcaagcaaaaaagcgtgaaattgaggacaattcaaggaaaataggggcattgttttcaaaactaaatagtgatgacatatctccaaacgttgcatcaaaactcaggcagttgtgcagtgcaattgatgctagcgattttgccactgcgatgcacctccaggtactcttaacaacaagtgactgggacgagtgcaacttctggctcgcggcattgaagcggatgatcaagacaaggcagaatttcagaatgtaaaccttgtggcctttttctgcagccagttctgtacacaccttttttctgctgcttgccagaaatgatagctgtagcagttcagagagtttgcctgcacaggggtgttatcatgctgctttgttctcggcccttgattctgcctaagcgctttggtacctcagtgctgttatacattttgataatagttttttgttttcgacatctgctataaggtgacctgcggctgggttgttcgttatgaatgttaattgtaagaggacacttagtctgttatagctggtggatcacctgtttcaattcttcctcttagatttcgtcagtttggacattccaagaactctagatggttaatacaagtgacagtggcttgttttttttttttttgtttaaattgaaa

SEQ ID NO: 17497 - DNA, 233 bp, Zea Mays
gctgacttaacagaatatccatcagtattctacaatgatcaatacagatcattgatccctttcatgtcatggtctattcaaaaggaaaatccacttctgagattaacagttgagaactgtgagttgtccagtattggtgtgattatacttctggactgcctcacaaatgcgaagcaactccttgatgtgttatctattgcagacaatcatctagggagtcctgtggcagctgc

SEQ ID NO: 17498 - DNA, 2344 bp, Zea Mays
cccagttacaagaagcaattctattgattcctcgtggtataacagttctcatggacatgcttatggaccgtgaggtcataaggaatgaagcactgttacttcttacttatttgactcgggatgcagaggaaattcaaaaaattgttgtatttgagggtgtgtttgagaagatatttagcattattagagaggagggctattccgatggaggtgtagttgttcagatgcttttgaaagagacaatgggctttgacccattgatatcaatactaaagattaggagaggcagtgcatttaattttacccaacagaagacagtaaatcttcttggtgctttaaatactgtggaattgcttttgatggggggcccatctggtgaagcaggtaaagacgctaacaagaatgcaaatcaaactgcattggctcaggcactgcgatgtattggcaatttggtattaagaaatcctcagaatcttgattctcttgcaagaaaacaagttggagaagagcctcatgttcaacctgcactgaatgccatcttctctataatcttgcggacctctgtagcgcaggaatttgttgctgctgattatgtattcaagtgtttctgcgagagaaatcctaatggccaggcattattagcatcaactattgttccacatccgaaccaaggaaatatgcatgaacctgctatcgacatgccttttggaagtgtacttctgcaagcactggtttcaagtgatgtcaatggagatatggaggcatgttgcagagcatctagcgttctttctcacattgtcaaggacaacatgcaaagcaaggatcgtgtattgcaaattcagcttgagacacttacaccgtccttggggcgcactgagccagtattgcatcgtattgtcacatgtttgtccatcgcagcctcaacagagggagaaaacaaccaaaacaaccaaccagaagaaccgtacattcaacctgttattcttcggctactcatcatatggcttgttgattgttcaaatgctgttaactgcctgttggaatcagcagtgcatctgaactacataatagagcttgcttcaagcaaacgttacactgcttgtgttcgtggactggctgctgttgttctaggtgcttgcatcctgtacaatgctagccatgagaagggccgtgatgcttttgctgttgcagatgctataagtcaaaagattggcctcacaacgtacttcttgaggtttgacgaattgaggagaagcttggcacatcctttgccagagcagcatcatcgcaaggagctttcccgatcaagtgcgaatagcatgtcagatttccaagaaattgaagaggatgaaacaaataaagatgatcaacaccctgtcctctcagaaatatttgattcacagtttgttaattttcttagtaagctcgaggctgatattagagaaaacataatggatatatttagtcggacaaaaactgcaactgcactccttcctactgaattggagcagaagaacggggaggttgatggagagtatatcaaacgactaaagtcgtttgtagagaaacagtgcaatgagatgcaggacttgctggctcgaaacgcaatgttagcagaagagttagtgagaactggtggtggtaccaccacagatacttcacagagaccgaacaacgggcgagaaagggtccagatcgaagccctgagacaagaactggagggagcgagacgacagatagaggcactcgaaactgacaagtcccagatcgaagccgaagctaacaaccaacgaaaccttgcagtaaaactggagtccgatctcaagagcttgtcagaagcttacaacagcatagagcaggccaactaccgcctggatgccgaggtaaaaaccttgcggcagggaggcagtgtgccgtatcctgacgtggaggcaataaaggcgcaagccaaggaagaggctgagaaggacagtgaggcggagctgaacgatctgcttgtctgcctcggtcaggaacaaactaaggttgagaagctgagcacaaggctggcagagctcggcgaagatgtggatgcccttctgcaaggtattggtgacgacactgccattccggacgatgatgacgacgacgatgaagatagtgaagagtgatatgtttatgtaaccctgtaggtctgttggtgcacacaacctcacgttgggtcatgatattgtaatggcaattggcattgtacagtggataatgtgtagacaaaggcaccgttccaatttaagttatttgtggagaaactagttgaaaactaagtggcggaccgtccggtcccggacggtccacacctcgcgat

SEQ ID NO: 17499 - DNA, 177 bp, Zea Mays
tttatattacattgataccttcggcttgtctgaaggtgaaaatgtgagtgacacgagagcgattacaatgcagtgtgaacagtacggtgctactgttcatctatttataggcacgggatacaacccgagcaaaattacattcatatccctgacatttactggtaatcataaggcctg

SEQ ID NO: 17500 - DNA, 1635 bp, Zea Mays
ctggaaccaaccacctcatccgtctgcgtgtgcgcgctgactcccccctctcccaaaacccccacactcccccttcggcatctccgatatccgttcagcaatgaccatgaacgctgcgatcgcctcccgactcggcctcgccgtctccaggtgtggggctgggtcccgagtggacagccggccgctgacgccggcagtgggtttcacggcggggccgagggcgcgctcagtagccgtcaccgccgcctcctcttctccggcgaccggtggcgtgacgccggtgccaccccgctcgaatcgctcgttgatgatttatcaatggaaccacaagttgaaagagaacttatgcttataaaagtaaatgcagagcgagaaaagttacctgagataatgggtttggttcgcattttcaaagcagaagtggttgatctttcagactacacactaactattgaggtaactggagatcctggaaagatggttgcaatacagaagactctgagcaaatatgggatcagagaaattgctagaactggcaagatagctttgcgccgtgaaaaaatgggagaaactgctccattttggaggttctctgcagcttcttatccggatctcgaagtggcaataccttcaaatttccagcaaaacactggtgtgaaggcaatcaatcagaatccggaagaatcttcagggggtgatgtttatccagtggaatcttatgaaagcttctcatcaacaagtcaaattctggatgctcattggggtgttatgactgatggcgatccaacagggttttgttcacatactctatcaattcttgtgaatgatgtccctggagttctcaatcttgtaacaggtgtattctccagaaggggctacaatattcagagtcttgctgttggcccagctgaaaaagaaggaacttctcgcatcactactgttgttcctggaactgatgaatccattgccaagctagtacatcaactgtacaagctcattgatgtttatgaagttcaggattttacccacttaccatttgctgctagagagttaatgatcataaaggtcgcggcaaatgctacagctcgaagggatgtcttagatattgctcagatttttgaggcacagaaagttgacatatcagaccacacaattacactactgctcaccggagacattgacagaatggttagattgcaaaagatgctagagcagtatggcatctgtgaggttgcacggacaggccggattgctctgctccgagagtctggagttgactccaagtacctccgcgggttttccctcccgctgtaattctccatttccagacattacactgcgcgatttcaggtcgccacggtcattttgacttctgagaatggagctggaggaatcattcaaaaatccaagggtgagaactgtagaaataatagctgttaagtttcttgcttctgcaagtatcacgcagcacatggggagagatgaagtatcatacacaacaatatgtctgcagtcagaaacgatcgatgaggggtccaatatttttttcactacacatgttgtatacgtacactggtagtatcctagttgaaggaaacgcaatatatatatattcactacacatgttgctcaacc

SEQ ID NO: 17501 - DNA, 1660 bp, Zea Mays
ttgtattgtatcgatcattatccgtgcaaccagccaatgagccaaccacccattccaccaccctgcaattccagtccgatttggacattgtcttcgtctccttcatcccctgcccacctgttctgctctgccgccgccgccgctgccgctcccgctgccgcaggaaccctagaccacgctgagcaacccccggcctacacggcgtagctttgcaggaaatggaatacggcgccgtcctcgccgccgcgccgctcgtcgcacggccgaactggctcctcctctcgccgccgccactggcgccgtctattcagattcagaatcgtctttattcgatctcgtcattcccactaaaggctggacctgtaagggcatgcagagctttagcaagcaactacacgcaaacatctgaaacagttgatttggactgggagaacctgggttttgggattgtgcaaactgattatatgtatattgctaagtgcgggacagacgggaatttttctgagggtgaaatggtgccttttggacctatagcgctgagtccatcttctggagtcctaaattatggacagggattgtttgagggcctaaaggcgtataagaaaactgatggatccatcctattatttcgcccagaggaaaatgctgagaggatgcggacaggtgctgagaggatgtgcatgcctgcaccctctgtcgagcagtttattgatgcagtaaaacaaaccgttcttgcaaataagagatgggaaggtttagcaccaataaatttgatagttgaagacaagttccatcgtgctactcctggtggtactgggggtgtgaagaccataggaaattatgcttcggtgttgatggcacagaaaattgcaaaggaaaagggttattctgatgtcctctacttggacgctgttcacaagaagtaccttgaagaagtttcttcatgcaatgtttttgttgtcaaggacaatgttatttctaccccagcaataaaaggaacaatattacctggtatcacaaggaaaagtataattgacgttgctttgagtaaaggcttccaggttgaggagcggcttgtttcagtggatgaactgcttgatgctgatgaggtattctgcacaggaactgctgttgtggtgtctcctgttgggagcattacatatcaagggaaaagagtggaatacggccaccaaggtgttggcgttgtgtcccagcagctgtacacttcactgacgagtcttcagatgggtcaaaccgaggattggatgggctggactgtgcaactgaattagttggccgtggttcgtggatcattcccaacagatgatgggttcgcaagatccaaatctggaggatcacaaccatgtgtacctcttcggttacagttttgtagtgtcttatgcgatggcgtcctgctgtatatttcttagacggtatttaaaccataaaacagtattcgtctgtacgactgtacccttcagttctgtagcatctgccggagacgagtactagttttgttattttctttcttttacaaaccaagaacagttctatagttttattgtagacactggaccatcatatgatctcaatgggtagctttttcctttttatatttaaaaataaacagaattttaattttataaattttatattttaa

SEQ ID NO: 17502 - DNA, 1798 bp, Zea Mays
gtccgctacaactataaggatctttgcagcttatcttgtagccgatatataaagagtcagacatagaagagcgatctcaagaactgaagaataaggatgatgccatcatgaacctggagaaagccattgaagagaagtcaaaggctattacctctatgctggacgagattgcttccctccaggcaaaagggtctgtagctgccgaggagcaggctaacaaggccaatgccaaggttgttgagcttgagaagcaggttgacaagatcaaaaaggatattgaagcacaaagcagccagaaagcagcactagagtatagggccaacgatgcagagaagaaggtggaagtactgaatgaaaagcttaatacaatccaaaaggaaagtgatgagaaaaaacgcaaaatcaagaagacagaacgtgctcttaaagtcgctgaggaggaattaatgaggttgcagttagaagtaactgctaaatcaaaacagctgtcagaggttcatggagcatggttaccaccttggctaatggcacaatatgcttgttatgcggaggttgtctcaggtcactgggatcaacatgggaaacctgctgtgcagaattttttgcataaggcatcagaaaaatcagcacaggcaaagaaatgggctgaacctcatatcgagactgctaagatgaaatggattcctgttaagcagaaattggttgccctcaagaaaaatgcagaaccttatgtacaaaaggtatcaacaagatcagtagagttttacgagtcatcaagggatgctgtgacacctcatgctgtcaaagttaaagtgtttgttcattcctactaccagaaagccaagaagttttctaagccttacattgatcaaattgctgagattactaaaccacatgttgagaaaattagaactactctgaagccatacactaagagagcagttcatgcatatgggtcatttctcaagtcggcaaccacataccatcgacaggctcaagcaagcatcatggactaccttcaccagcatgatataacaaaatcattggcaactaaggagttagtttggttcctggcttctgctttgctggctctgcctgtcttcattatatacaggcttctagtagggaccttctgctccaaaaagaataaaaggcctcgtagtagtaatggtaaccatggccacaagagatacaagcggcgacatgctgacaagtagatcagtttactgaacactttagggttcagtatgctgtgtaccgtggcagatctttgagcaggattgggtcatgggcacccttaccttgaaagcattgtacaccaccaacatactcttctcttttgcattttcgtcccaggtgtaatatggacttcagtgcagcagaccttttatctgcactttgctgggttcatgtggttatgcctcggcctttgtttgattggtcatttgtttattgtaacttgtgaatgcgtttgaatttgtatgcttgttcttgtcggcgacctacattcgaacttaatacttatgtatacagtggttggtttagctaataactggatgtctcctgttcacttcgttcatgtatggcttggtcgacaccatgatctggtagaatggtggctgactcagctgctgaagtgttacgaacaggattacaggaaaaagagagtgtctataaattgctagccatcctgtatgcttggtgtgttatatcaaaatacagaaactcaacatcagtttgtcatgtagggtccgagtactgaacctgagctgctggaattacccaatggaatcacgac

SEQ ID NO: 17503 - DNA, 2465 bp, Zea Mays
tgcgtcagtgccggcgagggccagcacgtccacgtccaccaggcggatgcggcgacggacgaggtgtgcgcgcggctggcgctggttgcggagggcgaggcattcgggaggaatctgggcggtggtggagttgaaggggacgatggcatggaagatttcgatgctgaaaggaagtccgggatgctgcacatgttctgcaaaacgcttacggcctctgacacaagcacgcatggagggttctctgttcctcgccgtgctgctgaggactgtttcccgcctctggattataatcagctcaggccttctcaagagctggttgccaaggatttgcatggagccaagtggaagtttcgtcatatatataggggtcagcctcgtaggcatctcttgactactggatggagttcatttgtcaataaaaagaaactggtttcaggggatgctgtgttatttctccgaggtgatgacggtgaactaaggctgggtgtgcggagggctattcagcttaaaaatgaggccctttttgaagatttcaatagtgacagcacaaagcggcattctttgacggctgtagctgattccttgaagaacagaagtgtttttcacatttcttacaatccaagagctactgcttcagaatatattattccatacgctaagttcctgaagagcctcaatcatccggtctgtattggagcaaggatcaactttcagtgccataatgaagatgttagtgaaaggcgatctggagtggttgttcgcattagtgaaatagatcccatgaaatggcctggctcgaagtggagaagcctgctggtaagatgggaggacggtgctgaatgtaatggccaagatagagtatctccatgggagatcgagatagctggtggttctgtctctgtttctcattctctttctgcatctagttctaaaagaaccaagttgtgtcctcagggaaatttggacgttccagcaatgtggaatggttgtactgactccatggaaactggaaagttacccagggtcttgcaaggtcaagaattgatgagttttaggacttgtcatgttccgtgtgctcctcaaactgctgaggctgcaaaacttcaatcttctgatgctagtaggttccttagtaatgcacatggctgcgcattgggtggtccaacaagcagactcgcagtgcatagctctggttttacctaccaatgtgtaggcttcaatgaatctattggattctcagaggtcttgcaaggtcaagaaatttctcgggcggttcctaagttccaaggaatgatgtcggaagcttgttcactgaaagacagatatgggctgcatagttatatgcgtgccccagttgctgttaatggattatcagctacaactcaagaatgttctctcgcactatctactccgccaggagcacaagtgccctctctctaccctggtaatgttgttaaccgaactgtggttccacaacttggactggcaaggaagtttggtggtggaggtacaaatggccagcagtctggcccatttgataggccgagggaactttggaccaggccacagcatgaaacacctgaccaaatgaacttggatcagtttgagactagaagaccttcagtgcctgtagatgctgctaagcttgggtctggtggaggggaggttcgcaaaactagctgcagactttttggtttctccttgactgaaaagatcttgccagcagatgatgatgacgtcaaggaagtgagctatgagactgagtgccagaacccacggatgctggacctgttcgggtacaactgctcaacaccgagtgccgctcttccagctctgtgtgctgccgccccctttggaatgtgatgctgcttcgaatctttcgataactttgctccatgtactcttagaagttttactttcccagtaccccagtgtagtcataagctgcttttgacatcattccctttggtctgcctcaagttaagcagtcatttgcacaagtaaacgaaggttcgttggtgaaccactcctcgacatgcctcaccctgtcacccaaactattgtggttagtctcaggatacccagagacaccacattgtaacttatgtcgatgatccttcagaactgttgtgcgatgaagctaacaatttgctctaaaagtactttgcttgctctaaaagtaccggctatgtatatttaaatcagcacctgtatgagtttttttagccctcacaagccctggttgcagtcgactaggccgtgtgattgtattagtatgctatctttttaaactgtcgcttatgagtctttattctagtgcattgtgtgaatactctgttcatcgcatgcaagtcttgtcttctgtttctgttggcttggtaggagatactctgattttataacatgtcagatttttattggtcaattcaactttgaccatcaatatacaaggaatttggtgaata

SEQ ID NO: 17504 - DNA, 2494 bp, Zea Mays
ctgctattgggccctcataccgggccccggtgccattctcaccgttctcgaaaccccgtgtacacgtagcagggccacgggccacctccctacggaggagacgaccccccatcccagaggtcgagggctcctctctctctaccatctccgttcgatcccatcgccccgccgccgccatggcgtttctcgcgcgggcgctgcggcagtccaactggcgcctgtcgtcgcgctgccccgccgtggctgcctcctgccgttggatctccccgaccgccgccgcgggttcgccggaggccggcgcagcggtggcgcctgccgacctggagctgcctccgccgcgggagcccgttggaggcgcccgcgtggagcttcctcccaacccggaggacgcgctcgaggtattcgtggatggccatgcggtgcggatccccaaggggttcaccgtgctccaggcctgcgaggtcgccggcgtcgacatcccgcgcttctgctaccatagccgactctccatcgctggaaactgccgcatgtgtctcgtcgaggtcgagaagtcgcccaagcccgtcgcttcctgtgccatgcccgcgctcccagggatgaagattaagacaaacaccccagtggcaaagaaggcaagggagggtgtcatggagttcttgctgatgaaccatccactcgactgcccaatctgtgatcagggcggcgagtgcgacctccaggatcagtctatggcatttggtgctgaccgcggtcggttcactgagatgaagcgttcagttgtggacaagaatttgggtcccttggttaagacagtgatgactcgttgcatccaatgtacaaggtgtgtaaggtttgctactgaggttgctggagttcaagaccttggtatgttaggtcgtggcagtggtgaagaaattggaacatatgttgagaaacttatgacaagtgagctatctggaaatgtcattgatatctgccctgttggtgctcttacatccaagccatttgcatttaaagctcggaactgggaacttaagggcacagagactattgatgttactgatgcagtgggatccaacataagaattgacagcagaggacctgaagttatgcgcgttgttccacgtctcaatgaggacattaatgaggaatggatatcggataagacacgattttgttatgatggtttgaagaggcaaagactaaatgaccctatgatccgtggtcctgatggcaggtttaaggctgtgacgtggcgtgatgctcttgcagttattgctgaggttttgcatcaagttaagccggaagaaataactggagttgctggaaaactttctgatgcagaatccatgatggcactgaaagattttgttaacagaatgggttccgataaggttctctgtgagggaaatggtcccaatcctccagcagacctgcgatctaactacctaatgaataccagcattgctgggcttgaaaaggctgatgtgttccttttggttggcactcagccaagggtggaagctgctatggttaatgccaggattcggaagactgttaaagcaacacaagcaaaggtgggctacattggtcctccagctgacttcaactatgatcatgagcatcttggcacaggaccacagacccttgttgagattgcagagggtagtcaccctttctgctcagtactgcaatccgctaagaaccctgtcatcattgctggagctggattatttgaacgagaagaccaagttgccctattctcaacgattgagactgtagccaagaagttcaatgtgatgagaccagactggaatggccttaatgtcttgttgctccatgctgcacaggcggcagctcttgatcttgggcttgttgctaatcctgccgagagcatcaagtcagcgaagttcctgtatctgatgggagctgatgatataagcctggaaaagcttccagatgacgcatttgttgtttatcaaggacaccatggtgacaagggtgtctatagggccaatgttatcctgccatcttcagcattcagtgagaaggaaggcacctacgagaatactgaaggatgcacccagtggaccatcccagctgttccgacggttggtgatgctagggatgactggaagatcatccgcgctctttctgaggttgctggggctcagctgccttatgacagcctctcagctgtgagggaccggatcagtacggttgcaccaaatctagtacatgtagacgagagggagacgcccacaatctctgcggaggttaagccgcctgtgaagcaacaagtcagctcgacaccattcaaagctgttgtggagaacttctacatgactgatgcaatcacccgagcttcaaagatcatggcccagtgcagtgcaaccttgctgaagaaggcttctcgtcaaacttgagcgcgggaacggccgcggatccgacgaggagcttcctgcaggagagggcgatcatagagtcggtcgcg

SEQ ID NO: 17505 - DNA, 956 bp, Zea Mays
attttagcaggggcaaaccaaacacagccttagtcatgtggatccaaacagtctgtgccattggtggtcactgtggcacgtttttctacaccagctagcgtgctccgacgtggggcgtcctcttggctgctagcgccgcatgccatgccggccggccttttcggtggtctgtggactgacctggacttttggctgtttgcgcctcgcggattggggccctcgcgcggtttgcctcctcaaaacctaaccatcacttttaccttgccccctcgtcaagatcgccttcatcatcatcataataaaaaaatatatatgaaaaaaaacacacacacatagagagagagcacagcccggtccggatcaaatggatcgtcgtgttccgtcgagggagtgatagcgtggtgacatgtgcgcggccgtacgggggagagtggagtcgagtcggacggatgcagcggacggactagaggacgaaacaaaaaacgcgggccacacccagccggcccgggccaccggcgctttgccctgcatcacatgccctgccacatgagccatggccacccacccacctgctttcattttttgtcgatcgtgttgggccggcggttccgtttcatccgcacatatgacgacagggctccggaaagggacgccggtggagatcgccggatctcagggctcgcgcgcgcttgtttagtgctccgctgctgccagagcatctcctcgtcctcgtcgtcatcgttaactaatccagcttaccttattcaacacaggctgttaggacgagcgagcgagtggcgtacgcactcggcgcttgtgccgcgtggtccaccccggcaaccttttgggacgagatccgcttgtcttggccgatgggccgcccgccattatcgcgccactttaagcacggcagcacgactgcctgccaatctagggtaattttaactcctcccgag

SEQ ID NO: 17506 - DNA, 4266 bp, Zea Mays
ctcagatcggaggggagaaactaggctagttggtctggtgcccctggcactcgctgcacctgcagtttccttctccgggatctcaattctcatctgggagagggcgggcgagatccattccagtcgcccccattcactccccttcctcgtccgtcctcttcctccctccgatccaccgctccccctacccgccgggccgccgctacctcgagcgagcggagatctctctcctcgaacggggggggaggaagatgctcaccaagttcgagaccaagagcaaccgggtcaagggcctcgccttccacccgcgccgcccatggatcctgtccagcctccatagcggagtcgttcagatgtgggactaccgcatgggcaccctcctcaaccgcttcgacgagcacgacgggcccgtcaggggcgtccactttcacgccacgcagccgctcttcgtgtccggaggtgacgattacaagattaaggtctggaattacaagactcaacgctgcctattcacacttcatgggcacctcgactacattcgcactgtgcaattccaccatgagtgcccatggatcgtaagtgctagcgacgatcagacaatccggatctggaattggcagtcacgcacatgtgtggccgtgctaactgggcataaccactatgtcatgtgtgcctccttccatcccaaagaggatctggttgtatcggcatcacttgatcagaccgtgcgtgtctgggatattggggctctgagaaagaagtcagcatcacctgccgatgacatcctccgcctcactcagatgaacacagatctatttggagatgaccggcaggtgaagatatggagaatgaacgataccaaggcttgggaagttgatacgttgaggggccacatgaataatgtgtcttgtgtgatgtttcatgcgaagcaagacatcatcgtgtctaactcagaagacaaaagcattcgtgtttgggatgccacaaagagaactggcattcaaacatttaggcgggaacatgaccgtttctggattcttgctgctcaccctgaaatgaaccttcttgctgctggtcatgacagtggcatgattgttttcaaattagagagggaacgcccggccttctgtgtcagtggtgacacagttttttatgtgaaggaccggtttctaaagttctttgaatactccacacagaaggaagttcagttggctccaataagaagacctgggtcagtcagcttgaaccagtcacccaggacactatcgtatagtccaactgaaaatgctgtcttgatttgctttgatgctgatgggggttcatatgaactctacattgctcccaaggattctgctggcaaggctgattacttgcaagaggcaaagaagggagctggtggttctgctgtatttgtggcacgcaacaggtttgcagtccttgagaggagtagcaatcaagttttggtgaagaatctgaagaatgaaatcatgaagaaaagcccccttcctattgcgacagatgcaatatattatgctgggacaggtaacttgctgtgcaaggctgaagaccgggtggccatctttgatcttcagcaaaggctagttcttggtgagctacagacacctgctgtcaaatatattgtttggtccagtgatatggaatctgttgcattcctgagcaagcatgttgtggttatagccagcaagaagcttgtccatcaatgcacactgcatgaaaccacccgtgtgaaaagtggtgcttgggatgagaatggcgtgttcatctacaccacactgaaccatatgaagtactgccttcccaatggcgacagtgggatcataaaaacccttgatgttcctatttacataacaagggttatcgggaataacattttctgcctagaccgtgatggaaagaacaagctgattgcagttgatgcaacagagtacattttcaagctcgctcttctcagaaaacgctatgatcatgttatgagtatgatcaagaactcccagttgtgtgggcaggctgtgatttcttatttacaacagaaaggttttccagaagttgctcttcactttgtgaaggatgagaagaccagatttaacttggcccttgagagtggtaacattcaaattgcagttgcttctgcaaaggagattgatgacaaggatcactggtacaggttgggaattgaggccctgaggcaaggaaatgttggtatcgtggaatatgcataccaacgaacaaaaagttttgagaggcttgcttttctgtatctcattactggttacttggacaaggtgggcttcatgtacaaaattgctggacagaataataatttgatgggacaatttcacaatgcattgtatcttgggcatgttaataagagagttgagatcttggaaaatgctgggcagctgcctcttgcttatgttcttgctgtcacacatgggctcactgaaattgctgagaggattgctgctgaattaggcgagcatgttcctttgctgcctgaaggaaaatcacactcgttactgatcccccctgcacctctcacagcctgtggtgattggccattgctgagggtagtgcgtggtatttttgaaggtggactggattctactggaagggcagagcttgaggaagatgatgaagcttctggtgctgactggggtgatgaggacttggatattgttgatgcaagtgaggtggtggcaaatggtggcgattattttgatgcagagggtgaaccaaacgaggaggagggtgaggaaggtggctgggacctggaagatctggaacttccacctgatacagagactccaaaatctgctggcaatgctcgctctcctgtatttgtcactccaacagcaggcatccctgtcagccaaatttggactcaaaaatcttctctggctggggagcatgcggctgcagggaactttgatacagcaatgaggttgcttagccgacaattgggcatcaagaactttgctccgctgaagcccttgtttcttgatctgcatatgggcagtcattcatatctgcgtgcccttgctgctgctccagttatatcagttgctgtagagaaaggttggaatgagtccgcaagtcctaatgtaagaggccctcctgcacttattttcagcttctcacaaatggaagacagactcaaggctgcctacaaagccacaactgagggcaggttcccagaagcactgaggcagttccttagcatcttacatacgattcctgtaatcgttgtagactcacggagagaagttgatgaagtgaaggaattaattgagatagtgagggagtatattcttggtctgaagatggaactcaagagaaaggaattgagggatgatgtgacccgccaacaggagttggccgcttacttcacaaattgcaagcttcagagaattcatatgaggcttgtgctttctagcgccatggctctttgcttcaagcagaaaaactatgctactgcagcacactttgcaaggatgcttcttgagaacagccctcaagaggctcaagcaaggaaggctcgacaggtgctgcaagcttgtcaggataaggatgattctcaccaactgaactatgactttagaaatccatttattgtttgcggtgctacatatgttccaatctaccgtggccaaaaggatatttcttgcccatactgtggatcccggtttgctccttccatcgaagggcagctttgtaccatatgtgagcttgccatagttggggcagacgcctcaggcctggtctgctcccctacgcagatgaagtagacgatgttatcttacctcctgctgtccgcatcttcagcagcaccatctcgcaatgatgcctggatgtcttgatttggaggggatgaaacaattcaccgaacaccaaacttatcaacgccctccatgtcattccaaattttcgtctggaggggattcatcttggtcttgtctcaattatcgcagctgcgttttcagctctattttgtaaacatattgatgtacgatagctgatgtgagtgctggttcactgaaacgattttctgttatggcatatgccattttaatctctacagtttcagtatattgcacagtagattgtactcaaacatttaaaatttgattgtaccaaggattgagaccagtgttttaacactgaaaaattatgattgatacacaaccttttgtcactgaattgatgggtagtaattgcaatatcaatatattttttgtccactttata

SEQ ID NO: 17507 - DNA, 2238 bp, Zea Mays
cttagacatgcacgcagaaacactagttatccttgctgattgtgacatttacacatgtgaagcagcacaatcagaatgcagaaggctttccatctcatagaagtaaaaggatgtctttggaagtctctatgcagaaatctcttggttttggcttgaagtctgataatggcaaacatgattatgttgcaaatgatacggttcaatccctgcataagcaagatagtaagatagtgataaaaaagaccataaaattgttggacggtccaccttatccaaaaaggccaaagcttgagccagcacaaactggtagagatgctgaggctaagggacatgaattcatatcacagaagaatgtgcctgatttaacaccatgcacaacatctgaaaaatctcggttgctcaagcagaagcgcatttctgatggaaagagaactgataagaagaatattaggtctggtgtcagatcgaaacatgattgtttctcatcaaaggctggtttagcaaattttgattctggtttctcaggaaacagcgtgcttggagcacatggccttaaatctgatattcgtgacatcacacatcacattgagaacctgtcattgatcgaacttcttgatggcacttacaagtattccagtttaggaagagataaaggaaagaagtacttctagctgtgatatcaaagaacaatgtggtgacaagccacccctcttggttaaggacccatcacaaattaatctctgtgatagtgcactttgtcatccaaaagatatcttaagccgtttaactcttcctcatcgacaagatctagactctcttttagcacccggaagggagagcacagctgcagttaagccttatatgccttccatgacagttcatggagctagtttgccaccatttccttggtcacattcacaggctgggggctgtcgacaaggtgttgactgtggtaaacatggatcaagtaggagtaactcccagtggcaatgggtgcgggttggctccaacctcacttctctagatcatgaagacacgtctgtccatagaattgatgatctccttcaagagatggatgcagcaaaattatgtatattggatccatgtgatggacaacataatttgtgtggcacagaatcaacttctggatcacttgtacaaaacattcactccagaaaaattgggggtgagcatggttctcagcaactgcagccccaggatcatcttgactctttagatggtttccagaagcatgacattgattattctcttttaaaaacatctcaagtatcgccaaagatacagtgcgccgctgagatcttatgtgatatgagaaggagcactgaatcatggattggccaaggatacagcaatgggacaattaagtggccaaaatcaccacctgaaaaggcgatgaaagcccggaagccctcatcccagtttggtacaactgagagctcgtcaggttctcgtaacaatgaggcaacttggaatgggagcagtcactctaccaagaaaattgttgacaggaacaatgattctgcacgcttgaataaccctggtaagggaactataagatggcctgtccctgttgaagacaatgcttctcctgtcaggtccgagcggggtcttatggtcgacatgaggcagccccatggaaatggcggaaggcatctggtccaggtgtcatcacagacacggcttgagaaggagtatgagaaccagcagaagttgaggaaggcaacactgacctcttctctaggatctgcaggagattggaatagggagaagaacaggagaatgtgaagtgtacattattcatgtcaaaatcatagggtacggtatatcgtctgggggacagcgggaaccaggcaactgtttcataagaggtcacagaacattggcagatgtcataatttaggtggctggtgatgtatctattgggccatttgttgttggggggaaactgctgtatttagtgtaatttattttttattgccatcgtatcacaggtctcgtctcaaagtcgcccgttttgtattatatagtactattattatgtgtcgacttattcgtaaaagcaataatagcaggcgaggtaattgcgttccaggcgtcagccctcagtagtttacggcgcgagcggattatctgcggtaactttctggacgtagccgcgggtggatcacggcggtggtcggaagttaccgtagaggatccagctgcggaagctcagtg

SEQ ID NO: 17508 - DNA, 1002 bp, Zea Mays
cctatctcaaaatctctacaaagaaaatccagccgccgttggcttcttctgtagtgtgtatctccttcacgtcacttcctccccatcacgtttttcctctacccaggtcgagctcgccctactgtgcttgcctgtgctcgtcggccatctccctggtggccgacctcgcccctgccccagccacagcttccccttcggccctgctgctgcaagcactcagcctctcctatggcacacgccccacctgcgacaccgtcgacccccgaagcgaggtccgtgcgacgtttgccaagtgttcgatggaaggtccgaaccgggaacctcgcctttctcgcggatcttcgggtcggtttgtgaattggtacgctagttgatcacgtgatgcggaagtcgagctgagtcgaccacaagatgctgttaatcgtgggtttcttcgcaaagtgatactgatgaatgaacttgaagatttcatgatcggatcaagcgccaggatgtgagatgctctccaagtggacgtcgtctaacaacactaacgtagtgttttatcccaggcaagccccggtgcatttgccacctccttctgttttaaaaacttttatcacttacctgctgcattaggtgataggagttgtgtgaataaacaattgatgcattaccattccttggaatttgattatactccttgctacctgttttataaagagaaccaatgaggcttagccctgcctagagaactaaaacttgattctttttaaaagaatgttgtgtaacactggtatgggtttgttttatgaaaaaggacttgtaatggtgagagcatcatctgcagtgatgaattcatcattcaagtatggtacctctgtcaggtacatggttttgggaaggaaataataatatgagaccagacgttgagcaggaaaggtcgcccgtctgtgtcgattaaggaccgtaccgaaagtaggcttgctgatctaggaccctttaactggccacatgcctcgt

SEQ ID NO: 17509 - DNA, 2949 bp, Zea Mays
ctcgtttccttctttgaggactcccttgttgtattcgcaacttcctccggatttgccgtcgatcctgccacacttgcaaagaagagctcaggatctgatacttcttcagataagtctgatactgagcatgtgaagtaccttgaagtgcttgagagtttaccagataagaaaggagcagcatctgaagctagctgtgctgttcgagaagcagacaccaacaagatcgaagctaggtcagaagagagatttgcacccaacagaatggtggcggctgcacatagccaatctggattcagtttcgatgataaccatgctacttgtgcacccaactgcaccatgaaacttgaacctgcacttagagatgacagcagggaagttaaggaggcaaaataccgccgcattcgtcttgaagagaaaggagaagcaaagcagccagcgagggcaagtgacagatcaccaaggcctgtggttagcaacatcccttctaatgcttaccctttagaagggccatctgagtgtcataaaaaaccaggattcatatatgctagcggtgagaagggacatctgagtgacaagaatttagatgttcctagcaccagagccggtggccttgagaaagaccgtactgagcttctgcggatgctcgatgagttgagggaccaggtacagagatcctacgagattgctgacaagtcaagtgtgaatgcttcaacaaatagaatggtggatcctgcaagctcctacaatcctcatgagcgtctgagtcgattgcggtatggttcacctcagttgcagcgtaatggttctcagtgctcaccttctttgaatggacaggcacctgttgttcctcctgcttatccttcagtatctgtacagcaagatctccatggatacggacaatctgttgcacatatgggagctcctatttacccagccgccccttatccatggagaaacttcgataactatttccatggacagtatgatcctgaccctctgatctcttatcaccatgacggcttctaccatcagcctgcttgctcttgcttacattgttaccatcgtgaattattacctgttcatggggctccactgggtttcaaccatcgcagggcaccatatcttatgaacaaccctgtagaaggcccggtggtgtttggtgcacagaactacaatccaagaggtattaatggtctgatgcgacacaatcatctgagggacaccctgagtaaaaaacctgcacagacttgtgaaccaattgccaatggtgccccttttaccatatgctacaattgctatgaagtactgcatcttcccaagaattctctcatgctgggaaaagatgagtacaagctgcgctgtgggtcatgttcacatgcaattgtggtcagacttgatggaaacaggcttgatgtttcagcacctacaccagtttcacacttatcacctggaagtaaaaattactccaacaatggccaaggaagcaatggacaaaatgctgacgagagacttcttccatcttatagcttttctgcaggcagtcatttctctcaagaaaaagatttaccatcgaattccagtgaagcagacaaaatgcaatgcatatcatcttccgccagcatttctgaggatgataatagccgagctagttctaactcacagaagaactctggatctagagaccttcctcctgatgctgaagtggttatacgtgttccaagtttgcctcttcgtgatcattttggatattctccatcagagatggtggttgatgggtcaggcaaaggaagcagaagcacccggtctgaacatgagaagggtgtgttaactgaaagttttaagccaaacaaagtgaaagatgtacctgtagcaagcgtgctagacccatcagatgatgagtttgatgatcctgagtacaatcaagatccaggtgacggagcacaatgcgtcgatcacccaagggccacaaaatcgggcgactcctttttctccagcctgataaaaaagagctttaaaattaacggtgggatgggcaatggcagagcaaaggtgttcatcaatggctatcccatttctgatcgtgctgtgaggaaggcggagaagattgctggaccaatctatccgggtgaatactggtatgactaccgtgctggattctggggtgtcataggacagccctgccttggcatgatacccccatacattgcagaatttaactatcctatgcctaagaactgtgctggcggaaatactggtgtgttcatcaacagccgagaacttcaccagaaggacttggatttacttgtgggtcgagggcttcctgattctcctgatagatcatacagagttgagatttctggtaaagtatccgacgaagtatccggtgaagagctttattgccttggtaaactcgcaccaacggtggagaagatgaagcgtgggttcgggatgcgagtcccaaggaccattcagtgaaattggttcacatcgagaagcagaggctctgagatctgtgtgctgccacgcctttgtgctagagattgctaatgtcaccccgccttgaatcgttgcatctgtcgtagtggctgttttgatcgagtgtgtcatggtgtgaccatgtaattttgtctgtggattgttcaagctttctcaacgcacaagtttctgttgtgtagtctacgaactttactgctagtgcgtctgaacttgggcttggggaagtgcgagctgccaaaaaaaagttattgcattaacggctcaagcacggattcttttctttatcttgtgccgaagcccagcccaggcacctccgtccagggtatattttaggcctatttgttttggcttgtagtcgtgagaatcggcttctggtgtccaactctttgtttctcggtctatttctatcggcttctgttgtccaaacactttgtttctcagccttattctgtg

SEQ ID NO: 17510 - DNA, 3512 bp, Zea Mays
cttgggtcttgtcttgttagccgatctgtgactcccccgccatcgatgccaagtttgccccgttgccggcgtcacccctcccctcgacggtgaagctcatagcttccctccaccgccggtgtcgcttctcccccgccgaccaagccgtgcctgtcgccggcgtcgcccctcccccactagtgaaactcgcggtctctccaccgcacgcgcctcgtgtagttgtggctgcgtgcaccccctgtagccccggcgataggtcctactgctccatccggtttgcttccggcaacaagatcaacaacaagcgagcgagctgtgatctctggaggtgctcttcctactctttctggtattttgatggtggcttgatggccagtaatatgcagtcttctgggctgcctcagcctccaagacctcccatgatgggttctagcgctcagccacaaaatcttggaccaccaatgcctatgcagtttaggccagtgatgccttcgcagcatcctcctcagttcatgccaccagcagcacagcagttccgtcctgttggtgagcctatggcgggggctaacgttggcatgccagggcaaatgccacattttccacaacctgggcagcacttgcctcactcaaatcaagttccacctgtatcacaaggggttcccatggtatatcagccagctagaccaatgtcatcagcacctatgcaacaacagcaacaaactgcgtatgctgggggccatttgcccaccatgggtgctcctatgcaacccctgacctatacatatcaaccaacatcgatccctcctgtagcgcaaccctggagtacaggcccaggacagagtgtacatcatgtgcctcctctagtgccgtctgggcaccagccggtgtcagctccaacgactttgcctcctgtcaacttgtctgaacctagctcttcagactggcaggaacacactgcagccgagggaaaaaagtactactataataagaagacaaggcaatcaagttgggagaaaccagttgagttgatgacacctttggagagggctgatgcctcaactgaatggaaagaatttactacaccagaaggacggaagtactatttcaacaaagtgaccaagcaatcaaaatggactattcctgacgagttaaaggttgcacgtgaattggcagagaacgcatcaaatcaacaacctgatcgagaatcaggaatagctactagtgctcttgtcagatctgctgcctttgaaccttctactgcacctgctaatcagtcgtcatctgctgttggtataattgcttccagcgcacatgatggatcatcaaactctgttctttctggtcctcccctgccgcacaatgtggagaatacttccagttctattgttggcatgcaaaatggtggttcgagtactgctgttgttcctgttgcagcaagcacagaagttccattagttgcaacagatgcagggtccagcagaaacaacgatgaaaattcatctctgaccactggggctgacgcagaggatggtacatccgctgaagatttggtggaggccaaaaagaccatgccagttgcagggaagattaatgtcactccagtggaggagaaaacaagtgaagaagaacctgtagtctatgccactaagatggaagcaaaaaatgcgttcaagtccctgcttgagtcggtaaatgtggagtctgattggacatgggatcagactatgagagtcatcataaatgacaaaagatatggtgctttgaaaactcttggagagagaaagcaagctttcaatgagtacttgaaccagcgcaaaaagtttgaagccgaagaaaaacgtatcaaacagaggaaagcacgtgatgatttccttgcaatgttggaagaaagcaaggagcttacatcatcaacaagatggagcaaagcaatacttatgtttgaagatgatgaaagattcaaagcagttgagcgtccaagggagcgtgaagatttatttgagaactatcttgtggaactgcataagaaggaaaaagccaaggctgctgaagaacacaaaagatatgtagcagagtacagagcttttctagaatcatgtgacttcatcaaggcaagcactcagtggagaaaagttcaggaacgcctggaggacgatgaacgttattcccgacttgagaagtttgatcggttggatatttttcaagagtacattcgacacctagagaaagaagaggaagagcagaagcgggtacaaaaggatcaagtgagaagacaagagaggaaaaaccgtgatgggtttcgtaaaatgttggaagaacatgttgctgatggcacacttaatgcaagaactcggtggcgtgattactgtgcacagataaaagattcacagtcctacttggctgtagcatcaaacacatctggctctacaccgaaagagttatttgatgacgtgatcgaggaacttggcaaacagtatcaagaagacaagatccaaattaaagaagtggtgaaatctggaaagattcctatgacaacttcatggacattagaggaattccaaactgctactctggaggatgatgctcttaaaggaatatcaaccatcaacatcaagcttgtatatgacgatcagcttgaaaggctcaaggaaaaagagcaaaaggacgctaagaagcgccagcgcttgggtgaaaatttttcagatcttttgtattccatcaagcttcttcaacatgggatgattctaaacagcttttcgaggatagccaagagttcagggccttggacagtgagacttatgctagagagctttttgaagagtgcgttgtccacctgaaagaaaggttaaaagagaaagaacgtttgagggaggaagaaaaggcaaaaagagagaaagagcgtgaggagaaagagaagaagaaagagaaagaaaggaaggagaaagaacgcaaagaaaaagaaagagaccaccgggaggagagagaaaaggagaaagggaaggatcgatcaaggagagatgaaatggagtttgatggtgctgatttgaacacccatggtgcaaaagataagaaaagagataaagataaagaaaagaaacataagagacgtcaccatgacacagatgatgtaagctctgagagggatgataaagacgatgctaagaagtctcggaggcatagcagtgatcgcaagaaatctaggaagcatgcacatggctcagattcagatagtgaaaaccggcacaaaagacataaaaaggaccgagatagtagtagaagaaatggagcacatgagctggaagatggtgaacttggagaggatggggagatctattagtctttctgtttgctaccgagattgtcagtaattacttccccttgtcatgttctccattgctcctatttttcttacttttgacttgttattagtgctttggcttaacaatcactagtgttatagttatttagttccatacattctgaaatattttcttaaatatctacatttcttcaat

SEQ ID NO: 17511 - DNA, 2884 bp, Zea Mays
gaattcttatctatgtatttggatgtggctgattctggggtattgccctatgggtggactagatatgcacaattcagcctctctgtggttaatcaaattcacaacaaattcacaataagaaaagaaacacaacatcagttctctgctcgagaaagtgattggggtttcacttcatttatgccgttgggtgaactctacaaccacagtagaggttatcttgtaaatgatacttgtatagtggaagctgaagttgctgtatgtaaagttgttgactattggagttatgactctaaaaaggaaactggctatgttggtcttaaaaatcaaggtgctacctgctatatgaattctcttcttcagacgctgtaccacatcccatatttcagaaaggctgtttatcacatgcccaccactgagaatgatatgccctcaggaagcatccctttagctctacagtcactcttctataagttgcagtataatgacagcagtgtctctacaaaggagctcacaaaatcattcgggtgggacatgcatgattcatttatgcaacatgatgttcaagaattgaacagagttctttctgagaagttggaagataagatgaagggaactgttgtagagggcacaatacaacaattgtttgaagggcaccacatgaactacattgagtgcatcaatgtagatttcaaatcaacaagaaaggaatccttctatgatctccagcttgatgtcaaaggttgtcaggatgtctacgcttcatttgacaagtacgtagaagtggagcaattggaaggtgacaacaagtatcatgccgataagcatggtctgcaggatgcaaagaaaggagttctttttatcgacttccctcctgttctgcagcttcagctaaaacgttttgaatatgatttcatgcgtgacacgatggtgaagataaatgatcgctatgaattcccacttcaattggaccttgatagagatgatggaaaatatttatctcctgatgctgacaggaatgtgcgtaacctttatacccttcacagcgttcttgtccatagcggtggtgttcatggtggacattattatgctttcatacgacctaccctttctgatcaatggttcaagtttgatgatgagcgtgtgacaaaagaagatgcaaagagggcactggaagaacaatatggtggtgaggaggagctacctcagacaaatcctggcttgaacaacactcccttcaagtttactaaatattcaaatgcatacatgcttgtgtacattcgtgaaagcgacaaggacaaaattatttgtaatgtggatgagaaagatatagcagagcatcttcggattagattggaaaaggaccgtgaagagaaggaacgtcggaagaaggaaaaagctgaggcacacctctataccataatcaaggttgcaagggatgatgacttaaaaactcagatagggaaagacatatattttgatcttgttgaccatgataaagtcccaagcttccgtatccaaaagcagatggcctttgctcaattcaaggaggaggtagcaaaagagtttggtattcccacacagttccaacgattttggctgtgggccaagcgacaaaaccatacttaccgacctaacaggccattgtgtcctcaagacgaagcgcatactgttggacagctaaaggaattggtgaacaaggcccacaacgctgaattgaaattgttcttggaagttgaacttggactggaccttaaacctcttcctcttccagacaagactagagaagatatatttcttctcttcaaactctatgaacctgaaaaggaacagctacggtatgttggtaggctctttgtaaaggcttcaggaagaccacaggacattctgccgaagctaaagatgttggcaggtttttcacaagatgatgatattgaactttatgaggaaattaagttcgaacccaatgtgatgtgtgaatacattgataacaggcttctgttccgatcttgccagcttgaagatggggacataatctgttttcaaaaatcttcaaaggcagatagtgctgaccgatatcgatttcctgacgtaccatcctttttgacgtatatacgtaaccgacaggtggtccactttcgttcactggagaagcccaaggaggacgattttttcctcgagatgtcaaagattttcacatatgatcaagtcgtggaaaaagtagctgaaaaacttggcgtggatgacccatcgaaaattcggcttacatcacataattgttattcgcagcagcctaagcctcagccaataaagtacagaggcgttgaacgtctactggacatgctgattcattataaccagacttctgatattctgtactatgaagtattggacataccacttccagaattacaagcgctgaagacattaaaagttacataccatcatgccacaaaagatgaggtgtcagttcacagtataagattgccaaaaaacagcactgttggcgatgtgctaaacgatatcaaaacaaaggttgagttatctcatcccaatgctgaactgagattacttgaggtcttttatcacaagatatacaaggtgtttgcaccaaatgaaaagattgaaaacattaatgatcagtactggacactgcgtgcggaggaggttccagatgaggaaaaaaaccttggtccctttgatcgattgattcatgtatatcattttacaaaagatactcaaaaccaaacgcaagttcagaactttggagaacctttttttatggttattcgtgaggatgagaccctatcttctatcaaagagcgtatacagagaaagcttaaggttccagatgaggatttctcaaaggccttgccttgcttcacgc

SEQ ID NO: 17512 - DNA, 1864 bp, Zea Mays
tggagttggacctgtttgttcagtccgagcttagcaactagtaggaagaaatgccaggtacaataatggcaatgggacggcttaatcgacctagtatcatgatatatggtggaactattaagcctggtcactttcagggcaattcctacgatatagtttctgctttccagtgctatggagaatatgttagtggttcaatcactgatgagcaaagaaagaatgtgctccgcaattcatgtccaggggcaggtgcctgtggtggtatgtacacagcaaacactatggcatctgctattgagacattgggcatgagccttccatacagttcttcgacacctgctgaagacccgctaaagctagaagagtgccgtcttgctgggaagtatcttctagagttgctaaagatggatttgaagcccaaggacattataactgagaagtcattgcgaaatgcaatggttatcgttatggcacttggtggttcgactaatgctgttctgcatttgattgccattgctcggtccgtaggtctgcatttgactcttgatgatttccagaaggttagtgaccaagttcctttccttgcagacctcaagcccagtggcaaatatgtcatggaagatctacataagattggtgggacaccggcagtcattcattatcttctggagcaaggtcttcttgatggtgattgcatgactgttactgcaaaaactctagctgagaatgccaaaattttccctcctttgtctgaagggcagcaaataattcgaccacttgacaatcctatcaaaccaactggccatattcaaatactttatggcaatcttgcaccagaaggttctgtagcaaaaataactggcaaagagggactatacttctcaggtcctgcattagtttttgagggtgaagagtccatgattacagctatctcagaaaacccagcaaatttcaagggaaaggtagtagtgatccgaggagaaggaccaaaaggcgggccagggatgcccgaaatgttgactccaacaagcgcaataatgggtgctggtcttggaaaggagtgcgccctgctgacagatggtagattttctggagggtcacatggatttgttgtcggtcacatatgccctgaagcacaggaaggtggtccaattggccttgtccagagtggtgatataatcaccatcgatgtaagtaagagggtaatcgatgttgaccttaccgaacagcagctcgaagaaaggcggaggaaatggaccccaccgccatacaagtcgaccagtggagctctttggaagtacatcaagcttgtggctccagcgtccagaggatgcgtcactgatgagtaggctgtgttacattctgttaggttgtgcacatgatgtgttttcaatcaaaggctgtttgccaggaacaaccatcctgttagagtgattcatgatagtgcggtttgcgtatggcagagatgatcaattggattcttcttagtccaccatcggcgatcacttgagcatctggtctgcttaaatctttgctgagattctaaaaaacacgcatatcctgcccatgggagcagctaacaagttactgtttaactggagtagaagtgcaatgaaggtagtttaccagtgctacaaatctacaacagaacactcttgtagcttgtaacgtcggcgttgccacctgcattacttcatgaaaatgttcttcgaagttctcaatcaatcgttcaaataccaaatttaccgataatggatgaatataaaaacatattaaagggactagactagatgatttgtcccgcgagcaagacctatatctatattatataaacaccaactagtcggttgcccgtgtgttacga

SEQ ID NO: 17513 - DNA, 3041 bp, Zea Mays
ccataccccatgctcttctgcttttcgaaaattacaatcacccaccttccaataaaagcgcacacgccttcgtgcacctccccggtctctccccctttcctctcccttcccccttcccccgcctccgccatcgccgacgccgacccccacaccggccgacgcgcgagccccggcaccatcttcacacgagcataaatgggtgatgcgtgtttctcaacacagctaattgatggagatgggatcttcaacgtctccggattggagaacttcatgaaggatgtcagattgggtgaatgcgggctgtcctatgctgttgtatcaataatgggcccgcaaagtagtggtcacagactaccaaaggatgatacagcatttgagaagcaaagtgcattgtttgctttggccgtttcggacattgtgttgattaatatgtggtgtcatgacattggcagagaacaggctgcaaacaagcctcttttgaagactgttttccaggtcatgatgaggttgttcagtcctcgcaaaacaacattgttgtttgttatacgtgacaaatcaaggacacccctagaaaatcttgagccaattctaagggaagacattcagaagatatgggatgctgttccgaaaccccatgcccataaagaaactccaattagtgaatttttcgatgttcaagttgtcgcactgtcgagttatgaagaaaaagaagagttattcaaacagcaggtttctgatttaagagataggtttcagcattcaattgcccctggtggacttgctggggatcgtcgtggtgttgtcccagcttcaggtttctcatttagttcccagcaattttggaaagtcatcaaggagaacaaagatcttgatttgcctgctcataaagttatggtggctactgtacgttgtgaggaaattggtaatgagaaagttaccagctttatagctgatgaggaatggcaacaatttgaggaggctgtccaacatgactttgttactgggtttgggaagaagctcagcagccttctggatagatgtttatcagagtatgacatggaggctatttattttgatgaaggtgtcagaagctcgaaaagacaacaacttgagtctaaactgttacagcttgtcaatcctgcctatcaatctcttctaggtcacttacacactagaactttagaagcatttaaggagtactttggcaaggccctagaaaaggagggatttgctgttgcagcttgcaattgtactgaaactttcttggagaagtttgatagaggatctgaagatgctgctattcaacaagtgaattgggacacctcaaaagtgagggataagcttagacgtgacattgaggctcatgtagcttcagttcgggctgctaaattgtctgaactttgtgcgaaatatgaggcacaacttaccaaagctctggtggaaccagttgaatctcttctagattcagccagtgaagacacgtggccagctattagaaagcttcttcaacgcgagacaaaaactgctgttttaggtcttgaatctgctgtgtcagcttttgaactcgatgaagcaactgagaaagaactgcttgcgaagctggagaagcatggaaggagtgttgttgagtcaaaggcaaaagaagaagctggaagggttttgattcgcatgaaggacaggttctcaacattgttcagccgagatgctgactctatgcccagggtgtggacaggaaaggaggacataaaagctataactaaaaccgctcgctcagcttctgtgaagttgctttctacaatggctgcaattcggttggaggaggatggtgataacattgagaacactctttcccttgctcttgttgacacttcaagacatgggactacagataggagtatccaattgtccgatccactagcctccagctcatgggaaagggttgctgaggagaagactttaattacccctgtgcagtgcaaaaatttgtggaggcaattcaaagctgaaactgaatatacagtcactcaagccatagctgctcaggaagcaaataagaggaacaacaactggctcccacctccatgggcacttgctgcaatggctatccttggattcaacgagtttatgacattactgaggaatccgctttacctgtttgccatatttgtgatttatcttgttggaaaagccctttgggtgcaatcagaaattggcagggaattccaacatggatttcttcctgccatcctttcactgtcgacgaaatttgttcccactgtaatgaacatcctgaagagattagctgacgcgggtcaagaacctgcagcagcccccgagaggcaaagagagatggagctccaaccaaaatccaccaggaacggttccttatacagcaatgtgacatcggcagggtcatctagcgtaaccacttcggagattggacctgaatattcaagcccggttgtgcaatgattttgctgatctttagctttttggctggaaacatactctagcagttgagaaaaacagggtgcctcaagaacgtacgaagattttggtgccttgcagtttttgtaagcttgcccttcccagactgattcaaggtggcactgcccctcgttgttattcaaggaattttggggctggcggggttgtttgtaagagcattgtaaaataacttgtttcattttttggtttctgtaacatgaatacatgacatgtgatagttgtatataagatctgtggactgggggcgtatcagcgcattctacacagctaagggttgcatagttgcgagaactgaagcatgtaaatgtctttaaactgccatctgattgagatgcagtagtactgctgttctggaataagacatgtctgcttttggggaaaatgattcaaaaaatgtttcgtttgaactcagcgtctgctgaaaatgaatttggttcccgacccctgttctggttggccgaaattcacaagtttggtgttctttttgtgtactgtccgtacaataatacagtccaggcaaaggacaccagacg

SEQ ID NO: 17514 - DNA, 750 bp, Zea Mays
acctcttccgtcctcctgtttcccgtcccgcacagcgctacgcacacagactatatttctctctctctctcgtcctctatcgctcgtccgatctgcatctgcttttcttcccccccctccgcgtgtcccctgtcccttccggcgtgcgcgaagatttgattttttttttgtcggggagaaggcggagtaagacagaccaggccgcgggaggaaggagatcctgatctgttcttggagtggggaggcgaggagaggagaggaggaagatggcggcgcaggagcaggagcacgagaagcagcaggcgaagacgagcaccacgagctcgctcccctccagcagcgagcgctcctccagctccgcccccaacaaccttagggaaggagattctgaagaacacgacggcgcacgcgagcaagaggagcggcggcggcggcaagggtggagacggcggcaagaagcaccacttcgccaagagctaatgagaattgagggactgagggagggagctggttcgtgctctgctcgcgctcgcctcacctgaccattgttggtggtggttgatgttgctgttgctgatgaccaaatcccgtctccccggccgctgctgtgctgggactgactactcaccactgctgtagggatgtggttgtttttgggggcgttttgtactggtcttgaaaggagaagcctttatggaatagatagatctttcggcagggtttgaagcgatttttctccatcatttacaa

SEQ ID NO: 17515 - DNA, 2352 bp, Zea Mays
tctcaggagcgctgaaacagtactttatgcttctcttattagaaagaaaaattacatgaaacctgatacagagtcttataactgggttatacaagcatttactagagctacgtcctatgacagggcagcggatgtcgcagaattactcgggatgatggtggaagatcacaaacgcattcaacctaatgcaagaacttatgcgttgttagtggaatgctttacaaagtactgtatggttaatgaatcaatcaggcattttcgtgctttacaaagaatccctggaggaacagaagtcctttacaatgaaggaaattgtggtgacccactttctctctatctacgatcattgtgcctcgatggaaggcctgttgagttgcttgaggctttagaagcaatggctaatgataaccaaagtattgcacctcgagcaatgatcttaaacagaaaatatcgcacattggtgagctcctggatagaaccattacaagaagaagctgatgttggttttgaaattgattatgtggccagatatattgaagaaggaggtcttacaggagagcgcaaacgttgggtgcctcgcagaggaaaaactcctttggatccagatgaatttggatttgcctattcaaatccgatagaaacatcctttaaacagcgatgctttgaggaattgaagttatatcatcgaaaactcctaattacgttgagaaatgaaggccctggtattttgggtgatgtctctgaagaagatgtacgcagagttattgaaaggctaaaaaagttagttgtagggccaaagaaaaatgttgttaagcccaaggcggcaagcaaaatggtagtatctgaactgaaaactgagcttgaagctcaaggattacctactgatggaactagacaagtgctttaccagagagttcaaaaggctaggagaatcaatcgctcacgtggtgtaccactttgggttcctcctgtagaagacgaggaagaggttgatgaagatttagatgagctgatctcacgaatcaagccagaagatgggaacacggagttctggaaacgccgttttctgggagaaactcgaaactatctttgtgaagaagatagtaaagaagacggtcaagatttagatgatgaattggaagatgatgatgacaacgatgatgatgaggatgacgatgaatctgtaaaagaagcagaagaagatgagatagatgatgaagaggttgttgagcaaacagaaaatcaagttggtgatgacactaaagataaaccagcaaaagaacccaaccatcatcttcaaatgataggggtacagttattgaaggatatagagaggacacctgtttcttcaaagaaattaaagcggatgccagagattgatgatgatgaagactggtttcctgaagatccaattgaagcctttaaggttatgcgggaggagaggatgttcgatgtatcagacatgtatactactgcagatgcctggggatggacgtgggaaagagaaataaagaacaagatgccacgtaagtggtcacaagaatgggaggttgagttggctatcaagataatgcacaaggtaatagaactgggtggtactccgacaattggtgattgtgccattatattgcgagctgctatgagagcaccactcccatctgcttttataccaatattgcaaacaacacacagtctaggttataagtttggaagcccactgtatgacgaagtagtcctattgtgccttgatctggaagaaattgacgcagccattgcagtagttgcggaaatggagacttgtggggttaaggtgccagatgaaaccttggacaaggtgcttgcgtccaaacggtctggaaattctgccctcccaccacctacggaggagtaatcaatttggacatgcgagacttctgctgctcgtgcttgacgtgacaccagaaaatcacaagcaatgcatatgtttggagcttctcctggaaaagaacatgctgtatgatagtttgtcggtgctgtgtccaacgatagaggagatatgaagttgttagtatgatacctggcatggtatatttgattagtccgttgaatttttgtatggatggtgaagcatgagaaaaggtcgagtttttttttataactggtggaatggtgtgggtgcgttgtcttagggtgctttgggtttggcttctgggagttgcttttgcttcaaaaagtcaaaagctgattaaagtgatagaaacaagaactttcggattttaactttttgctttttaaaatggtcaaaacagttgtttagagacatagataacaagtagaatttcaagtagaatttctacttgtttgaatcaaata

SEQ ID NO: 17516 - DNA, 1516 bp, Zea Mays
ccccgctgctgctggagaaaagagaagggtgggtgggtgggagaagcgaacaaaaactcaagtagctagagagagaaagcaaaggcagcaggctcagctagctccgtgtgagtgagtgagtgaggtatagagagagagagagagtgaggaagggaagccattgttgcagttgcacaggaaagaaagaaggaaggaaggaacgagcgggagtggaaaagttggtgagtgaaacttacccactgctgcagctagctgctcccacttcctcgctgcgtcgtcctccctcacgcacctcgcctcgtctcccgcctcctggctccggcacgcgtaccatctcctctcggtctaaagcggtggaggaggaggaggaggatgatggaggagagagcgggcgagccgtcggaggtggaggagcagggctgcgcagcgaggccagccaaaagtagattcggcgccgtgggcccgccgtcctccagctgaggaggaaaggcagctatcggcgaggaagggtggtggactggtggtgctagcggtggtggtggtggtggtggtggaggatcccctctcacgtcaagcgctgtgtggaaagcataaaggcgggaggaggaggagagggcgaaggcgcagagcttccccgccgcacaaagcgaaaaggcttcagaaagaagaaagcttccgccttgggagggagagcgaggcatcctgcgtgtgagcgtgcgataaatagcggctccaggtccaggctgagggagagcgcgtctctggtgctctcgcaaccaccgtgcgcttgctttcctcctgctctactccgttgcacacttgtactaggcctggaggtcctgtagctcgcctggtgctgtgtcggagacggtggcaatggcattgcaggagcaggaggcggacggcgacgagggcggggaggaagacgacgaaggcgaggatgagcggatgacgggatacggtgtgggggagctgatatctgcttgtcccgaggcgtgctgtccgcttgcggcggtgtaggagtaagatattggcgcaataggctcaatcatttttttttttgcttctctctttctctttttcccttttcttccttgtttgatgtggcgtgcttgtttttttttttgttgcctttttttgtttctgattgatgagaccaatgttgattatatgatgaagagttgattggtaagaacgctaaggggcctctaagatggacaatataaggtataaaggctcgttaacatagatttatatacgcgctaggtttgagaggcttaacctcgtggcgttttatcgaacacgccttgttgattcggcaaggaacacgggtgggacgctgctgtttgctgatgtggtgttggtcggccaagaaatgtgatgaacacgggtaagacgccgctgtagcattgactgaaacacagacgaacatgtcgaggacatgctactattttgttacgatcttagtatactgtatacccgtttttctgtatccaattcgacgttacaatacaag

SEQ ID NO: 17517 - DNA, 2679 bp, Zea Mays
  misc_feature (1)..(2): n is a, c, g, or t
nngaattccaagagttggtggaccaagaaggtgccatttttgaaaagtgtgtgaccgctggtggcactactgttgaagatcaagacaaggaaatggagcaatctgcaggtgacgaatcaagagaaaccgaggctgagaatgctgtggaatataacaagaaggtggatcaagaagataccattaacagacaaggtacagctaaggaagacagtggtgtggagccacaagaggagaacgttgtggatccagatcaaggtgtggatgacttttctgtactagatgagggtaatgtggtggcacagtgcaccagtgatcaattgagaacaaccatggaagataatgctgcagagatgcaagaggtggtggagcaagaaggtgccatttttgaaaagggtgtgacctcagatggcattactgttgaagatcaagacaaggaaatggaacaatctgcaggcgatgaatcaagagtgaccaagggtgagaatgctgtgaaagataaaaaggtgtatcaagaagatgccattgacaaacaaggtgcagctgaggatggcagcggtgtgaagtcacaagaggacaacatggtggttccaggtcaatgtacagatggccttcctgtactagatgagggtaatgtggtgccacagtacacaagtgatcaactgagaacaaccacagataacaatgctgcagttgatccagagttggtggagcaagaaggtgttgatagcatagtgggtgcagccaaggttggtattgctgtggaagaatcgcgagaggacatcatggtggaaaagcaagttgaaggtgttcttttacaagatcaagatgaggcagtggagcaatgcaccagtgatcaactgaggacaatcacagatgggaggtgctcatatgggtcatcgtgccacttcaatcatccacggctcaaagcaaaactagaagtttcaagtttcccttccgaacaaagaaatcatgaagctgaatttctggaactgaaccgtgttggcctccccattagagaaggagcaaggaagtgtatctattacatgcgtaatggtacatgcagatatggaaagaaatgttgttttaaccatccagagcaagttcttgatgttcaacgccacactgcaacaggatgggatgatactaacttgcaatcttcaccacactcaaagaagtcacctgaacataaaactatggatgacatatcgtctggatctgaggttcttcctccaaacatacttcggatgcttttacctccccagaatgtgccccctagtacaaaagaaaaggaaatcaggataaaaaaggatcctgattgggcttcagcttcagatgattctgatggctgctgctcggccgatagttcagatgggcctttgtgcaagcaggaacatgaggactatcctgagaggcctgaatgccctttccttcttagatttggtaattgtaagtttgcatcatcatgccaatattaccacccaaaagacaaatttccaagtacctaccatccagaagacaaattccaaagtcgataccatcaaaaagaaaaatcaagtcgacaccatccaaaaaaagagccagcactatcaggagaactgatggtttatcctgacagacctagtgaacctgactgccccttctatgtgaaaactgggtcctgtaaatttggggcaaactgtaagtttcatcacccgaaggatataactccaaacatgcagggtccagcaagtccaaaaaggtcggtcgctgcaaaagagcaccacgcagcagctagagcgacattacaagaccagatgtaccagcaacaaaaattccctgagcggcctggccaaccagattgccggtactacatgcaatttgggaaatgtaaatttcaatcagcttgtatattcaatcattcaaaagacatactttcaagtgggtggcatccagcagaatgcccattctacatgaaaactaggacatgccaatttggatcagcttgtgagttttatcacccaaaagatcggtgctcaggcagagggggagtgattgatggtactgactatggacatgattttgccacgaagtcacggaatgttctgcaggaactggcaatatatcctgaaaggcctgatgaacttgagtgttctcactacatgaagcatggctactgtaaatataagatgaactgcaaatttcatcatccaagagatcgtcttccaaagaaataggaccatttgctacaaccactgttgtaactggctgtcgttgatgagtggagcaagtactgatgatgggacagaaatgcaggaaggaagccatagtcttccttttttgaagagctcgattctactcatgtctatgtcgaatttctgccctagtgtcgttagagttctcgtaccagatgcgaactgcctggtggcttcccaactcccgttcattcatatactaccaaacattgctgtgatctagatctagcccgatgcggtgctaacctgagattgtgggttactgtagctcagtatgcagctcaggtacctgcacttgctcaagattgcgataatgatcagattaaaatagcaggccacgcatattctgcaacttgcgacttttacatcgttgttgagtctcctgggttcagcctctttattgtttttgtttgtgtgcgtgaccatgtgtgtcggactgtcggttgtc

SEQ ID NO: 17518 - DNA, 1325 bp, Zea Mays
cgggagtgatgtgctgctgtgtattatgtagggtctctggttttaatattacgttggagtatcagatggtagccgacattaagaggctgaacggcctctcaactgatctccagatgtttgcacacaagacactgcggattccactcccagggaggcaccctccgtcgtcttaccagcagaatggttcatatgagagtgacgacagggaatgtactccacgtcgcattcatgatgatatcttggaatcaatattgaaaacaccaaattccaaagtttcgccagctatgagtcttctgcagggatactatggccttgaaccacctccaaagagagatcaaacaagtgagggcactgagatggcagttcacagtaaaggcaaatctgcttttttggatgttgagccgtggctggagccaccaaattccgaccccttccctcttcagaataggaaaaacagaagcttgatgataggttcttttcttgatggtggtactgatgagaacggtgacagtgaaaggttcataagacggcgccagaaagctgatggtgagctgttaccgagggaggaaaatggtggtgactttctggcaagcgttggaaaaggcttggctctgaggccaaagtctagcaatcgaccagacatgaacaagagccagcagaatctttttgcaatggcggagcctttgtttggcaatggtttgcaaactgtaaggaaatcatccagcactccggagttccaggagccagagaccaacaccagttcatccatatggtcagcgagcaagtggagcataaatacagatgcttttgctcttcctctcccgatccctcgttttgacaacattccaaagcccattgctgcttggagaaacaagccggctcgcgactaataaactgctacgcgcatgatttttcctgaactccaggaggcccagaaagcgggaagtgttcatgaaggagctttacattaggttggcaccagcctctacagctttggaagcagagcagagcaggactgtagtattggcccctgctagctagaacattccgaagatcagacgcatggcgtctatgtttccagacggcatctagactaggtttacatgattctcgtgttatattgggcatgttgcgccaagagtagcaacgttaatattcggtcatataaattatagatgctagatgacatagaggagatatatttgaggaggatatattttttttctgtacacaatgagaaaatgtagagcatcaaagggcggttatatatgtgttgtatgtgtgattccataccctaatatagaggtggttggcttcgtttaact

SEQ ID NO: 17519 - DNA, 494 bp, Zea Mays
agcacagccagttgactcaagcgccatacctctgctccatagtgggcacccgtgtgtcacgggcacgacgagattcggcggggatggcgcggtggcgggcgcggcgcctgctgcctctggccaccttcgtcacactcggcatgatccttggatctttgcttcagttagcacttcttcatcgactagatggctattcagtgcatgcagatagtgatccagaggctgttcttcttcgccttggatatgtgaagcctgaagttatcagctggacgccaaggataattgttttccataattttcttagttcagaggagtgtgattacctaatggcaattgctagaccaagactccaaatatccactgtagtggatgttgcaacaggaaagggtgtaaaaagtgatgttcggacgagttctggtatgtttgtgaattctgaagaaagaaaatctccagtcgttcagttatcattctatgccagtgacacaaaagagtgc

SEQ ID NO: 17520 - DNA, 1014 bp, Zea Mays
gaggataggaaggggcatcatcgtaggggttaaaggtgtgaaaccaatgcctctttctgagatggctaatcttttcatgagccttcacttggcggtcgctcctggacttgataacaacccgaacaatctggttgcatgcacgacattcttttctgaagcaacacgggccatgctttgtctgataagacttgaaacagatccacaagacaggacccaactgcggctgacagttgcctcgggcgatcaacatttgacattcgagttgaaagagttcgtcaaggaacatttgattgatatcccaaggactcaggctgccccacctatggcaatggtccagccacagttgcttactgcagcacctgccacatacaatgaccctggtgccatgcttgctggattgctatgagaagtaaaaaaacaaaagccatagtgttttgatgtacatgacagatgttgatctaacatctccaaaagcatcttgctgccaagacgaacacgtggagcaacgaaagggctggcggagtagtcttcagctggattctaaaccgagaaaaagctagattcttttgggcggtttgaaggcctccttcccctccatggagcagtccccatattgtgtaagcgtaatttgttgtttctcatttatcatccccttttggcccatttatataacttgtattgcccaggtctgttggtggacagtcggtagttatgtgtgttaatataaggtgctaggttttccaccatgccggttgtaaagttgagttggtgcgcattgcattacgatttgtaccaataaggtcgaaatagggaaaggaaattaatagggttttgttttgtgcattttatacggtctgcatagttccgatcccttggactgtctgtttctttcctggtggcggtgggtgtgtgatggcacaagcacgaggttcacgaggctcgattacataatctaacctggttgacaccggcgcgtcatctttttgcctctttgaagattctaatttctcgttg

SEQ ID NO: 17521 - DNA, 123 bp, Zea Mays
aaacctttacaaatgcagctattgttgctgatggaactccttcatagatgctggcccctatcaagttaaaaagaattcgaacaaactagtcaagggtacattatctcgccaaacatgtagtgg

SEQ ID NO: 17522 - DNA, 3998 bp, Zea Mays
cccgtctcacgaacccgtcccctcacatccctcgcgttgccattgcttggtcctctccgcgcccgccgcccctgctcggctgctccccatgtcccgcgccgcggtgacaaggatccgagaacacccctgcggacgcatccgggattcaaggcctcccctcccttcccctgcccccaccccctcggtgatgcccggatccacgactgctaccgtccagcctcgttctccgtccgcgaccgcttcacggtggcgcagacgctggaggtgtccacagggggcgacaccgtgaccctgcctccgttcgacatcagcgcccctccccccaccaccgtcgatttgtagaagctcctcgcccgttcttgcttcaccagcgattcggggaggccatgcccccctcggccgcaccccttctcctcctcgccgcatcccgcctctgggcagccgcgccacccctccctccacctcgccgtctcctacctcctccccctcgaccgcatctgcctccctctgtggcctcgctaccaaggtcaagatcgtcgagatttgttagggtttggggtttttgcggttgactctgaatcccgccgccgctgctcgcgcaggaggcctcgagctcccagtgctcccctcctcaaccaccctgggtaagtggctcccagattgatagggaaagagttcggactgtaggggctattgaatacttgattgatgccacaagatctggaaatgtgtcccgctatatcaatcacagaagttgttccccaaatctcagcacccgattggttttggtagagagcaaagattgccagcttgctcacattagcttgtttgctaatcaaaacattgccgtaggagaagaactcgcctatgattaccgacaaaagcttgtagcaggcgatggctgcttctgccattgtgggggtaccaattgccgaggccgtgtctattgacttcgcaggaagacactaaactgttcaacgcttggttgcagaactcgaggtttctacagctgtgtaggctgctgagcgatttaggtggtacatttacttatcctggatgttcattttcttcttgcacttctgcagtgtttgttaaatagcattacagtaccatgaaagagcagtgacatattcatgcacttgccattatactttccttttcctgaactaactatataatcacttgataaagggacaaatactatgtcataattgttagttaagtatgttatcagctatcttttcttggacactgtacaatacttggatccggtaaaaaaagtttgtacctcttataggtttctatttagtttttttctgccaatctcttcaagctaactcatgtacgtgtatgaatcacattgttatagtagctaacaatgtcagtagtgtaccaatcaataactgtattgcagtcaagaaaatagtaatttccttgactgattttgacatccccatggctttaacagtttaaaaactgaaaattgattctactatatttgtgttttaaggccttagtgtaggcgtacaatctacgtcgacgccaaaattaaatcaccttcctacatccatagttgatatgaactggtgagattcttactgatgcactaaatttcaatcttaggatactctttaattgatgtatgctttgcttcagtcgtataatattagagcaacttatcatcccccatgttttataatccatcctagcatggtacatttttttctgcacaattgtacatggaagcattagtcataggatatcggttgttgaagtacgtcgtcaagtgtacatggaagcattagtgcattgaacggccgaagaatcaccgcaggtacatggctgatgtgttcatcttctagaggatatcttgcaccagagtacaccattcaagggcagctgaacaaaaagagcgacgtctacagctttggtgtgctgctgttggagattgtcagtggcagatgccacactgatcctagattacccgttgacgagcagttcctcctagaaaaggtctggacactctatgagttcgatgatctcgagagcatcattgataggacactaaagcgcgattttgacaccgaggaagcactctggttgcttaaggtaagtcttgtgtgcatcccggatagccctaagatcaagtcctccatgtcaatggttgccaagatgctgcaaggtgagtgtgttgtgggtgataggatcatgaggctggcctgatcacagacgtcatggacctgaaagtcaggatggtagagccggttcagttcagcttgacatcatgctcgagcactatcgcgttgtggcctggggcgcgatgcgcccactccttgttggggatttcccattcagctactacgagtcatgccgtgtaggtacgcggtaggtacgcgatctgtcccctctgttctggataagacgttctgatgtgatagtgatagaaatagaatagaacgatgtggtggtgccacacagcccacaatgtagacgacacttggctatcacgttcgttcgtctcactacagaagggtgtgtcgcggttttcttttttttcactaagcaaatgtgatgcttgttagatttggataagaaaccttttgttttacaatataattcactaattgtatcggccgatattcgattgtttttggttcaatattagatgttcaacaacatggttttttttgcttaaccaaataataatgttgcaaaagtactaaggttagcttgtttattgttgttgatgtgcccacacaaatacacatgtatgaggaatattgttagtattttccatgttcttttaggttgttgattcaatcgtgagggtcctcaattaaggtcgaatggatgcaatcaaaactagaagggtgtgcgccatcgaggatcactgcagctaaggcaatcgtgaaggctggaatcgttgttatggcaccgcaagctattagtgtgctaggtggatttaggcctcaagggaaaacgattgacaatgttgtaaaggttgtggagacaacacttgccatgcaggaggctggatgcttctctgttgtgtattagttgttggcagatgatttataagatattgagatcaaaatcaggatgtttccaaactgtctataatcaggatggctattgtagcttttacagtaggttggtattatatgtttccaatttgtgtttttattaaaccattgtctaattggtgtcaggtcttcttcccatgggcggatcattgtcgactggtggtgtcaggtcttcttcccatgggcggtgccctggagcgcctgattgtctcacgtatttgaccagcaacaagggacgaagattggagctgtgtggattgtgtggaggcgacacgggtcaggagcatttcatctgatcccttttctctgatggatatgctgatattcaaggctgtggaagagcaggtcaagaagagagtagagaataaggcaatgatcttcgagcagaatgccactgatagtgagtgcaaggtcgatcctaaagtgctctccaagctatatgatcattgggtggatgccacacaccaaggatgtctgccttgactaatcaccgattagctgtagctgtaaattttatgtatacatggtttcagttgcgctcgatccaattgtcttaaccttgaatggacattttgatgtttctttcatgaatgttcaggtcaacggcaagataaaccaattgcgttgtatgagttttagatcataactcaagttttttgtagatcttggtgctatttcatatgatgtgtcatgtttcagtgattgctttatagtgaacccgtaagatgtaaaatgacctttatgacagaaccatatgtaataacagagtattctgaggaacctttgttgaagtaaatgtaatcgagtttcctagcaatcttgttcctgcagacgagcattggaaaataacagagtattctgaggaaccttagtcgtattaagtttgtgtagaaagaaactgatcataatataatg

SEQ ID NO: 17523 - DNA, 1283 bp, Zea Mays
acgaccttattatgcgattggaataggaattgcccgaggaggagtggttctgttgcagtagttgctctgagacacgatcatcattggacaagataatctccgatggagctcaactgttggcggacccagatcttgaaatcataaagaagaaacatgagacacgaggtttatgcatggacaccagtaaagatctcaaatggcaattactttctggtaaaagggctactgaagacggaagcatattgctctctgctgcagtgccaatttttcatcaatcttttgatccaatccgtgaagctctcactggtagagatctgattcctgagatggttaacgggaggggacctaaggagggaatgcccgggcaagattacagtggaatgtactgcgcactgttaactgtgggctctaccgtggtgtcagcagcacttttgcgtgtgatgggaggtgatgtggccgagctgccactagttgctacaagccaggatgttcaagggctgggctacttccaagccttgttctcgtgcatagagagggtgctagtctcactgaagatcaagcactttgtgcttccagctgcacatgaagctgaagggatctggatgaacaaatttggcttctctagaatctctcccgaagagctggaagcttatcttaatggggcgcacttgactatattccatggaacgtcatacatgtacaaggctgttccagtgtcataattgatgggatagaagagatatgggtgatttcgtctgtcttttggggggtgggggtccgctcgctattgtgatgtacagagagagttgataaggaagcaaagcatggcaaagacaatgtacaggagctggaagccaaggcgaagcatcggatgaatctaaatgaatgaattccccttggtttgtttactcttgaatcgaaggaagcctgtctttttttggtgtgatatactagactagatgcaatgcaattgaaggagtcgcaccgagtcctggtactagagccagattttttgcaatttaaattttgactctgaaactgctaccagagctgctgtgcattcttctctttctgcatacaatttaaaagttgcaaatgacaccgtcatgtgtgacgtatcattcattagaggcggaggcacgtgcgcagactcgcaaagcactagcagacacttttttttttgacttgacttggttttcgggaggaggaagagtcctgcgtagttgcgttgcaccagcctgcatttgcagagcaaaaacagcataaataaaatggagggtgga

SEQ ID NO: 17524 - DNA, 1473 bp, Zea Mays
gagcatattttccagcccagcagaggacacgagtggaggtgcggtccaggagcgtgagccggcaccaatcatgccgcttgcattgctggtaccgacccgtccccaccagtccagtctataagagcgacgggatcacggaaacctgttcaccgctgcgccgcctcactattgactgtcggattccccactcgccggcgacaaccgccgcgcccgatccgtctgctaggtcttgcacctccgggctctggccatggctgccgaagctggcccaatctccaaggtcctcatcgtcgtagcgatgcagacggaggcgatgccgctcgtccacaagttcaagctcgtcgaggcgcccgcccacgaatccacatttcctaaaggtgccccatgggttaggtaccatggcaactacaaaggcctccacattgaccttgtattgcctggaaaggatgctgttttaggagtcgacagtgttggtacggtatcggcagctcttttgactagtttttccattcaaacattgaagccagaccttatcattaatgctggcactgctggtggcttcaaggccaaaggggcaagcattggagatgtattcctggcatcagatgtttcattccatgacaggaggataccaatacctgtttttgacatgtatggaattggagcacggaaaacttctgcagttcctaatatcttgaaggaactcaatttgaagattggcaaattgtcgactggggattctctggatatgtctccccaggatgagaaggtgatactgagcaatgatgctacagtaaaggatatggagggagctgctgtggcatatgtcgccgacatgttttcaacgccagcgatctttgtgaaagccgtgactgatatcgtggatggggagaagccaacatctgaggagtttctgcagaacctgattgccgtgacggcggcactggacctggcagtcaccaaagtggtggatttcatcagcgggaaacgcatctctgatctttgaaggctgtcatgaaatccgacacccccactgctctgatgcacgatgctaggctacgaacaatacaacattgggtcaacgattttttgtgaggtgttttctatgtgagggcggacctaggtagtgcctagtgaggatacggaggtgtcctactcctaatccagatgttggaacggggatgtttggagcaacgtggactcggggccaagaaaggagcagtgtcagtcttgtcattgttgtctaagggtgtgtttagtttacttttggctttaacttttgcttcgtaaaagccaaaagctaaattaaaaagctggatctagaaagcagttttttctgaaaactgactttctcgtattataaaattgaaagcatgggattttcttttagcagcttttatagatggaattgttcaaatatatatgaaataatttttaacggttttagtggatttcactaaataatttttagct

SEQ ID NO: 17525 - DNA, 2299 bp, Zea Mays
atggagttatcctgtgcaatcaagcagattggtttgattcagagagtgatcgattgggtatccctgtgcaaggaacttattgagaaaaaaacatctcctgaagcaacaaaagccttagaattgatctccaatgcattgcacatatgtccatattcagacagcctcaaggagatgaaggcagaggcattgctgatgctacgaagatacgaagaagtgattcaactatgtcaggagtctgtaaatccgactgaaagaaagccagctttattcaaagataatggagaaccaaagaattccagtctctttgaacaaacacacttctctggaaggtattggcggccctatctcatttgcaagtcttatttcctttcaggcaagctggatgaggctgtcgaattattaaagaaacatgagcaagtcacacctgtcaaagaaagtgacgtgaacacatatcaagaaaatttctcatcattgtcagcgattataagagaactactttcccttaaggctgctggaaatgaatcatttcaagctggtagatattcagatgctgtcaaacagtattcagcagctttggcatgtaatagtgaatcgcgcgcattttcagctgtctgtttttgcaatcgcgcagctgcgtatcaagcactcggtcaagttactgatgcaatagctgattgttcacttgccatggttcttgatacaaattaccccaaggcaatttcaagacgagccaccttatacgagatgataagggattatggacatgctgctaatgatttaaggaagctaatctcacttcttgaaaagaaagtcaatgtgtctggaatatcaccaaaagcttttaacaagcataaagatatcaagcaagcacatgcgaggctttcacacatacatgctgaagcaaaaaacgatacccccctgaatttgtatttaatcttgggagtggagccatcctgctcttcagcagatattaagaaggcataccggaaagctgcattgagacatcacccagacaaggctgctcaattattagtaaggaacgagaatgctgaagatggattttggagggatgttatcaaggaagtctatgcagatgcggatcatctgttcaaaacaattggggaggcatataatgttctttctgacccggacaagcgtcaagagtacgactttgaagagaatctaagaaatgctcggagagtatcgagttcaaggagcatgcgtaggtcacctgaacataactacagcgacagaggctttaatccacggcagtggcagtcaagcagagcatcacgttggtacagcaaatcagacgattactggtaaagaaggcactacggcgtggtcatgtggtgagaagcaacttttgcaactatgtcatgtgtggagcaaatgcctccttgcaccaaagatgggatgggatgcacctgccttcccttaggtgccggtgctaatgcaccagccttgcagtcagcagctttcctgtttgtttgctgcgtttctttttcagaggatggaaatattaggattgatcaattggggatctgggatgattgcttgacactggtagcgtcgtgacttgactagcacaggaaatatggaggattaggaagtggtatatcaaatagtcttttgttggcctggtgatgtctgaacactgactgcttgggagtggctggcatgatggtatctgctctgaagtcaaaacactgagaacaacatcaaaggttagaaatctgggtaaagatgtcagtttgtccaataggtacaggcattcttttgctgaatgcatggcccgctgtcgtaagtttacagcagatcagctgaaagaaaaagagacaggctcttctgtttggcgcgtgcgcgtgcagttttgttctgttgtttccttattaccaaatgatgtagcgttggaaagagtgggtacatattgtgactgcccaatgttgaaatctcgtaacatttatttattctttattactagacttgttagcctaatgttggaagcattttgagataatcaaggttccttcaaagcaagaagaggatctggttatggtaccgtttcgtttgtaaccatggtaccgtggagattcttttgattcgattctcgattgtgctagttcaaagttcttagtggttaaaaaatcagaaatatttgaagcttttagcaggattttggctttttttcacataaaatcggattataaggggaaacgagccatatgtgaagtgcatgttctctcatgttgcttatgataaaaatatttggatgacttgaacccgcccatggtttttt

SEQ ID NO: 17526 - DNA, 3278 bp, Zea Mays
ggattgcattatccgctcgctgtgcctgccctgcttcttccgccattctttccgtctctgctctactttcttggtcgcctgtccggaggctcctccccgcggcccctgagcaaactgtaccatagccgcgtgattgattggttcacgggagggacagggagcggcgtcaagctggttttgaagcggtgcttgcttcggcagatggttgttctcccgcacctgtcctaccgccgttgatcgcgagagtctcgtacgtagtcttcgggggcaagcatccatggcggagtcatcgtcaaggcaagcggccgagatggtggagaagtggatggcgttcccgtctggctccgacgccggcagcggcttcgcgttcccggcgccacgctcagtgtcgggcgcgggcaaggagatagtggagctggcgtcgccctccacagccacggccacggccacggccacgaccacggccagtgccggcaacaggcaggcctcgttccagcgcggccgcgacagtggcgtgggcagcaccaggtcgtccatggacggcgcgcgcgcgtcgggggactcgtcgatgccgcgggtgtcgcaggagctcaaggacgcgctgtccagcctgcagcagaccttcgtggtctccgacgccacccgcccggactgccccatcatctacgccagcgccggcttctacaccatgaccggctacacccccaaggaagtcaccggccgcaactgccgcttcctgcagggccccgacacggacatgaacgaggttgccaagatccgggacgccgttaaaaccggccgcagtttctgcggccgcttgctcaactaccgcaaggacggcacgcccttctggaacatgctcaccgtcacccccatccgcgacgacaacggcaaggtcatcaagttcatcgggatgcaagtcgaggtgagcaagtacacggaggggctcagcgaaaagcgcatgcggccaaacgagatgccagtgtccctcatccactacgacgaccggcagaaggagacggcaatgtcatcgatcacggaggtggtgcagacggtgaagcacccgcgcgctcgctccgagggtgaacaggagcccgtggagcctgcaccgcccgtcatggcgtcgccgttggtggcccctggcacgccgtcgggcggtgccagcctcaagtccccgctctgggacgtgaagaaggaggactcacggctgagccggaagtcgagccgccgctcttccctcatggggttcaagatggggaagaggagctcgataggaagcaaggatgcccttccagcggaggtggaggccccggcgccggcgccggcgccaccggagtcaacgacggagaagcagcgcaagaacagctgggagcaagaggggagggagagggacatcaggcaggggatcgatctagccacgacactagagcgtatcgagaagaacttcgtcatcacggatcccaggctccccgacaaccccatcatcttcgcgtcggatagcttcttggagctgacggagtacacgcgggaagagatcctcgggaggaattgcagatttcttcaagggccagagaccgacatgtccacagttgataagatccgggaagctatccgggaacagaaagaaatcactgtccagctaatcaactacaccaagagcgggaagaagttttggaacttgttccacctacagccaatgcgagaccagaaaggagagcttcaatacttcattggagttcaattggatggaagcgaccatgttgaaccccttaggaatcgtctctctgagaacactgaactacaaagtgctaaattggtcaaagctacggcagagaatgtggatgaagcagtcagagagcttcctgatcccaacctgagaccagaggatctatgggacatttactcacgatatgtttccccaaagcctcataaacgttacaactcttcttggattgcgatggaaaagattataaaatctggtgtgaagattggcttgaagcacttcaagcctataaaacctttgggttatggtgacactggcagtgtacatttggtggagttgcaaggaagcggtgaattatttgcaatgaaggcaatggacaaatcagtgatgttgaaccgcaacaaggttcatcgagcttgtatggaaagagaaatatactcactattggatcatccttttctcccaacattatatacttcattccagacaccaacacatgtttgtctcataacagacttttgtcctggaggagaattatttgcactactcgatatgcaaccaatgaaacttttcagagaagaatctgcaaggttttatgctgcagaggttgtaattggcctggagtatctccattgccttggaataatataccgtgacctaaagccagaaaacattttgctccaagaggatggccacatcgttctgactgattttgacctctcttttttgacttcctcaaaacctcatgtgataaagcattctacatcaaggcgaagaagatctaaggagtatctgcccccaagttttgtttcagatcctgccactccatcaaattcttttgttggaactgaagagtacatagctccagaggtcatcactggtgtaccacatacaagtgccattgattggtgggctcttggaattctcttgtatgaaatgttgtatggacgtacaccttttcgaggaaagaacaggaaaaggacatttcataatatcctgcacaaagaccttacatttccaagtagcattccggttagtcctgcggctaagcaattaatccatggattgctacagagagatccctcttctcgacttggttcaagtgctgctgcaaacgatatcaagcaacatcccttttttgaagatatacactggccactcatccgttgcatggagcccccagagcttgatgttccactgaaactaactcggaaggaacctgaacaaaaagtgaagcctgaggaggatatatactcatgttcagattattgagacattttaaggttgtacgatcccccctcccgaccccgtgcatgactttcagcctgaagagattttatattaccgagtggaaataacgttgctgagcatgtacatagtaataaaagaggtttataggcatgcaagatttccagcctgaattgcacaagaggtcgttgtaagtcattcttttggttaggttaagtgaataatccatcaacaggataaagttcttgtaaatgtacactttctttggcatatataataaaaatcttactaatttccgttggtcaaa

SEQ ID NO: 17527 - DNA, 178 bp, Zea Mays
ccgtcgtgggaaatcatcgtcgtgctgcacttcttcaacgctggcccctgctctgtccgaaatcccgctcgaggttacgagtcatctgaagatcatcctggtacctggaatctcaagtcacaggcaagttgtgcccttgatcacttctttttacctactcatgttctaattaatcata

SEQ ID NO: 17528 - DNA, 1245 bp, Zea Mays
cagcagtatcagattaaacttgtcagcatggaacatctatatatctaagctatggaaaattttactgctgatcgcgtggttctagcagcatcaggtgttgatcacgaacacttgctaggctatgcagatttgttgttgaaagattggcacaaggggaccccaatggaaaagccaaagtctacatatgttggtggagattccagacacagagcagattcagatatgacacatgttgcattagcttttgaagtgccagggggctggcttcaagagagagacgctacaattatgactgtcatacagactttaatgggtggtggtggttcattctcatctggcggtcctggaaaaggaatgcattcacggctttatcgacgtgtcctaaataaatatcacttggttgattctttttctgcatttaacaatgtatatgacagcagtggcctctttggtatctacttgaccacatccagccatcagattttgtggcaaaggctgtcgacatcgcagtaagtgaattaattgctgtcgcaactcctggagaagtgacagaggttgaactgcaacgagcaaaaaattcaacgatttcatctgtattaatgaatcttgaatctagggtagttgttgccgaagatattggaaggcagctgttatcttatggttgcaggaagcctattgactacttccttcaatgtatggaagaaattactctagatgatgttgcaacatttgccaggaagatgctagctacgcaacccacaatggctagctggggaaatgttgacaaagttcccccatatgaatttatttgcaagcggctacaatagtacccctacacaatgacctctggactctggtggtcttgaaggatcctttcgtggaaaactaaacaatcacttgtatgaagtgccctagcttagaaactgcttttctttcagacatgcagtttagtgagtttaggatttcaacagctatgttcaattgtaactgttcaagcaacacatagtaaatgagaggctgatgaatggcaaatatcaacagtttctccatggcccattagcattttattgtcatgttcagtgtttttatgtacattttctgcgattatggatagcaggagtattctgttgcccttaatttcatgtataattggcttctggagcattgaatcattgatgcattaataccatgtttggttttgtttggggaacggagtgatccgttcctcattttgatttgtttttg

SEQ ID NO: 17529 - DNA, 2383 bp, Zea Mays
ataatattagagtgcagttatcccactggtgcctagatttttacatgccaagtggcgcctcttttgtgcatgatgatcacggcaggggtgcttcatcaagaaaccgttcatcgggacgagatcgtgatcggagctcccaacagtcctcgtctcggaggggttcaagctctagtggttcaaggaggaatgatcgcgatggtacagggaaatcaagaggctatggtaattttggaaagcacagcaaggataggatacaagaaaaggacttggattttcgtgaacgggagagtaggttggttcaaccagatgatcctttacgtgatggctttgagtcctttagctcatgcagatctgaaaaggacaggcttaaccgtactcgttcaaaggtggccataccaaatcgggcaggagtaagtttagacaatggtaatgtatctaaaaaagataatggtgtcatctcctttgagcgggaatttccacaccttggttctgaggacaaaaatggaaagcaagacatagaagtacctgccttagtagatccaaacattaactctgtttcctcttcctcatcacccgctggttctagtaaaccgattgaagtgtccaactctgggagtgcgttaagcatggctgaaacagtgatgcagtcaccgttaaatatttgtaccacacctcagttatcaattgatgctcagaagattgaagaaagaactatgaggcagtgcattttaagacctctaacaccatcgtcaaacaaaatatctgcatctatttccttggataagttattaaaatccaaaggtgcaagagctggagagtctaatggacctatcaaggttgctccacagctgtcaatacagccatctagcaactctgttcgcactccagtcaaaactgagctcgtaaagcaatctcaatcaggcagccttcaagtccttagccgtgagcagaatggtactgtaaatactgctgccaaagacatcaccagcaacaatcctgtgagccctgttttgggtcgatcttcttcaatggaacctatgagaaagtctattgtcaacccaaagcttaaggttggtactaatggccgttctttgcatcctctgcaaggttcatttgcagacagaaaagcaagtgcaaaagacaagtacaaattttttgagttgttgcgaagtaagtctgtaaatggttcaagcgctgctattgagtctccatctagcctgactgatgatcagcagaactctagtcctgaattgcctttcaagtttattgaaaatgggaacagttcctgtgaagaagcaaattcttgtgagggatcacagcgacacttgtcggacaatgaggaaattattccaccttcagaatctcatgacgttttagatgagggatctctggggattcaagttgacgacaagggttccagctcttcaccagtacttggcacacaagatatatcttccaagaagccccaggaagacaatgttgatattgttgtacctgtttatgtaaatgatggttctgtgatgcccaattctgttgacaatgaagcaagattgctgttggaggaagccaatcctgctcaagtgttacagcacattgatgcaagggaggagaatccctgtcctgctcaagagttcgagtccataggggcaggtggggaggaagagttgaacctcctgagatctatgggctgggatgagaatgaagaggttcagcctcttcagcaggaggagattgctgattgtgtaaggcagaacgtcaggctgcagcagaagcttcaggaatgcaggggctgatcgccgaatcaatggagcaacgtcactgtgcgtcaccatgctgagaagatgtgggccgcgtggagggagctgggttttggacttttggtaccttccgggcaaccgatcagataatgattgtctctagcttagcaaatggagagttttgtttttgttaatgcttgttcagcattgtgggggaaggtttcctggtagagctgacaattttcccccattgagaagaggttttagggtttctcttcctcattttcccagaaggaatacaccaaatggaagtcttgtctggtgttggaggcacataggtgtgcgttgctctcaaagaagaataggttgtctcttacttttcgccgctatgttttcttttttggaaaaaagggaaaaaagaatgatccagcttaacatgaaaaaggtgcacagggattgccttggtctttaatcttgctttatttgcgatctttaaagagaacgatcgagcttaacacttaaatagatgactgtcgaaatgatagcagcttgagttgctcaccgaaccaacacattcgtatattgtgataagaagctcccccatgaaaggttctctacttttgttc

SEQ ID NO: 17530 - DNA, 3758 bp, Zea Mays
gccgcctcttgtgagcgcgggcggcggctatttccagacccctctcatccccgaaaggccaagccggctccccgtcccatcgctcgcttccccctcccgcgaatcattcgattcggcccgcctcgtctcgcccgcccgattcgatttggccgtcagggtgatcggagccggcgctagggttagggttccggcgatccccatacctatggtgcagctgccgagctcggggaagcggcacgcggagccggccatggctccggcgcggcgcgcggcgacggtcaagctagaggtggaggagctcggggccgacgagcgctgcccgctcagcaagcgcgccaaggcagctctgccgatgcccccgacgcctccgcagccgcagcaggatatgtaccacaatgtactcgatgaacctagcccattgggtctgcggctgaaaaaaagtccatcactcttggatttgattcagatgagactttctcaagcatccaatgctggcgagtcatccatggacaacagcggttctgagccttccaagaagaaagacaataaatctggtgcttctgcagcaggcgaacgactaaaagcttcgaattttcctgcaagtatattgaagattggttcatgggagtatgtgtcacggtacgaaggtgatttggtggcaaagtgttactttgcaaagcataaacttgtgtgggaagttctggaaggtggccttaagagtaagatagagattcaatggtcagatattactgctttgaaggcaacttgccccgaaaatggccaaggaaccttggacgtggcgttggccagaccacctcttttctttaaagagacagatccgcagccaagaaaacacacactgtggcaggctacctcagatttcactggtggtcaagcgagtgtgcacaggcggcattttctgcagtgcccttcaaccttgttgagcaagaattttgagaagcttattcagtgtgatcagcggctatatcaattgagtcaacaaccggaaatcacattagactctgcgttgtttgaacctaggagctcaatatttgaggatccggttgaatcaaaatgtgctgggtttactaatttgaaagatgaacatgaggctctacctggctattcaggcccggtgtcaccatgtgctggttcctccatatctgctaagaatgaaaacaatgattccattggaatgacagctgaatatctttctcagacagtaggaacaggagttggtgctgtaggtgtacaagctgttggcagaaatgtgaatggtgcagcaccagaattcactattccccactggtggagtcaattgaaggtgcctgggcttagaccatcgatgtctgtggatgattttgtgaaccacctaggcaactgcatctcagagcagatcacttcaggcaatccggcgttggccaacaacgaggtgccgaccaaagaaacacttgaggggattgctcagtaccttcttggtgacacacaaggcccaccggtttctgcttcagacgagagatcactgatggccagggtggactccctctgctgtttgattcagaaagacacagtgccggttaccaaaccaaaacctgagccaaatgacagcgacagcatcggtgttgaagcctcggatggttccgacgaagaattcagctctgcaccaactgggaaacctacagatgccaccaatctaccagccatgtcaagaaaggattcgtttggggagctgctgactaacctcccccgcattgcctcgctaccacagttcctcttcaagataccagagggtacagagaactgaagctggaagtcaagacctcgcgcccttatgctgtaaagattgtacccaagcaataagaaatccggtaggttgtattctggtgcaccagttccccgccctgtaaatgtgacactcggtaggccactgctcctctgctacccgctaacctcgcgccggagtcgtcgcccacgatggcctaccgatccgcagtgctcttgcccgccctcctactggccgtcgccgtcgtcgtggcctccgccgccgccggggacgggaggtggcgggaggagcaggcgcgggaccgggtgccgcgggtgccggggcaggccttcaacaccagcttcgcgcagtacgccgggtacgtgaccgtcagcgagcagcgcggcgctgcgctcttctactggttctttgaggccgagaaggacccggggtccaagcccctcgtgctctggctcaacggagggcctggatgctcgtccattgcttttggacttggagaagaagtaggacctttccatgttaacgcagatgggaagggggtccatgtcaatccttattcttggaacaaagttgcaaatttactgttccttgattcacctgttggtgttggttactcatattcaaacacctctgatgatgctttaaaaaatggggatgcaagaactgccacggattcattggcattcttactgaagtggcttgaacgctttcctcaatacaaggaacgcgaattttatttgacaggggagagttatgctggtcactatgttcctcaactggctcaagccataaaaaggcaccatgaggctactggtgacaaatcaattaatctaaagggctatatggtagggaatgctctcactgatgatttccatgaccactatggaatatttcaattcatgtggactactggcctgatctctgatcaaacatacaagctgctgaatgttttctgtgactacgagtccttcgtgcattcgtctccacagtgtgataagattatggatattgctagcactgaagctggaaacattgattcatatagcatcttcacacctacatgtcatgcatcttttgcctcttcaaagaacaaagtgatgaaaaggctacattctgctggaaaaatgggagaacagtatgatccatgcactgagaagcattcaactgtatacttcaatctagctgaggttcagaaggcacttcatgttaatacagtcattggaaaatcaaaatgggagacttgcagtgaagctgttaatactcattggggggattgcgaaagatctgtgctgcatatctatcatgaacttatacagtatggcctccgtatatgggtgttcagtggagatacagatgcagtgattccagtgacttcaactagatacagcatcgatgctctcaagcttccaacaataactccatggcatgcttggtacgacgatgacggtgaggtcggtggatggacccaagggtacaggggactcaattttgtgaccgtgaggggagcaggtcacgaagtccctcttcatcgacccaaacaggccctcacgctaatcaaatcgttcttgactgggagcccaatgcctgtgcaatccagcacacacagcaacatgtaatccgtgttgttgcaactgattcacgagatgaatgaacatcccgaagcacccaagtcagccagttgtccaacccggcttgttctgcaacttgctgtagttgtttatgtatcagagctaccggtgccggttaccgcagcagccgtgcttttgtcggccctgttggtgcttgttgcagtaccagttatcccctaaggcaggggacagaaactgcggaatagtttttgtttgcattgacgtgacagcactgtaatcttaaacatcgtaccatagtcctttctatgacaaaggtgtggtttctgatgtctgcaataaatgatctggacttggggggtaaaaatgaaatactgctgtgttgcatt

SEQ ID NO: 17531 - DNA, 889 bp, Zea Mays
cttgctgtgcgtgtcttctacctccagcccagtgtgtgtgtttaataacaaacaagcgcataggcttcttgaatttgagcccagatgaagtgattcggagcttgttctacaacaagaacaacgattcccttattaccgtttcagtttatgcatctgacaatttcagcacattgaagtgcagaacaaccccggttgagtatattagaaggaaccagttagatgctgggtttcccctctttgaatcagagtctctgaaatggcctggatttgtggagtttgatgacgtaaatggaaaagtactcacatattcagcgcaggatggtatatataaggtctttgacttgaagaactactacttcctatattcaataccagatgaaaatgtgcaggagataaagatcagaacaccaagttatgtcccattgaagatattatctattgaagatgggaaacaactgaaattttttaagcacttgttacatcgcaacaagaaaattgatttcattgagcagttcaatgagaagctccttgtcaagcaagaggacgaaaacttccagatacttgatgtgcggagttctgagctaattgaagtcaatgtctccaagtttatgaccccttcagcattcatttttctttatgagaacaatctcttcttgacattccgaaacagaacagtcgctgtatggaacttccgaggagatcttgtgacttcatttgaggaccatttactttggcatcatgattgtagcaccaacaatatttacatcactagcgaccaggatcttattatctcatactgcaaatcggaggcagtggctgaggatggtacagccatggcgaggatgacagagtggctgacattgaggtcgagcaggcgggagggtgtccg

SEQ ID NO: 17532 - DNA, 1524 bp, Zea Mays
cttcggttcctccattgctcctcgcgtgcgctccctctcctgtctccccctccccctccccctccccctctctctcgtggagacgactgggccgccgtcgttgctgccctacgcggctacgcccaggtcttcttcgggcccttagccgcgacgagcgccaccagggagtagaagaggttaaccttctggttggaaacgatgtacttcgaaggctatggcttccgtggaagtactttcgagcagacatatcgctgctatcctgcgtctttcatcgacaagccacaacttgaggccggtgacaaaattataatgccaccatcagctcttgatcgtcttgcatctctgcatattgaataccctatgctatttgaagtccacaatgcagcagcagaacggacttcgcattgtggtgttctggagttcattgcagaagaaggcatgatctacatgccatattggatgatgcaaaatcttcttttgcaagagggagatatggtgttcataaaaaatgccaacctccccaagggcacatatgtgaagttgcagcctcatacaacagactttctagatatttcaaaccccaaagcaatcttggagaaaactttgcggaacttttcttgtctaactacaggtgacagcattatggttgcatataataacaagaagtactacattgatatagtagagacaaagccctccaatgctataagtattattgagaccgattgtgaggttgactttgctccaccacttgactacaaagaacctgagccagtaaaacctgctgttcctgcaagcacggagcctggtaccgacgttccagctgaagaagaaccaaagttcatccccttcactggttcaggaaggcgcttggatgggaagccttccaaagataaagatgtgctagcctcttcccctgcaaagcgacaagctaatgcgaccaacggtgtacagccttcaacagccaccacatcacagggcagttcatcgcgtaaggccacaggaaaacttgtctttggctctggtggtaaccgagccgaaaaggcacctgaaaaggaagcagaggagcccaagaaagaagacccaaaattcgcagcattcacaggaaagaaatactcactgaagggctgaataaataggaagacaatgtattatcagtatttccggtgacggacattctcagggagaagcgcttaccaaccctgttatgtgggagggtctttcggtgggatagtggtctctgtttctcctgaactattacccttgtgtagttgtgtcagccacaccggagcaactgatgtataaagccgctcttgtccgataatggatttctgttgagcttgcatgtacattttctaaaaagataactgaaatcgccaaaaaaactacaaatactatctagaattctgttgaaattttagattttatttgcacttatctttgtttcactctagctttgtcactgagactatttcttttttttaaaaatatttatgtgtttagtatagctttgcttcattttag

SEQ ID NO: 17533 - DNA, 1510 bp, Zea Mays
gcagatttttgaagggtcaagccatgtaaacgtcagtcatgttatccacgagctctcatttggcccaaagtatccaggaattgacaacccactggatgatacttcaaggatacttcatgacacaagtggaaccttcaaatactatatcaaggttgttccgactgagtacaaatatctgtcaaagaaaatattgccaacaaatcagtattctgtcacggagtattttcttcccattcgcccaactgagagggcctggccagcggtgtacttcctgtatgatctctcaccaattacagtcaccatcaaagaggaaagaaggaacttccttcattttataactcgcctttgtgcagttcttggtggcacatttgccatgacaggaatgcttgaccgatggatgtaccggcttgtcgagtcagtcaccaactcgaagaccagaagtgtactgcggtaactgcacaattcatgataggcggaaaacagctggtaccgtggctaagagcatctctaagagactttttatttttggctctctatttaactctctatttattttttcataaagattacattatatatatagcatctcactccaacagactatctatctagttttgctagtcaggtggctagtcaaatttggctagtgagagagctgatttggagagtcagatagcttagcgagttagataactagtctgttggaaagttattttattgttgagtagctaaaatttggcttgacgagtcatttaactagtctcttggaggtgctctaatgaagccaatagacggacctttgcccccaagctaacggatgaagccatgctgatttgcatgttttattttctccgtacatgactaactttatcatcagttatgttaaattgacacaaagtccacggactacagttttgtaaaacttgatgaggaatatgtatgcaaagaaagcgtgggtccagaatagttttctgtgaaaaatcaatacaaatgtagcttcagtgtgctctgtaatagcaacctgatgctttatttataggacgactttcgtcgcatgtgacatgtgttgcgagctgcattcgctcctgtcctcaggtagatgcatgccctgcgatgcttcaaggctgtccgggggagtagcagtatttgaggaaaggtcgatgaaatgaagtagtagcgaggaaagatgtcatgcttcaactgccaaggatcagaagagttcgtgagtcgttactgttgtgaagcacgtcgctgttgtagtgctgtatgatttatttctccgtcacgagtcatgattaacacaaacgaggtacagagactttttttaattcctctgaacattgatcattgtgatatagagcttctccatatatatagagagctattatatatatagtgctgtcaaggacgaacatttgtataaacgggactgggattagaatccctcatttcctctttttttattataaaaaatagagtttgtatttttttattttatgatatttcttgg

SEQ ID NO: 17534 - DNA, 873 bp, Zea Mays
tgtgtagctgccatatgtcgccaattggattgtgtaatagcggatacttgacctttgtagctggattttgctaaacagaacttctcaagggcccgctgtattatgcctgtgctataactctgacaacaatagttttctggaggacatctcccatctcaatcgcggtgatctgcaatttgtgtgccggagacggtgttgctgacatagctgggagacgattcgggcatgttaagctccctcacaaccctgaaaaatcatatgccgggagcatcgcaatgttcttggcaggtttcatcgcatcagtactgttcatgtgctacttcaacattttcgggtttgttgagaagagctggaccatggttgctgcctttggtgtgatatccctggctgcagcagttgtggagtcactcccgatcagcacacgccttgacgacaatctgacggtttctgtcgcatcagtgctagttggcgcccttgttttctattccattggagccagaaacctgtgctgcatgagcagcgaagtcaggagaagtatcccagcaaccgttggaatggtgtttgcaggcagcagctgaaacatgtagccacagtccaggagcagagttgagcagaaagtgcagagaaaggagttcttcaatcctgatgtgtgtgtatcttgtactgtaaccattttcctgtctaagcagacattcttgtaactttattaagaaagaggtaaagcgagaataagtttattagggaaaacagaggatgagctctcataagcaaatgcaaattacagcgtgaaagttatgcgattggtgaaaagggagatgaaactgagcaaaaagaaatctagaagagaaaggaaaatatataaaaaataaataa

SEQ ID NO: 17535 - DNA, 1552 bp, Zea Mays
  misc_feature (1)..(1): n is a, c, g, or t
ntgggcagagctcttccaacgactttagcaagatcaaaatctgtcccagtgtcatcgtccatgttgatgacatagcaccaaatgccccgtcatccaattgtgaaggctgtaaaacaccaaactcggccacaagatctgataaagcaaagtcatcattcaaagggagagtttcgagttttttcttccctaaaaataaaaggcagtcaaaagagaaaatcatcccatctgctagctttgatgggaaagtcgaagtcacttgttttggcagcatgaaaccacagggtggtcataatattggttctatgccattttgtgaggacacagatgatagttctgctactcaaacaatatgttcttcaaaagatgttgtttctattgaagtacctatttcttctgcctgtccaagtgaacatattgatggatcgagatcaggtggtctgaattgtagctgtgataagcctagccctacttcaattcttgatgtatcatttgaagatagcaaccttaatggatctgaatcgtcaagaagcattccttgtagcaacgagagaattgccttacgatccgatgccaattgaatctgtcacgcgctcattatccatgggagggaggatatgagctcaccttcgcctttacttgattcgacaaacttaaccccaatctcaagcgtggacgacgatgaacttgaatgtgttgcctttgtacaaaagattgtatcatctgctgggctaggcgacctgcggttggatatggtcttcacaggctggtacttgcctgactgccctgtagaccctgcattgtgcgacaagctattggaccggaaggaggaggctgctaagtcgagggagcggaggtcgaaccaaaagcttcttttcgattacgtgaacatggcagtggtcgagattggccatgacaccttactatgcgcctacccctggaggcaggcgtgctccatggcctgggaggagaccctctctcaagctttggcggaggaagtgccacaccatatgagggattggctccatggatcaggaaagtttgcaggaaacgagaacgacaacgccggaacgttgttggagagagtcatgcggcaggaggtggaagggagaggctgggtgaaatccatgagatgggagttggatgagatcacagagcagattgcaggaaatgtgctggatgaaatagtggtagaagcattggatggtctcgggatttgttctccgtggccagaaatggccatggcaataccgaatctgtagtagtagcgattgctctgtgtatgagaaatgagaactgctcttaaaattattttgtgctggaaaaaaaaactctcgagcatctgcatctcttgtatttagcacttctgaatatgcgctagctcactagagtggagactgtagaatttgctgttatatagagaacagccaaaagtaaaatagaaaaccgtacagccaatactggtgcatgtcaaacattttttttgcagcatagatgcttggatggtggtgtcagtaatttcctattcctaggctcatcaccacgtggtacgtac

SEQ ID NO: 17536 - DNA, 3598 bp, Zea Mays
aattctattgacacataaacccttgacccgcggtactcaaaccctcggtccttctcggcggcggcgtacgggatagcagaggtggccatggcggcggtggccacggtgagctctgccagtgggctccttgctatgctgcaggagccggcgccggagctgaagctgcacgcactcgacagtctcaactccgtcgtccacctcttctggcccgagatctccaccagtgttcccaccatcgagagcctgtatgaagatgaagagtttgagcagaggcagcttgcagcacttgttgtttctaaggtattttactacctgggcgagttaaatgattcactgtcatatgcacttggtgctgggtccctatttgatgtttccgatgattcagactatgcccatgctcttttagccaaagcattagatgaatatgccagtatcaagaccagagcctctaaagctgcaaaggaggaagagaacattgatcctcgattagaggccatagtggagaggatgcttgaaaagtgtattcttgatgggaaatatcaacaggccatgggtatggctgttgaatgcagaaggttggataagctggaggaagcaattgttcggtgtgataatattcatggggctctatcgtattgcatcaatctttctcatcaatatgttaatcaccgtgaatatcgctttgaggttctccgttgtattgttaaaatataccaaactttgccaaacccagattatcagagcatttgccagtgtcttatgtttttgggtgagccagaaactgttgcaagcatattggacacgctgctttctggaaacaaggatgatgctctacttgcatatcaaactgccttcgatcttgttgagaatgaaaaccaagcttttcttttgaatgtgaggaatcgtttggcctcaccgactcctgtgccatccaaccctgacagcgagccagctgtgcaagatgatcaaactgccagcactgtgggtacaggcacagaagcagctggagatgttcagatgagagatgatacagcaccaaatggaaatgctcacactgtggatccaaatgaggtagcacatgctgaccggcttcaaaaaattaaaggaatactgtcaggggagacttctattcagctgacattgcaatttctatatagccacaacagatctgatcttttaattctgaagacaataaagcaagctgtggaaatgaggaatagtgtttgtcacagttcaacaatatgtgccaatgcaatcatgcatgcgggaactactgtagatacctttctaagagagaacctggagtggttaagcagggcaaccaattgggcaaaattcagtgcaactgctggactaggtgtcattcatagaggtcaccttcaacaaggccgggctttgatggccccctacctacctcaaagtggtgcagttggcggtggcagtccatattcagaaggtggtgccctctacgcactaggtctgattcatgccaatcatggtgaaggaatcaaacaattcctccgtgaaagtcttcgcaacaccagtgcagaggtcatccagcatggtgcatgtttggggcttgggcttgcagctttgggcacatcagatgaggaaatatatgaggacataaagaatgtcctttacacagacagtgctgttgctggtgaggcagctggtattggcatgggcttgctcatggttgggaccgctagtgaaaaggctagtgagatgcttgcttatgcacatgatacacagcatgaaaagattataaggggtttgtcactgggaattgcactgacagtatatggcagagaagaggaagcagacaccttgattgaacaaatgactagagatcaagatcccatattacgttatggtggtatgtatgcattggctctagcctacaggggaactgccaacaacaaagccatccaccagctgctgcattttgctgtatcagatgtcagtgatgatgttcggaggactgcagttatggctcttggttttgttctgtacaatgagcccgagcagactccaagaattgtatccctgctatctgaatcatacaacccacatgttcgctatggtgcagccttagccgttgggatatcatgtgcagggtctggattaagtgatgcaatttccttgttggagcctcttacatcagacgttgttgactttgtgcgtcagggagctctcattgccatggcaatggtaatgatccaaacgaatgaatcctttgattctcgtgttggagcatttaggcgtcagttggagaagatcattcttgacaaacatgaggacaccatgagcaagatgggtgccatactagcttctggtgtccttgatgctggtggtaggaatgttacaatcaagctcctttcaagaaacaagcatgacaaactcactgctgtgattggtcttgccgttttcagtcagttctggtactggtatcctctcttatattttatcagcctggccttctcaccaacagccttcattgggctcaactctgatttgaaagtgccaaagtttgagttcctgtcacatgctaaaccgtctctcttcgagtatcccaaaccgacaactcagcagactactacttcgacagtgaaactgccaacagccattttgtcaacttatgcgaaagcaaaatctagggcaaagaaggacgcagaaagcaaagctaaccaggagaaagcaacagaggaggcttctggttctacctcaagcaaggcggctaaagctcaagagaaggatgctgatgtcatgcaggttgataatgccactgaaaagaaagctcctgaaccagaagcaacgtatcaactcctgacgaacccagctcgggtgatccctgcacaggagaagttcatcaagtttcttgaaaacagccgatacgtccctgtgaaaccagcgccttctggattcatcctcctccgagaccttcagcccactgaggccgaggaccttgcactgaccgatgctcccacagcagttggaggaagcaccggcaacactgccacagctgcaagccaacaggggtccggatcatctgccatggccgttgacgacgagccacaaccgccgcaaccctttgagtactcctcataagcgtagatacctgggtccgtagagggttgtgttggtggtctgaacttgcgattcccctcgtcctttctataccttttgttatcttttttttttttactttctgagtatgtagtgtgcggaaatttgttgttggttggaagactttttgtaggctcgagaattatacttgagtcggctctataggatcatcgttgagaatctgggtgctcttatagctaagccccaacaaccctgattttatcctagccgtgaagtcatacatagagcctgggttattcatctgggttattcattgctgcggttttaatccaactatagcttctataatattttgtcttcatagattgcagctactacagtcggacgaccaacggaggtgttctttaggggcaatcatacctaccacatgggcatgtatattatgttgtatcaacaaacaacgatgtctagtatgacatagctggtaatcgatgtaataatctatatt

SEQ ID NO: 17537 - DNA, 1493 bp, Zea Mays
tatcagtgaggtcacgctgctgggggaggcttctggatacttcttctgcctagaggaccgtgcactactttgtagagactgtgatgttgctatacacacagtgaattcctttgtttcagtacatcagagattcctgctaactggagttcaggtgggtcttgatcctgctgatccagttccacccattgctgaaaagcatgttaatgcttctggtggatcagtaaagcaatcagtgagacatctgcctaggagaagcccgggagttcaattttcagttgaaggcagtgcttctgttccgagcaaaaatgtatcaaatggagattattcaaggcagaattctgttccaacagccagggcagaagtggttgattggactaagaacaatactacaattcagtcagtagaatccccacctaagtacatgtcagaggagagtccaacacttctgcaatctagccagaccacaacagtcttctctaaccaaattaacggcaatagtgatgggacctaccacttgtcattctcaagtggtaatgtgacagacagtctaccagattggcctgtggatgagttcttcagtaactcagaatatgttccaaacttaggcttctccgagcatggttcttctaagggtgataacgctaagctggagagtgctggtggatctctacaatgccgtttagctgaaggctccattgctgaggaactattaggacaggtgcctgggttgatcactgatgattatatgagccgggtacctgagaattcatggacagtacctgaggttccctcgccaccaactgcctcggggctcaattggcatgggaatttgtgtttccctgcatatgacagcacaatgtttgttcctgaaattacatccctccagaactcccaaaatcagttcaccgtaccttcgagtttcaagcgccggagaagagagtattgaggtgacgacaagatcactagatatccactgtccagtttaggccatcttgagaaaggtttcttgctgtaccaaatgacggagaaaggatatccaggactgggttatcattcaaacttcaacagaacaatccaagtagctaggtttgaagtgtgctgcaatgcttcaatgatgttcattttccaaagatctaagcttcgctagtgttggggtcttcttctccgcgaaggccctttaggcaaaaacaccttcagcaagacagtacaaaggcaggtgcaacatgaagatataagccgaagctacaatcaaaagagcttcggtttggtgtcatgctaaagacgaaggacgataccgacttaaagaggaaaatactgtatagcccttggtagtctgtattatgatcataattagttattaatgatataaatgtaattttgttcgggctacggctcgcgcctataaatagatgaacaatatccccgtattgtttacgctgcatggttgttggggacttgttctcaaatgctatgaattaagaacaaggcaacac

SEQ ID NO: 17538 - DNA, 98 bp, Zea Mays
gcgcaacttgcgttcaaaaaactagatggttcgcgggattctgcaattcacaccaggtatcgcattttggtacgttcttcatagatgcgagagccgag

SEQ ID NO: 17539 - DNA, 912 bp, Zea Mays
aatttgggtcaagcctttaaacgccgtacagcggataggataaggccatctcccataacggagagagacgaagagagcggaagcgaaagagcagcggcgcaaaggaaagggagccatgctcgcgtcgccggcgctcgccggcgcccactccttcgcggcgtccgtgtatggaagcctcctcgtcccctcgcctcccgtccccgcgccggcacgtcgcgcggcgctgtccgtcgtcgccaaggtcaaggtggccacgccccaggacgaccgcatcgcccgccacgtccgcctccgcaagaaggtaagtggcaccactgagaggccgaggttgagtgttttccgctcaaacaaacatctgtacgctcaagtcatcgacgacacaaagcaatgtactctggcttcagcttcaaccatgcacaaatctctctccaaggaatttgaatactcggctgggccaacgatcgaaatagcacaaaagatcggtgaggtgattgccaagtcttgtttggagaaagggatcaccaaggttgtcttcgaccgaggtggtttcctctaccatggccgcataaaggctctcgctgattctgccagagagcacgggcttgaattctgagtcgtccaggcgtttgttcatatctccaggatcacctgtaatcttctcttttttttctctctccatatgccaaacagagctgttttgtagtcactcgccttgttctacagggtgcaaagccatggcccatggccactcgttgaccatgtcacgtttttttcgtttggtaagagtcttgtgttctgacgcttctcgaattgatattataaattaatatcattgatctatctctttttttttcagatccgtctgtactctatggtgcacatgatatgtactcatataataccatagaatga

SEQ ID NO: 17540 - DNA, 631 bp, Zea Mays
atcaaccgtcttatggcctgagagtggatggaaaccagttccacttgttgatataattgaaggagcagcagttaagaaggcttaccagaaagcattattgtgccttcatccagataagttgcagcaacgaggtgctgccatgcatcagaagtgtatagcagagaaggtttttgacattttacaggaagcatggaaggaattcaattcggtcacttttggatagtactaggagtttatttcactactgtattggtccaatgatctatcgcacaggcatattgcttcccggtgtctgcaacagttagttggttgaaacaacctagaacagtacagcaaatgggcaaccgagagttcggtttgtgaatttcggtgcacagtcaatgccgacctccgccatttcttcaaaattccgactgtaacaagtgtaatatgtaatattggttaatcaggtttaatggatccagacgatgactgaaatgtcatttaaggaatgctttgtgcacagccatttgatgtgtgcctagtagctgttggtgcataaattttgtctaagcttcggatgaaaaaggttatcaatcttttatctgactgttaattttgtccaatatacgttagcagcagtaaatatttg

SEQ ID NO: 17541 - DNA, 2004 bp, Zea Mays
agcgagcaccgtcgtcgtccaaggtgatcccaatggcccatgtgcggctgcttctcccctccactagctccgatcacctagctagcctctcgctgtactacagatcggacaggggccgcgcaggcacaggcgcagcgtcccaaccaatcgtatttactccgatccgccccgccactgcacagccgccttctgccctccttccatcgcgctcgctcgctcgctctcctatataaacgccctgcagtcctgcagcacctaccagtccagtctcgcagagcagatagcatcagtgcctactgcggtactgcatagctagcttagcttggtcttcgatctcgaccagagccagagagtgtggtgtgaccgtgtgagcgacgatggggaagcacgtctgggcggcagcgctcatggcgctggccgtgattgtcgggctcggtgtgccccccggccgcatcgccgaggcgcgcaccttagagaaggacgacctgctgggcggcggcggtgactttggtgctggagagggaggaggcttcggtggtggtgctggtggaggtcttggaggtgggtttggtggaggaggaggccttgggggaggcggcggtgctggtggtggttttggtggcggggctggtcatggtggtggccttggaggtggcttcggaggtggaaaaggtggtggtgcaggtggaggaggtggctttggaggtgggaaaggtggtggtcttggtggaggtggtggcctcggtggtggaggtggtgcaggcgaaggcggtggtcttggagtaggtgccggtggaggaggtggactaggcggtggtgccggtggcgggtttggtggtggcgcaggaggaggtgttggtggaggtggtggccttggtgacggtgctggcggtggtgctggagctggcagtggtcttggaggaggtgctggtggaggaggtggactaggcggtggtgccggtggcgggtttggtggtggcgcaggaggaggtgttggtggaggtgcgggaggcggtgctggcggtggtgctggagctggcggtggtctcggtggtggtgcaggcagtggtgtcggtggtgggtttggaggaggcaaaggcggaggctttggtggtgggattggcgggggcgggggcgcaggtggtggtgccggtggtgggttcggaggaggcaaaggtggcggttttggtggtggcaagggaggtggttttggcggaggcgccggtggtgggttcggaggaggcaaaggtggtggttttggcggtggcaagggaggtggtttcggcggaggtgcgggtggtggctttggaggaggcaagggtggtggttttggcggaggtgcaggtggtggcttcggaggtggcggaggttcgggtggtggcatcggtggtggactctagaggtggcgggagctcggcgcgcgcacgttgagtgcgtgcatgccatgaaattaaaaagcgatacatggagtgtgtggtacggtatggacattgctagagttacattacatcatcactagtatatataaggttgactcttatttgtaagcctaatgaaagtgaataattggatgcgttatgtaagcctactctactatatatatgtttgttttggaaaatcgagggagtgtgttacttgactatccccaatcacactcataaaaacttgacttgtgtgttgtttgtactcgaccaattatatactacaatacatatttggtcatgcctgtgtgatcgctgtgctttgtgcttttaggaaggaatgcacgtgcgcgcaatgggtgttaatgagaaaatagaacacaagagagagtgcagcttcaaaattgataagttatcctgatatcgtcttggtattgtattgaatggtacacattagcagagagtgaaatatgtgataattcacaaaactggcgtacttgttagttccacgagtcttgtttttttttttgaaagggtaaatgatttagttaaaacacctctatttttttttaaaaaaaaaaaa

SEQ ID NO: 17542 - DNA, 1940 bp, Zea Mays
acgtgtgctaagttagctagcgcggagggctttcacttgctccaatcgtggccatttgggaaaaaggttctggcaactgctcaggtacccgctgtggtctctgttcacctaatttcgtgcaaagtttgtgcattcggccggtgtcgatgccgacaaaatctaggtgcccccaaaacgatgcgagtgctcaatactctagatttgaaggtcgtgtggtgcgacctctttgctggaatggtgtgagatttgtgcatctcaacagctttttgctgttccgtgcgatttcctttttttttgtagctaaagattttgaaataaaggaggtcagttggccagatattcttagtggtagatgatgccaaaacacgagttgggtttgtgtatatctggaactattctatttgccatttgaagcgcaggcctggtgcgtggtggaagctattttactgagtcacaggtcgctggtttaaagcagcctcttggatctgcctttctattctatttgcctttaatttcttgtttcatgtgagggaatgaagctccttcttcggctcaggatggtagagaactatgcgtgctatgcttaagtcatgttacatgttaattttttccattgcctgctattgttagcagttgccaacttggcagtgctgattttatttggaccaacctcatgatgttattcatagagaacagctagacttcacaatggcgctacaagcagatagttcataaagagaataaaatcgcagcaaaccatgttcctgctcgcagcaacatatttggaagcatgttgtcacaaagcacatgaattcgacttttgaccctgcatcttatgggaagtgatgaacctctggagctcttgtgtgtgctccttggatattgaattctcttatccaaattttggtgttgtaataatgtatgcatcagtacttttgctgaatatgaattgctttgtctttacagcactaatgtttgcttatgacaatggagtcacctacaactgccgctggtggtgaactggagagctacttctccttgggtttgacagtatcccactcacagaaagataatgctgaatttccaaaggttctgttgcttctctcagcgtatcttgacaagacagttcagcagaatgaagagttactagactccagtaaaataaaggagtcgaccactatctttcatggtcagagggtgcctgaacttagtataaagctgtatgcagagcgtattttcaagtatgcaaagtgcagcccatcttgctttgtgctagcacttatctacatggagagatatctacaacaaccaaacatttacatgacgtcatttagtgttcatcgcctgcttattacaagtgttgttgttgctgccaaattcatagatgatgcgtttttcaataatgcatactacgggagagttggaggaattagcacaagagagatgaatatgcttgaactggatttattgttcggtctggacttcaggctcaaagtggatatagagactttcgaaagctactgcttacagttggaggaagcactggttcttgttttggagagaccaattcaggtccaagaggccaacgtaactaaacacttgatttgtaacagcagcgccgatgagacttgcaaacacgagctcgggcttgaaaggtacagcagtcaggctgtccaagggtgtagttggtaaatgtgattgggcagatagttttgaaaaaagtgtatgggtccgagtattggtaattcttttatttgacatttaagttgttcagttggccttgtttagtagggccgttattctacttctctacaacactagtgcttgtgagccacgccgttcagtttttttgcggagtgagtttgaaaacattactggagtccggccacgttcaagtatcatttcattaattatatttttactaggtgaacgtgtgcatt

SEQ ID NO: 17543 - DNA, 1382 bp, Zea Mays
attgccgaccaggctccctcgcttctgttcgtctccctcctcgcgttcctctcttccgctcgccgccgccgccgcatccgtcaccttcacactgcgctccctccatccctccctgtctgcggcgactgggtggtctaccgctgccctcgctttcgcgggcgaagagcgcccaccagatgccgaggtggacagagaattctgcttccaccaaatcagctgaattggtgaaacaacaagaccgtttggagtttgacgatcctgatgaggtagacgaagaggaagaagttgagtatgaggaagttgaggaggaggtcgagtatgaagagacagaggacgagtatggacagactgaagctgtacgccaagttgatgctaaacatgacagtaaaatggtggatgctgatacggatgagggtggaaaagggagtcatgatgaacttcttgctcttcctcctcatggatccgaagtttatgttgggggcatcgcctctgatgtctcttctgatgatctcaaaaaactctgcgagtctgttggggaagtagtcgaagtgcgaatgccaggaaagagtggtaggctgtatgcctttgtcaatttcagaactaaagagctggcttcaaaggccatccagaagttgaacaataaagatctaaagggaaagaagataagagtttcttcctcacaggctaaaaacaggctatttatcgggaacataccctataactggacagagaatgaatttaaaaaagcagcagaggaagttggccctggagttttaaaagttaatctcgtgaaggcaccacattcagatacgaacaagggttatggatttattgaatactacaaccaggcttgcgcagagtatgctaagaagatgatgtctaccccagaattcaaactagataaaaatgcccctaatgtcagttgggcagatactaagaatggtggtgaatctgcctctactgcacaggttaaatcactatatgtaaaaaacctgcccaaggctgttactcaagagcaactgaaaaaactatttgagcaccttggagaagttacaaaggttgttattcctcctgcaaaagctggtcatgaaaatcgatatggttttgttcacttcaaagaacgatccatggctatgaaggctctggaagacactgagagattcgaacttgacggtcagctgctggattgttcacttgcaaagcctcttgctgataagaaggacgatacatcagcacctaaaggaggtccattgctcccaagttataccccagttggatatggactgatgggagcctataacccactcggaaatggcctggcagtggcaggcgcttacaatccgtatggaaatggactggcagatacatatacaggagtgtca

SEQ ID NO: 17544 - DNA, 4501 bp, Zea Mays
tattgagccactggagctcatggtagccttgttaactatagatctagttccgtcggtgcctcgtcacctgctatgcaaactaatgttgcaagcatagattggttgggtggcaaacaagcttccagagttgactcgtcgtcgcaagttgctgcacatgcttatcacccttcccatagttttgatgcagctggcactgctatggattctgcaccatcatgcagaccatgggaacgtggagacttacttcgtcgactggcaacatttaagccttcaacttgggcttctaaaccgaaggctgctagttctttggcctgtgctcagagaggttgggtgaatgttgacatggacaaaattgaatgcgagtcatgtggcacacatctaatcttcaatgcattgacatcctggtcccctgttgaagttgcaaatgctggagaatcctttgccgagcagcttgatgcagcacaccagaatagttgtccctggagaggcaataactgtgctgacagcttggtccagcttcaccttacacaatcagctcttattggaggttttaaagaccgctgtgatgggcttttacagtttacctctcttcctgtgattgcaccatctgcaattgagaacatgaagcttacaaggagtgtacaaattgatcatctgttgtcccaatcaattacctttttatctggtattctgggctgcagagcagagagtacagcaggaattgatatccaccaagatttctcttgtagctactctcaagcacaaaagctcataagcctgtgtggatgggagcctaggtggcttccaaatgttcaagactgtgaagaaaattcaacgcattcagctaaaaatttaccctcagttggacctgacgaacggttatatccccattttgttgaacataacaaaaattcattttctgcatcagccaagaaagataaggggaaaggcaaattgcccgttggagattctggatgcagcatgaggtcaccgttgttagattgtaacctgtgtggagctacagtcaggatgcgggactttagacctgtattatgtccttctcgtttcagtccaaataacattgttgtgcctggaacaggcagaaagctaacactgacacatggagttagtgctgccagtggtatcaatgagtgggttactgatggggtggaaagaggtcaagatgaagggcgtgatgaagcagcaacaaatgagggaaaaccactatcacttgttggagtagacctaaacctaacaatggctggaggattaccgtcacctcaatctgccatgcctgctatgtcagagcggtttaataatggaggaatgggaagggatctgatgattggacagcctacaggcagtgaagtaggtgattgtgaaacctcatatgaatctcggggtccgagttcaaggaagcgtaaccttgaggaaggtgggagcacagctgacaatccacaagataggctgcagcatgctgatagcatacaaggaaatttcattgatcgtgatggtgaggaagttgatgatgctgcacaggattcagatgtcccgaataagaagtcccgtgggttcgatctgtttgatgcctatcgtccttcctctggagctggtcccagtagaaatttgtcctttggccctcatgaggatgctggtatgttcagtcactcaagagcaattgacctggcagctgttgagcgtccgactgctagggattcactgagagcatcttctgttattgcaatgcatactattcatacttccgaggaagattctatggagagtgttgagtattacccaggtgatggtaatgatatcgatatgccttcttctagtacacaaaggaacattgaaatgaatgatgccttggatcttaactatagcaaccaagcacagcaaagtgctaatgcacatgctggtgctggaagcgatgcaagagaaattggaggaagcagtacaaatgaaggggaggaggtcattaatgctgaaacagttcccccttttggaagggatcaacttagtttaggaattagtggtggtagtgttggcatgggggctagtcatgaggctgaaattcatggaaatgctggttctctgcacagaactgagagtgttgtaggtgatgctgaacctattgccgagcttactgagacaatgggtcagactggtgaatcagctccaggacctggattaatggatgaatttgtacctgaggtagaccgagatgaacctcatggagacagccaagatacggtgtcccggtcagttggccaagccgacagtggatcgaaaatatatggctataccaaagctgattctgttgaaagtggagaaaagataggtcatgccaccggtaatggaagcagcatgcgtccttctctttcttgcaacgcagggatgtgtgctggttttgatctgtctaaagatgatgtgacacatactggcaaaatactaactactgatgatgcattaatggggttagattatgatcctggaaatggattaggagctactaatggagaaaatgactatgaatcgggtctgctggaatttgatcctgttaagcatcacaatacttactgcccatgggtgaacgggaatgttgcagcggcttgctgcaacaacattggctccagctcaagtagttcagcgccctctggttggcagctaacaatagatgcagtcgacacgtaccaatcacttggtcaagcccaaaatcaaataatgcaatctgattctgcagcttcattatatatgcaggatgaccaaataactcataaccgcaaggtagggagacggccttctgtgagcagaagctttgggaagtgctgatcggaactcctgtagctcaagtgtttcctagacagaaacagcattacagaagttccagattggtgtaacaggagaaacaaaataatgatagtctcagtagattgttatcaccccgtgggtgtgagcttatagctgttttatgttgttgcatattgatacatcatatatatgtgtatttatattccgaaagggtttattcaacagtctttcatttgacagtaacattttcaagcgaactaggtacattattatggtgagattatgtaaacttcatattcatatatttatcgccgttcttgttgcgtccatgtacctcatctaatgatatggttgtgttcagatttttcttcttctgtttctttgtatctggctgactgtttcttcgcgcggggtgctatctgagaggccatcgccctcgtcaaatctcagcagccaatgagcaccacccagagtgccaggtcgtcagcaacgaccagataaagaagtggatgagatgccacttcacttcactccacccctgcttgtattgtatcctcgtcttttcccttctctccgtctatttccaagctttctccagatcaaatcagaaaggggaagggaagaacggcccagcaatgccgctctgcagcttctacgcctccacctccgttcccgtcgtcaagccccagcagtccgtcgcctcgtccaagccccccaccacggcggtggcctccgtggcgacaactgtgccgatgcgcagtgcagcgacggtgacgccagccgtggccacaacaacgagcctagcgctgtctctgcacctgccggagctgccgtcgcaggtgaaggacaagatcctgagcctggagctgatgggcgtggactatgggcgcgcgctggagcagaacccggcgctccgcgacgcggcgccggagtccatccacgcggtggtgtcgttcctccagtcccgcgggctccagttcaaggacctgggccgcgtcttcggcatgtgcccgtccgtgctgaccgccagcgtccgcgccgacctccgccccgtgttcgccttcctctccgcggacctgggcgtgccggagtcggcgcaccggcgcgtggtgatcaagtgcccgcgcgtgctggcctgcagcgtccgcgaccagctccgccccgcgctcatctacctccgccgcctgggcttccgggacagccgcgcgctggcgctgcaggacccgatcctcctcgtctccagcgtggagcgcaccctggcgccgaagctggagtacctggccgggctcggcatgtcccgcgacgacgcggtcgccatggtgctgcgctgcccggcgctcttcaccttcagcatcgagcggaactaccggcccaagttcgagtacctggtggacgccatgggcggcggcgtcgaggacgtcaaggccttcccgcagtacttcgccttcagcctcgagaagcggatcgcgccgcgccaccgcgccgcggaggacgccggcgtcgcgctgccgcttccggacatgctcaaggccaccgacgaggagttcagggagatgctcgacaaggagcgggagctgcacgagcaggcagcgacgacggactgatcgatcggggggctagtacagcggtttgcacctgatccgactctccgaagcatccaaccgccgtcttcgtggcgatcgagtgtcct

SEQ ID NO: 17545 - DNA, 3044 bp, Zea Mays
ggagataaattaattttctagtgtgtaccatgatttcggcaaggcagtagatccggaatttcctggccatatcttgctggaacaatttcaggcccaacttgtttctgctgttagaatggctataagcactgcttctggtccacttcttttggaggctggacttgaactcgctacaagggttatgacgagcagcataattggtggggatagactagctcttagtcgcttgttttctctgataacacgcccgttaagtgacatagagggcctactatatccatcttttgctgactgggtagtgtgcaagataaaagttcgccttctaactgcccatgcagcagtcaagtgtaacacctatcaattcttgaggatgagggaaaatgctcctaatgaataccagcaattggcaccttcacttgtaaacagttcaactctattaggaaaatactggattcgagcactcaaggattatgtttctataagttttggtttgcactcaaaaatcaattacaagccattccttgatgggattcagtcattattagtcttgtccaaggtgcagaggtatcttgatgaagtttggttattaattcttaaagcaacagctcttgatgccgcgcctttggattttgatgagaataatcctaaaaatttactcgaacaaacatttatatctgggcattgtatggtcaaattggacagaactgaattccaatttctttgggggttatctatccttgtgctgttccattcctgccaatcaatgaagaataattctttgaagatcaaccttgactttaaacaagacaaaaactttggggaatttattgttcatggacttgatgacaaaagaccgtgtgatcaggtcttacgcgtgctttcgtccctcacaacagaagtctttttcagcaataattttatttcagtggatatttgccagcaactcctccaggcacttacatatgcagattgttcaagcgctcctatcatccacctattcacccagattatcagattctgccctgacaatttttttgaggttgaagcctttgtcttctctgcaatagagttattgtctcagtatctgggtctgatacttcaatgtagggatgggagttctcagaataattcaagtaacactttgatttctgagttgtctattgcaagcgagacgatggcttatcggatcaaaggagagtatttgtggaagctggtgatgttagtggtatctacttcacaccaatcatttcaacaagtttcaactaatttatgcttctcaaatattatatgcttcctccaaaatatcttccctttcatgaggaaaatttttagagaaagagtcgaatcagatggtgagtgcacaagtcctaaagttgtctttggtgctatggttggcctagtgggatacttctatgtagagtgtgataaaaagatctcattgctcgaaaacaagatttctgattcctacaagctgttgaataagatactacttttttgcttgggagaagccactgctcttgcaaaacttgttcctgagatcatttatcgaagtgaaaatgtaagtaacaatgatgtgctcctttggggcagcttcaggctgtgcgtacaggttattcaaggttcatttcgtagtaccaacatacaggtgcacatgctgggtctgcaagtactgagaagctatgcacagaaggagctaactgaaggttcagaaacaaagttggattcttttatgatgttgcttacggaattgttgggagacttgtttttggtgatggagactacattgaaggaatgttcaaacaaaaaatctgtcagtgtcgttgatgaatgtttgaaacttgttttcctcttccacacactagcacaatcaaagaaataccgacaagatgctacaactcttctgctggaggccttgctgatggttttctctctgtccagtgatactgtttcacaggagcttgctgaagtgaacaccatttccagaaagttgttctctcattttattcagattccgtctgtggctatacagatcaaagacataatgctttctgcaccagctgaaaggagactacagcttcaggacatggtccgagcttcagtcagtcaagggcagataacggtgccagtggctacgagtgcacactcagaacagaatattcaggatagttgcagtaaaaaccctgggtccacatctgaagcttctgattgtgttgcaactcacgggaataatgacaatgaagttgttgatgatgactgggatgacgattgggatgctttccaatctcttcctgcaattgcaaatgatggtgttgattctggagaaatctctcttacaactaggtacaatgaacagatccctcaagaaaatagcagttacggttcttgtaatgcggatattacagctcgtgctatggaagacataacttgtgtggacaaggaacttgaggagccctctgatttgcaattctcaagtactgaacaacagcctaaacatgatttaccagggtcatcccacgaaggttgtgctaaacttgaaagacatccatctgttgattgcaaagagcaattagctgatgatgagacagcagatgaactgcagcagcaggttcatgaagacactgatcatgtaaataaagatagcgaagttctctctgcagaaattcatggggttaaattggatatccttgatgaagatgttgaagatgattccccaatgaattcaaacaatctatcagatatcgcagaggaagagtcctagggttggtacaatgcaacgagggtggaccgcaagcttgtcgagatagtagagaagagctgtccggttcctctgatgctggcataccagattttagtatgtcaggacacgtgatgagcaagagcggaggaaatgagcaaaatgttattttgcctgtatcaatatatattgcacgagataaaaataatataaggttacaaccatgatttttattttgtgccttcctccgcccctccgcttctaaataaatagttacctttgaatgaatttcaagaaaacccaatcaaga

SEQ ID NO: 17546 - DNA, 913 bp, Zea Mays
taactgagccactactagacacatacaataggtagtcagattgctgtgaagattgtaaaaaacaagcatgccccacccttcaagactgcacagtttgagcttgaatttggaaaggggatatgccgcagttctgagctttttgaacttggattgaagcacaagcttatccgaaagagtggtggttcgtattatagtttcaatggtaaggctttcaatggtaaaagtaaccttaaatcttaccttactgaaaacaagagtgttgccaatgatctggagatggaactaaagagattgatgggaactgatgcgtctaaagagcaggaggcaggagacagttcgcagagtgattttcctgaagagagtgtcacacctgaagcatcgtcagaagaggatctgggagccataattgaaggttagccagtgatctgatgtgctggcaagtgggaacagaatttctggagcagttgttcctgtaaaacaatatcttgggtcctgaagtcaccaccgtttggatcgacatgcctgtggtgttctggtgatctcatcatagcagacttcagtctttactgtgcttatacagtagtgcagcaggaagagaattcacattgtgtgaaatcatggtgatatctgagaggtggaagttgtagtaagccgggaagggtgaggtattgtggtccgtggcatttaaacttcagtaagcaaacgccgtgtatatatgatgtgcacattttgaaaccgggcattctttattgactgctgctagatttacattgagctccctccacttccaatacctaccttttttttgcgtggagctagttttttggatggtgcttctgcggaagcctgttgctggaagatccaatgtcgtagagctggggcatttctgaccttggctgatctatgttcgccg

SEQ ID NO: 17547 - DNA, 2643 bp, Zea Mays
caccaacacacacagactgacaggcgcaagaagaggagaggagaagaacagaggggagtggaaataatctagcagcggaaggggaagcagcacgaagggaagcggcagcggaagcggggttctggctaaagtacgttaaggtcttttttatcagcaattccagtaatgtgccttgcctcttttacgtgactatacaagacaatgaatggaactcatccctgggcctccatgtccggaggtccatgttctaaccttggatatgccagggacatgaatgttacagccaagtactagcatgaatggtgattcattgatgcgtgttcctgcgtcaccaatatcgttttcatccaataacatctctggctcttcagtcattgacggttgcatcatgcagcaaagtccaccccaagagcaggtgcagaaacagaggtcttcaagtgtaacatcacaacctgtgattgatgctggtggtgcattgcatgctcagaagaaatcaaggattgatgtttgtcagggtggtatcacggaacaacagctgattcagcaactgctccatggtcagaattctcttcattaccaggggcaacagaatccacagcttcaagctttaatgcagcatcataaactggcacaacttcagcaacggcagcagcagcatccattttctcagatgcaacaaccccaagttggtattcctcggcagcctcaacttaggccaccactggcacagactggaatgcagttaggtggtcctgttaggtctcctatcgagagtgggatttgttctcgcaggatactgcagtatttatatcacaagcgtcatcgcccagagaataaccctataacatactggaggaagcttgttgaagagtacttcgcacctcgagcaagagaaagatggtgtgtctcttcttatgaaaacagagggaattcttcagctgctgctccacagaaagctttggatacgtggcgatgtggcatttgcaatacacatggtgggaaaggatatgaagttacctatgaagtacttcctaggctctgccaaattagatttgaccatggtgttattgatgaatacttatactttgactcacccaacgaattccggttgcctaatggacaaatggtgctggagcatgcaaaagtagttcaaaaaagtgtttatgaacatctgcatgttatacacgagggacatctgagaataattttcacaccagaactgaagataatgtcttgggagttctgttcacgacgccatgaggagtacaccactcgcaagactatagcaccacaggttaataatcttctgcaagttgcccagaaattccaagctgttgtcagtgaaagtggatcagctgggatatcaaataatgatgcacaaaccatctgcaacatgtttgttaatgcatcacggcaactggcaaaaaatctagagcatcacaccttaaatgaacatgggctttctaaaagatatgtacgctgcctgcagatatcggaggtggtgaatcacatgaaggacttgatcgagttcagccacaagagcaagcttggtcctaaagagagcctgaacagttattctaaaaccacggcaaagtttgagaatatgcatgattcgagacaggccatggctgccgctaaccttgccaacaaccagagcaacaccaaattgatgggggtcaaacaagagacaagcacttctgcgaacaaccagactcctggtgccggagccattggcaacaacaatctaccgattgccgcacctctaaacacctaccagaacatgctcagaagctcaggtgccagtacgatttcgctgcagcaggaggcgtcgagtgtcttcaaaggtcctacagcaatgcacaacggcatgcagctggaagcggccaggtccttcctgggacctaaccaagttcaattccagcaccacccaccgtcgtcgtcgtttcagcagcagcagcaaaacagtttccatggctttggtgtcaacccgcagtaccagcagcatgtcctcaaccagcttctgcaggaagttaagaacagtaacaaccgctcgaaagcgcagcaaccgcctctggatgcaccaccgccgaatgcgagcggcgggggtctcgcgccaggagttgctacccccaacgtcattgctgctactggggagcaggggcagcatgtcaataacagtagctctaaccataacggcacggtaaagggtgctgctggtactggccctagcaatgtcatcaacaatagcacagccagcatggcttcggccagaaacagcagcttcaagtcggtgagcagcagtccagctgctgctggcaatgccgtgagctcgaaggtcgatgactccttccatcaactggaggacctcgacgacatgatcgctaacgaactggtggagagcgggctgttcggtgcaggacacgggtggtagtacgctactgtggtaaagccaagcaatgagatataagcctaagcctgattggtgctggcaagtgcttttgccgccgccacccttctctttctgtagagctttatgtattgacagttttccgatgatgatcatatcatacactggcgtcgctccagatgtgtgtgagttgagatagtgggttggattggatttggctgataaaaaaaaaacaa

SEQ ID NO: 17548 - DNA, 935 bp, Zea Mays
tgacagtggacatcatgccttgctcacttgctgctgccaaaattggcgagggaatattgttggatcatggaacaggtctagtcattggtgaaactgctgtagttggaaactgggtttcattaatgcagggtgttacacttggaggtacaggcaaggaacatggagataggcaccccaagattggtcagggagctctaattggagccagtgctactatcctcggcaatattaatgtaggcgaaggtgccatgattgctgctggctcccttgttttaaaggacgtacctccccacagtatggctgtaggtaatcctgcaaaggtagttggttatacagagaaagaagatccttctttaactatgaaacatgatgcaaggagagattattttgagcatgctgccatcagattgagatgattgatacacctaatgacgagtcttctttctattcgtctgtggaatactgtggagtaaaaaaagttccaaatcgccttattggcaagaagttttgtggagttaaaaaaaggtttcgtcgtcttactcgcaggaaaccttgtgaagttaaaaaaaaaatgtttgacgaaacgcatacggatgccattccggacatttcgtcacaggcacaaggctggatagtcgatgagctctgtgtttccctttctgcccagacaaccaaatgaagatggaaaagggtcacccagggctccaaaatctagagtgtagacaagcatgtccttaatgcgccttaaattggtctggatggcacttttttgtgataaactatctatctaaaccattgactaatgtctactctactctcaacaagatcaattaattgtatatttgatattaaagttggaatgtttagtatgacaaatttaatattttaaaatagatatgcatgaaatttgatcttgatctttttctattatcaag

SEQ ID NO: 17549 - DNA, 734 bp, Zea Mays
tccaataatgccattgctctggactcgttcaacacggctgtggtttctcctgtatactacgtgatgttcaccattcttaccattgttgcaaacatgatcatgtacaaggactgggcctcgcagactgcaacgcagatcgcaacacagctatgtgggtttgtgaccattgtcgcggggacttttctgcttcacaagactagggatatgggaaatccaccaccaccaccacctgaccaaatgtgcctgcaagaagccggggaatgtgctccacggtcaatgaccagttctagctgaacacactaagatgtcaaaatctcacagcctctatggactgaattggaattttgagctatatggtgacctttgtagatatattaggaaggagtaaagattggagtgcccagcagttggacataccgatgaagttttacgtttctgcaaaagaaagaatgaactgtatgaaggcatcggaatcttgtgaagacatgagattcaaactagctacctaactttggtaaatagcttgttatgccattttaaaacgatcatgatgctcaagaggcagggcgaattaggcttctctatactttttgtgataattaaaccctagttacaaatttaactttacccgagtgtccaatatatgtacaaaagctttaaaccttaatttcaactgtacgttgccatggcaagccgagttacccacctttatggatgatccttgcactttgatc

SEQ ID NO: 17550 - DNA, 869 bp, Zea Mays
ttcgttttggccagtcatctcactaggataagggacacatcagcagctgaagcaagggcaggaaaggatatacaaggtataccatgggagaggatacacatagccaggcaagactaccgaaaagctaggttggaacagtataagaactatgaaaatttccctcaatcaggagagctcatggataagttgtgcaagcaagtggagaagagcagcaagtattatgagtttcagcataacactagatcagtgaagccatcaattctccattttcaggaatttgttatgggcaacctcgaggcatgatgtatattttatgtcaaattccacagtaacccattggtcatcattgtctcacaaattatcagaggttcttgacttctctgggcacattgctccggtggagaagcatcctggcagtttgctagaaggtttctctggggttcaagttagcacacttgctgtgaatgagggtttgttggtagctggtggttttcaaggagaactgattggcaaggatttggaaggatgtaatataaaattctgtgcaaggacaactttgagtgacaatgctataacaaatgccatagatatacacagatcgacaagtggaagcttgcgcattacggtatctaataacgattgcggtgttcgtgaatacgatatggagagatttcagctcttgaaccactaccgatataactggccagttaatgcctgatggagcctccacgtgagggggagtattggagtataaatgagttgcccacctttccataatcagcttaagaatttgggttgaaatgatcagtgcatgcaacttaataatatatttaatgctttgacattcattatttgcttctataacaaca

SEQ ID NO: 17551 - DNA, 973 bp, Zea Mays
ccaagcaaggccctatcagccggaacagcccacaggtggatgctgcgaatcgagtgggtcggtccgataagcctggtctagtcgagcccaccaagtttctcgaggctagggtttgcacgagcagcgaagcggtttgcgtgttggcgttgggcggcccggccgagccggggccctatatatgagggagaggaccccccactagggtttcctccgacggcgccgacaaaaccagaccatcaaacaagtgccagcgccctctcgcagtcgccgcaatggagagcaccttcatcatgatcaagcctgacggcgtccagaggggcctcattggtgagatcatcagccgttttgagaagaagggcttctacctcaaggccttgaagcttgtgaacgtggagaggtcgtttgctgagaagcactacgccgatctcgcctccaagcccttcttccagggcctcgtggactacatcatctctggccctgtggtggccatggtctgggagggcaagagcgtcgtcacaactggccgcaagatcattggcgccaccaaccccctggcttctgagcccggcaccatccgtggcgactttgctgtcgacattggcaggaatgtcattcatggaagtgacagcattgagagtgctaataaggagattgccctgtggttccccgagggccctgctgattggcagagcagccagcacccctggatctacgagaagtaaacatggaaagtttcacatcaaaccttgagagccagaggaagcatgtcaccatttgtgctttagcaatgttttcgaaaagattatgatctgtatcttggaaccttatttcaatggaccaaatttctttcttaaacgaacaacaaacttgttattccttatttacttcataattttgacaattggtgaatgtatcagtaatcggtgagagtgttgcttgcttgctattatagtttttactagcgttatatatg

SEQ ID NO: 17552 - DNA, 1235 bp, Zea Mays
cagcccacgagactgcgcggctttccctctcgtcgctgacatgccgaagcggcaccgcgacagcgagggccggcagcggtcgtcgtcgtcgcggcggcggcgcagcccgtccccgtccgactcggacgccgcctcctccgattacagcggctccccccgacggagccgtggacgccaccgccataggagccgccgccggagggacactccgtccacctccagcgacgcgagcggcagcgggagcgaggattcgaggtcggactccggacgccgagggaggagcggcggccggaggcgccggaatgtcaccgaggagcagatcattgagtacatggcgaagaaggcgcagaagaaggcagagaaggtggcgaagaagctgaaagcgaattcggtttcaggctactccaacgattcaaacccctttggtgatcccaacctgacagagaagtttgtgtggcgaaagaagatagagcatgatgtatctcagggacagaaggtggacttttctgtcaaatccgagaagaagaaacagctagaaagaatggctgaaatagagaaggttaagaaaagaagggaagaaagagctattgaaaaggcacagcacgaagaggaaatggcgttaatagctagagaaagagcacgtgcagagtttcaagactgggagaagaaggaggaagagtttcattttgaccaaagcaaggtcaggtctgagatcaggttgcgggaggggcgtacaaagcctattgatgttctccttaagaatcttagtttctcagatgaatttgacattgagttaaatgagccttatctggtgttcaagggattaacagtgaaagaaatggaagagctatgtgatgacattaagatgcatcttgatctggacagggaaagccaaacaaatgttaagtactgggaggcactcatggtggtatgtgaatgggagctaggtgaggctcggaaaagagatgccctagatcgggctagggtccgtggtgaggaaccaccacctgaggttcttgcagaagagagaggtttgcatgcaagtattgagggggatgtaaaaagtctcctggatggtaaaacttccacagagcttgaagatatgcaaagtcaaattgagtcccaaatgcgctctggaactgcgaaagttgttgaatactgggaggctattctgaaacggcttcatatttacaaagcaaaggcttgctacattgatcctctatattctagagctg

SEQ ID NO: 17553 - DNA, 244 bp, Zea Mays
tcaccgcaattacagatgctggatttcgtggccacggggaagcgcgctccaacgacagggactcgaaccactcgccacagccggggtttgtaacggcggtagcgttttgattcgtgggatcaacagggactcggccgagcggactccggcgacattgcaacaagctggagagtcgagcgagtctgaagctggggtcccacgtgatagtggttccggtctggtacctggttgcggctgggacgct

SEQ ID NO: 17554 - DNA, 2765 bp, Zea Mays
cgcaactcgcgagtcgcgagtagcacgccatcacggcctgacgggccgccgtgcgaggtagccacgccacgccgccgcgcccactgcccagcgcagctaaaccctcaatagaaaactcgaaaactgacccaaccggccaaccctgacccaaggaggcgaggaagacgcacctcctccgcccctcctcgccctccgccctcgctcccccacgccgacgccgacacctatcctcaccgtatccgcggtcgcaaatggcgctaacctcccaaggcatcaccctccgttccccgccagcggggccccgcggccacggcgggaggcggtcctcttccgtgcccaccgccgcgaccccgcgcgtcttggggcagccccacgcggggcaagccttatccatctcgcccgtcaggtatgaacccgccgctcgcccaccacggggaggctccgccgccgccgccatacgtgccgccgcctcggccggcgcgcagcccggcagcgacccggtctctgctgagcccagaatcgagctccccacgatattttccgtcttctccgagaccgctaagaccggcgctgccttcttcattgcctcgtcgggcgcggccttcctcctcggctcgtttggggggttcggcggcggtgctgggggtctcttcggcggcggcggtggtggagggggtggatggggcgcggggggtggtggtgccggtggcggagggggtggagacttctggtaccggctcatctcttccggcgcggcgcacgcggacgacaagtcatcgggggattgggacgcgcacgggctccccgtcaacatgacggtgccgctcacgaagctgagcgggctgaagaggtataagctgtctgagctcaagttctttgatcgggcagctgccagcggtggcgcctatacggggccagaggattccttcttcgaaatggtgacactgcagcctggtggcgtgtacaccaagtcgcagctgttgaaggagctcgagacactcgtctcctgtggcatgtttgagcgggttgatctggaggtgaagcccaagccagataacacaattgggctcacagtctcctttgtggagagtgtgtggagttctgcaaagcagttcaagtgcatcaatgtggggcttatgtcacagtcagggcaggttgacttcgaccaggacatgacagagagggagaaaatggattacctccgtaagcaggaacgtgattaccagcagcgtgtacgaggtgccaatccctgcatcttgccagaaaatgtacgtggagaggtgctgggaatgatgaagaagcaggagaaagtgagtgccaggatgctgcagaagatcagagatcatgtccagaaatggtaccacaatgagggtttcgtatgcgcacaggtggttaactttggaaaccttaacaccaatgaggttgtgtgtgaggtggtcgagggtgacatcaccaaggtggagtaccagttccaggataagcttggaaatattgttgaaggaaatacccagcttgcgatcatagaccgagagctgccgcagcagcttcgacctggccacatctttaacattggagcagggaaacaggctctgaagaatataaattcacttgctttgttttccaacatagaagttaatccacgtcctgatgagacaaaggaagggggcatagtagttgaaattaagcttaaggaactggaacccaagtcagctgaagtaagcacagaatggagtattgtacctgggcgtgaaggccgaccaactttggcatccatacaacccggaggaactgtgtcatttgagcaccggaacatctatggtcttaatagatctattgttggttctgttacatccagcaacctgctgaatcctcaggatgatctttcattcaagcttgagtatgtccatccttatttggatggtgtcgatgatcgtagtaaaaaccgcacattcaaaactagctgcttcaacaccaggaaattgagtcctgtctttgttgctggtcccaacatggatgaggctccacctgtttggatcgacagagttggatttaaagccaacataacagagagcttcacacgtcaaagcaaattcacatatggccttgtggttgaagagattacaacacgtgatgaaactaatactgtctgtacccatggttctcgagcaatgcctagcggcggtctgaacatggatggacctcccacaaccctcagtggtactggagttgaccgaatggcatttcttcaggctaatataacccgtgacaatactgagtttgtgaatggtgcaattgttggagacagatacattttccagttagaccaaggtcttggcattggaagcaaaaacccgttcttcaaccgtcatcaacttactctgaccaagttcatcaatttaaataagcaagagaaaggtgtcggcaagccactaccagctgttttggttcttcatggtcattatgctggttgtgtgggtgatttgccgagctatgacgcctttgcacttggagggccttattctgttaggggctttagtaatggtgaactgggcgcttctaggaatattcttgaggttgctactgaactgcgtgtccctgtaagaaacacacacgtttatgcatttgtggaacatgggactgaccttgggagttccaaggatgtcaaagggaaccctacagagtttttcaggcgtgttggtcatggatcttcatatggtgttggtgtcaagcttgggttggtaaggggagagtacattgtagatctt

SEQ ID NO: 17555 - DNA, 2659 bp, Zea Mays
cataattccaacccactgtgtgtgccgctgtagcagcgcgcgccaccaccgtcaacttctccccacctcgccgccgtctagatttcgtctcctgggctcgagcaaccgaagcaggcttggggtgttctcggagagaatcgttgcctcggccgatgccggccctgatgtaggtttctgctctgctttgcccggtgccaacgtctctcccggagtagcggttccgccgccccatgatctgccagttggaacacatgggcgttcacggaggaggttgctctgctggacagtgaccgcatttggtagcggtggaggaagacgacgaagaggaggaggagtaggccatgaaggaggtggccgaggaaaggtgccttgacccgcagctgtggcacgcgtgcgctggcggcatggtgcagatgccgcccgtgcgctcccgtgtctactacttcccgcagggtcacgcggagcacgcgcatggcggcggggccgcggacctcgccggggcgcgagcgctcccgtcgctcgtgctctgcagcgtcaccggggtgcgcttcctggccgatccggagaccgacgaggtcttcgccaagatccgcctggtgccggtcgcgcccggcgaggtggagttccgagagcccgatgagttcagcgtcgaccccgcggacgcccgggagaagctttcttccttcgccaagacgctgacgcagtccgacgccaacaacggtggcggcttctcggtgccgcgctactgcgccgagaccatcttccccaagctcgactaccgggccgacccgccggtgcagacggtgcttgccaaggacgtgcacggggaggtctggaagttccgccacatttaccggggcacgccgcgccggcatttgctcaccacgggatggagcacgttcgtcaaccagaagaagctcgtcgccggggactccatcgtcttcctgcgcactgagcatggcgagctgtgcgtcgggatacggcgtgtcaagcgggtgtcctgtggtggcatggagtgcatgtctgggtggaacgccccggggtatggggccttgtcggcattcttgaaggatgaggagggtaagatgatgaagagtcatggtgggtacatgagaggtagggggaaggtgaagatcacggatgttgtcaacgccgcaagtctagcagcgagcggacaaccatttgaagttgtgtactacccgagagctagcacaccggagtttgttgtgaaggctgcatcggtacagaacgcgatgaggaaccagtggtgcccggggatgaggttcaagatggcatttgagacagaggattcgtcaaggatcagttggtttatggggacgatagcttctgctcaggttgctgacccaatcagatggccaaattcaccgtggaggcttcttcaggtggcatgggatgaaccggacttgctgcagaacgtgaaatgtgtgaacccatggctcgtggagatcgtatcaagcattccaccgatccacctgggaccattttctccacctaggaagaagctgcgggtgccccaccatccggacttcccgttcgacggccagctgttgaatccgattttccacggcaacccactcggtccgagcaacggcggcggtgctcttcgctgtttctcggacatcgctcctgcaggcatacagggagccaggcatgctcagttcggtctaccactaacagaccgccagcttaacaagctgcacctcggtctgttccaaggcggcggttttaagcggcggcttgacgctatcactccaccatgccctatatccaggggctttgtgatcggcagtgcaccggtcgacgagagcgtctcttgcgtgctgacgatcggcacgccacgggccgcagagagatctgacgacaggaagaaaccacatctaatgctgttcggaaagcctatccttaccgagcagcagatgagctctagagggtcaagggaaacactctcccctgaggccactgggaacagttccgatggcagtgttcagaaaacgggaaacgtatccgatggctccggctcgtcgatctgcatcggttcctcgtcccgaggccgcgaggcttctaggctcgggttcgaatttgaagccgggcactgcaaggtatttgtggagtcggaggatgtcggtcgcaccatcgacctgtccgtctttggctcgtacgaagagctgtacggtcagttggccgacatgtttggaatcgagaaggcagaggtaatgagccacctttgttaccgtgatgctgctggcgctgtcaagcgtactggcgacgagccgttctgtgacttcatgaaagtggcacggaggctcaccatagtagagagcaccgaggggaggctgcagaaacctctcgtcgagtacatggcttgattgcatgactgttcgataaggcactctgaagcttgaggaagactgaagcttggagcgaatatgttttcgtttgcgtttgtctgccgtgaagcggaatcgcgatgtctgtctcgtcgtgtgaaagaaactcgtgtatcggattttcgtctgtcgtgacttggtcgttagaactctgtcgtggtcagttgtgttgcgcttgcgcttgggtcgaagttgatagatggcctctttgatgaactagcttggaataaagttcgagttgtggttaagaa

SEQ ID NO: 17556 - DNA, 339 bp, Zea Mays
actcagtttctttaggatgcttggttacattggatccctatggctcagattccttgccagagagaagcgtccatggacagtcgtcgacgatgtggaagttccgttttttgttgttgtgttttgtcgccagtgaagcgtgcatgaataccaaccattctgctttcccatgttctcttgcttatttgcatgtataaatcaactgttggggtgtgtgtctgtgatcttgtaagctgtcatcatctggcgccacggcctgcgctgcgctgcactgcactgccttgtcgtcgcggcatgccaaatatatatattctttaataaaatatctgctttacgtttgca

SEQ ID NO: 17557 - DNA, 3654 bp, Zea Mays
atgtcgacgcgcgacggcggaggcggccggcgtggcggcaatgcagcagcaggccgtggaggtgacggccaagggcggggccgtggagggggcggccgaggtggcgccggcggccgtggcggtggcggccaatggcgggcccaaggcggcgcggagcttggcggtggccgaggtggagccgtcggcgcagcgcgtggcggccgcggaggtgtcgagagagggggtcaccagtccttccacggcgccaggccggtcggtggggaccgaggcggacgcggacactaccaccatggcgtgcctgctcaggtccagccgcagtggcaagtggccgcgccgccttcgacgtcgaggccgacacccgcggaagtcgaggagctgagaggcgaggtggagaggaaggcggcggtggcggtgccagacgcagaggcgcacgaggggccgtcgtcgggcaccgcgcatgagccttccgccgcgccggcgcgggtcgaagcggagcaagggacgtcgctggtggtggaggcagaccaggccgctcaggggaggctgcctccgtcgtcgagcaaggcgctggttttccccgcgcggccggggtacggcacgctcggccggaggtgccgcgtgcgcgccaaccatttcttcgttcaggtggcggacaaggagatctaccactacgacgtcgtgattagtccagaatcgcagtcaaggaaaagaaatcgttggattcttaacgaactcgttaaattgcacaagaattacttgaatgggcgactgcctgtttatgatggtagaaagggccttttcactgctggtccgctaccgttcaaaaccaaagaatttgttctggaactaaccaatcctgagagagcaaaccagggggcgaaagagtacagcgtgaccataaaagatgctgccaaattagatctttacagccttaggcagttcttggctggtaggcagagggaactgccacaggatactgtccaagccctcgatattgctatgcgagaatgcccaactgaaaagtatgtatccatctcaaggtcatttttctctcagtcatttggacatggtggtgatattggcagtggtgtggaatgctggagggggtactaccaaagtctacgtgctacacaaatgggattgtctttaaatattgatatttcagcaactgcattttacaaggctcaaccgattttggagtttgcattggagtacctcaacatacgtgacacctcaaggcgtttgtctgaccaggatcgcttaaaactgaagaaagtcctcaaaggagtacgtgttgtggcaacacatcgtcgtgatatagccatacattacaagattactgggataacctcacttcccttgaatagtttaacgtttaatcaagatggggcaagtgtttcagttgtccaatactttaaacaccaatataattacagtttgaaacacattcactggccatgccttcaatctggcaatgatagtaggccgacttatttaccaatggaggtttgcagtatacttggcggtcaacgctattctaggaagctaaatgagtaccaagtcacaagcatcctgaagaaggcatgtgagcgaccacctcaaagggagggcagcattttagaggtagttaataggaacgactatggtaatgatcattgtgccaaagaatttggtattaaggtgacaaatgaacttgccttggttgatgcacgggtgctgccagctccgacgcttaagtaccatgactctggacgagaaaaggtgtgtagtccttccgttggtcagtggaacatgaacaacaagagattgatcgatggagtatccattcagtattgggcttgtgtgacttttgcttctcggttgcatccaaatgatgtccgcatgttttgcaacaacttggttggggcgtgcaatgatatgggcatgcaaataaatgggagaccttgtgttgatgttgggcaagcacgcccagataacttagaagctgcactcagaaatactcatagacaatctgcacaaatgcttgcccaacaaggcgtgactagacagcttgatttactaattgttgtattaccagatgcaaatgcaagtgtcttttatggtaggataaagcgtctttgtgaaactgaacttggtttagtaactcaatgttgtcaaccaaagaatgtttttaaaggtggccgacaatatctccaaaacctggctcttaaaattaatgttaaggttggtggccgtaatacagttctcgaagatgctttaaataggagaatacatttgttaacagatttacctacaattatctttggagctgatgttacccacccagctccaggggaagatgcatccccgtctattgcagcggtctgtattttctcttttttcttgttctcaacttgtcagaactttgaagaaacaatttgttactttaccttgacttcttgttgcattggcatgtcctgtttgttggatagaggcctctgtgtgtttctggtttctaataagtcgtgtaaaagtttatgataggttgttgcatcaatggattggccacaagttgcaaagtacaggtgcttggtgtcttctcaaggtcatagggaagagatcataactgatcttttcacacaagtgaaggatccacaaaagggacttattaacggtggaatgatcagggaactactcgtgtcattctataaggcaaacgggagccgcaaaccaagcaggataattttctatcgagatggtgtcagtgaggggcagtttagccaggtcttgctttatgaagtggatgcaattcgaaaggcgtgtgccagcttggaagagggctaccttcctccaattacattcattgtggtgcaaaagcgccatcacacacggcttttccctgaagatcatcatgcacacggacagatggatcgaagtggaaacattttgccaggaactgttgttgacacgaagatatgccatccaagtgaattcgacttctacctttgtagccactctggcatacagggaacgagccggccagcacactaccatgttctgtttgacgaaaacaaattcactgccgatgcactgcaaacgttgacctacaaactgtgctacacgtatgcgcgatgcactcgatcagtctctatagttcccccggcgtactacgcacacctggcggccttccgtgcgcgccactacatggacgatgacctctccgaccaggggtcgtcttcagtggcgagttctcgcatgaaagatggcgctgttccggtgaagcagctgccgaaagtgatggagagcgtcaaacagttcatgttctactgctgaaggtggcctttgcaggaaggaccttcatcgacacttttgttgccatgaaatgaaacgagtaattctgggttggtgtaattatggtgaagtaaccctgaagggtgggccgcacgacctccaaatcatattttgggtctggcgagtcttctatccaaaactcgtcagaaaacgccttttatttttggtggacttcgtataagtccaaggcattgcctgtgattttggggtttcttttaggttgcaaccttgttttgtttttgaaattttctgctttgaattgatgcattatatatgaagaaatgagcctctcacgctagctccagcaagtgacccaagtatgac

SEQ ID NO: 17558 - DNA, 1796 bp, Zea Mays
acaacactcgtttgcctctcatctcgcttcgcttccattccatcgcgccagtcgccagactcacctgggagagtggggggaaatatcaattagaaacaacgaggaattagcaaagaaagaagaataactcccataagaaaaatcgccaaatacgccattcatcttcttcgcccgggtttcagaacgtacggcagtttagccaggatggtggcgatcgagaaccagagccaggccgcggtggcggcggaggcggtggcggcgccggcgtcgcggatccccagggaggcgcggcgcctgctgcacgagctggcggcggcgtgggcggacgtggccgactgccgcgcgctggaggtcgtgccgctcaagggggccatgaccaacgaggtctaccaggcgcgctggctcactgcaggccctgccggccagaaggaggagcccagggcggagagggaggtgaggaaggtgctcgtgcggatttacggcgacggcgtcgacctcttcttcgaccgcgaggacgagacattgtcagctgccgaccttcgcgatcctgaaatttcagctctggtggcttccaagctgagggagttccacaaccttgacatgcctggtcccaaatctgtgctcatttgggacagacttaggaactggctcagaactgccaagagcttgtgtccacctgaagaagccaaggaatttcggttggacagtctggagaaccagattactgcattggagaacgagtgttcaggtgattaccagtggattggtttctgtcacaatgatcttcagtatggcaatatcatgattgatgaagagaccaacgtgctgaccatcattgattatgagtatgcaagcttcaacccagttgcatatgacattgctaaccatttctgtgagatggcagcagactatcattcatcaaagcctcatatactggactacagcagatatccagatgttgatgagcagaagcgttttgttaagacctacctgaacatttctggtgaggaacctgatgcggaagttgtggagaacctgctccaaagcattgagaagcacacgctcgccagccatctagtatggggcctctggggaataatttcggaccatgttaacgacattgacttcgactacaaggagtatgcgaggcagagattcgagcagtactggcacaagtctgcgatcttaacatcttgaacatgtgtataaacacccgtacgtggtctcaggaactccctgagggcctgtggctgcacacacgaaattgtgcagtgccactgacacatagataagctgtgaaagaagaaatactgacgacgacgacgaataatcccgttttgggctcgggaggttatttctccgcaactcgatgagcttcaggcttcagcttcaggaaggaaggaaggagctatggggatttggctgcccgcttatgctgtaccaatgcaattaaaagataaagatccggtccggtgttgcgtgtgctatgtttagttttggctagcaccgccgagagccgtggtcctgttgtggtgtttctagtttctgtatgcttgatgttgttagtgtgctggataatttggttttgtgcttggggagtccttagctttgggacaacgcatacattgtatactgggtagatgtataaacataaaacagctatgggaatttggttctctacctttatttctctctcgaacaggctgtatttcgttaagaaggtaaatttgggtttgtatttgttattatcagcttgttatacatgtgtcagatcaaatgcatttcttttggtaccc

SEQ ID NO: 17559 - DNA, 1687 bp, Zea Mays
ctggaccatctcattgagtctagcaggaagatgctcaagagtttttaagttttgccatggatagagtgcatgatgaactgctgaagcttaatggtaatggtttggattcaaaggagggtatggttgtttcttcttctgctgatgatgcttgggagacagttggaagaaagaacaaatctgcaatagttagaacacatagttttgttccctctgagctaagtgctatttttggagggcagctacagagcgttgtgaaagctgcaggtaacaaagcatcagctactgttcaaccctttctactgcttcatcttgatatattcccagatgctgttcagacacttaatgatgcacttcgtctgttctctacccctgaatctttggaaggatacagaaccactgctggaaaggctggtttggtgacagctagaaagtcattcaagatacacgcccttccaaagataatgatcctgcacttaaagaggttcagttatggaaataatgggagcactaaaatctacaagccactcggcttcacatctgaactggttcttagtcgtgatctgctgagctcaccatcacaagagggtagaaaatatgagcttgttgcaaccatcactcatcatgggagggacccttacagaggtcactacactgctcatgcaaagcatgccgacgggcaatggcttcgctttgacgatgacgctgttgtgcccgttggcgagaacgatgtcttgcatgaccaagcatatgttctcttctacaaacaagtctgaaagcactacgtagttgattagttgctctttcgtatcgccgttgcttaaacagccagatataccgtctaactatcgtcctattaatgtagtcaccgagtaacagcagcagagtattatgtgaagcaccctggtgctgcacgtgtttattatcatatgcttggtcatgatgtggcgagaggggggatttgtcttcagcccattttgaggttctgtaaaaattcaactgtcatcattgcaatgagcagcgaagtaatcatggtcagccctgtcgctggcagctgccgaaatgggttgtgtgcatgtggcatgccgtggttggcaattggttgttgagaagacattgccattagcttagccatgtgccgtgtctctgggagtgtcaagaggtgcagggcaatgttagctggtgtatgtgccttgcaagcatgactagcatgttataaaaagcttcgaattattcgttttgaaggtgtcatgtccctgtcaaggagtcgtcctgacgtctgtaaggaaggtgtgcggccgacatggacttctctttgtggctttctgaggaatggactgaagtggctgcgacttaggaaatctggtatagcgcaaatgttctggagcaaactgagctagtctggttgcaatctgttgctaaactaccatcggttatacctgctgacagacagtgcaactggcgtaggttgctttatgttacacctgttgtttggtggtaaaatcagtggtccatcagtgcttcctacggccttcgtttcaaggaccgattcttcttcagtggatgctgacagctagacatcccgaaagtcatctggagagtagctcggcacatgtagcatcctggagtcgttgacaactcagttccatctgaatcataggacaactgaagcaaagcgaggtagtaatgg

SEQ ID NO: 17560 - DNA, 1502 bp, Zea Mays
atgacaaataaacattatgcaggtatcccgaaagttaaaaaatctgatagacagcagaagcacggggacactctgcaagacggatcggcgtctgatgtaaaatggggagagaggaatcgttacggtgacgggtcgttcagggagcttcatgcagaaaacgcagctgaagtttttgccgacgatttcgagggtatcgtcggccgcgtcgtcgtcgtccgcgacgtcgggggcgtcgccggcgaggagggcctggcggcggcgcgccttctcctggtcggagagggtgttgtcggactcgatggcgcggatggcggcaacgagggtgttagcaggggccgagggagcggcgacggtggcggagtccagggagcagtcggggcagctccagctggcggcgtcggccagggcgggagccttggagaggcacggggagtgccagggcgtggcgcaggtggagcaatggaggaggtcgacctccggcggggaggtgacgcggcagaccatgcagacgccatcgccgtcgcaggggaggtccggcatggcggcggagggagtggtctcagggtacggtttcgcgggccgagcgggggaatgatggcggagtggtggggagaggaagtggagcgagaggcggaggtgggctgccgctcaacattcacctctgccaagggcatggaccacatgacgatgctcggcgccggagccccccaccagctctccagggctgaaccaatgcctgaccgtaggtcaaggttctggcagacggatgtgcagcctgtgcctcggatagacatcatctgtcctctgccttgtcgcccttcccgctcactgctcctcaataggcccagccccaagcctaatggggcactcccattgtatggagcaaaccctacttatgatatcgttgatctcatccttagcaagaatgaccctgatgtggatactgattcaagcagccaggcggcctttttctgtggctcgcctcctgcccgcactaacaaccctgttatccatgacccacagtttggaaagaaagcaccatccttttctcctctaggaagctcttctggaaaaatggcagctggaagagctgaagtaggttctccgtcctgcaggtcgagcagcccaaaaatgagaatcgaaggttttgcttgcgggaacaaagagccccctcactgctttgcctgatgatccccattgaccctgcctaaccctgttttgctaccctgcaacctgtacattttcgctgcccagctgagagttcgtttcgttataagctgttaaactagctgagagtcccatgtgattgtggcttttgaaaattgcatgatccaaggggacggatgtaaataggtcgagttgtccggtgtatgtactagatgttgtatgcgtctggtaaatgtagtcatgctgggtgggtccatgtgtcggcgtctgtaaatacagccatgcatttggatgtgaaatttaaatgcgtcttcagttatgttgccatgctgttc

SEQ ID NO: 17561 - DNA, 3694 bp, Zea Mays
ctcgtcgtcatttcctcctaaaatccccaagcctccaatccactgaactaaaccctagacatggcgggtagagactactgccggttgccggtgcgcccgcgcgacttctgaggccccgcccccgtcccggcgtcgccggaactggctccactgtcgcccccatcactgggactgggagagtgggagttcagagccgcagacgctggggcgccgggtcaccggaaggccgggaaggaaggtgtggccgcaagacgcaggcaggaggcatcgactcgactcaccatgtctcagtcaccgggaggacgggaaggcatatattacagcaggcagaggaaacctgagcgcaatggcagtgtatttacacctatagctgcaatgtattccagtggtcatgcactccctgttgcaaataggagccacggtttggtatttggcagtctgagcaaggactgggacgacattcgccagcgcaaggatcagttggtcaacttccttgctagtcttgaacgagcctctggagattctgcggcagctggcaaaatcgaagatagcaaattggccagtcctgtggagccaactgaacaaaaagagaaggctgccataatcgttcttgattcagacgatgaggacggaaatggttcaggaaacagtaagttggcatctgagactaacaaagaactcggaacatctggattgattaataatatcgcagaaaggatgacgtttaatgggagccaagcatttggaaccgtgcatacttatggagataagaacacacagattgttccgtatggtcaatgttctgctttagtgaatcagtttcctttgcaaaccagttggcaaccatctattcagtttgagagagtcgtgctgcagaaaaggcctgaggagcagcgaatgcaagatcttgtggctgctagcatagccgagaagagagcagaaacacaagtgttcctttcacttcccacagagaaaaagcgaaggagatcagaccccagtctgcatgccagtgacgatactgctactgtccctaaacaaagaaaaagtaaaggtgccacagttgtagcagcagctaatttgtcattggtttcacaacaaactgctacatcaccagaacctgacatggttatagaggaagaggagaaacataaaaatgaaagtgatggtcttgacgattattggaaagattttgcattggctgttgaaagcacaaagcttgacgaagttgatgaggcggcaattgaaaaggaagataatggaaagatggaggacatcgattgcaatcatgacatccggattcatgaagatttgggtcatgtatgccgtgtgtgtggtatgattgtgagaagagctgattcaataattgattatcagtggaaaaaggcttcaaggagaagaacgaatggctatggaggacattcaaaagatgctgatgagatagattgtggtactgttaaactgtctgaagatttcatagtcgcagatattgctattcatcctagacatgctcggataatgaaaccacatcagttggaaggtttcaactttttggttaagaatttgattggagacaagcctggaggttgcattctagctcatgccccaggtacagggaaaacatttatgcttataagcttcattcagagcttcatggcaaggtatccatctgcaaggcctcttgttgtgctgcccaaagggattctaggtatatggaagacagaaattaaacgatggcaagtgcaggatataccagtgtacgatttttactctgtcaaggctgaaaaaagagtagaacagttgcaaatcctcaaatcttgggaagacaagatgagtatactatttcttggatacaagcagttctccacaatcgtcactgatgatgggggcagcaatgtcacagctgcatgtcgagacaggctgcttaaggttcccaaccttctgatacttgacgaaggacatacacctagaaatcgggagactaatgtactcgaatcactaaatagagtggaaacaccacgcaaagtggttctttcgggtacacttttccagaatcatgttgaagaagtgtttaatatcttgaatctcgttcgcccaaagtttctcaggatggaatcatcccgtcctactgccagacgtataatgagtcaagttgaaatagttggtagaagttcgaaagggcttgctgatggcgcattcactaaggcagttgaagaaaccttattgaatgatgagaacttcaagagaaaagctcatgttattagaggtcttagagaactaacaaaggatgttcttcactattataagggtgatatcttagatgaactacctggcttagtagacttcagtgtgtttttgaagctcacacccaaacagaaagacattatttataagttggaagcacatgatcggttcaaaagaaatgcagtagggagtgcactgtacattcatccatgtctttcagaactttcagaggttaatgctgagcatagggctaacacctttagagatgatttagttgatagtctggtagattctatcactgtgagagatggcgtgaaggccaattttttcatgaatatcctgtcacttgctaattctgcaggagagaaagtgctagctttcagtcaatatatatctcccatgattttctttgaaaggctgctggtgaagaagaaaggctggcatgtggggaaagagatctttatgatctctggtgatactagccaagaagacagagaattggcaacggaccattttaacaactctgctgacgcaaaaattatgtttggttctatcaaggcatgtggggagggtatctccctcgttggtgcgtcgagagttgtcattctggacgtacacctgaacccatctgtcacccgtcaagcgattgggcgtgcattcaggcccggacagcagaagaaggtgtttgtgtacaggcttgtagctgccgattctgacgaggtaaaggtccatgagacagcattcaagaaagaagtcataccgaagctgtggttcgaatggagcgagcactgtactacggaagacttcaaacttggtcaaattgatattgatgactctggtgacgaactgttggatactaaagcaatccgcaaggatatcaaagcgctgtatagaaggtaggtaacaagctttgtggccactggacaccatgtacatattgcagtgctgaccgtcgagctgatccttaaactgaagaaagaggtgacgggtgttgcggtggctacattgcgcggtcattcccagctatatccgtggaatggcggcttcttttgttcgtagtatgtgccaacttggggcagcagtcagctgatccccagacacatttctagactcttttttaggctcaagtttctgagaattaacctgctatggcgtttagccttaagtaaatatttcgttcgcaacaataataacccagtaaacctaatttgttcttgtgcgtttgtggtggtggttcttgaaatttacctggcgccttcttcctgggctagatgctatgcaggtgtcacaggttggtttgttggcatgtagaatcgggaaatgctaatctcgaaagctcgtagtttccttttcccccccgggtgacatgtttattcacctcttactagttaccacgtccatttccaactataagatatgatactttggcttttgaagatacattacttttatt

SEQ ID NO: 17562 - DNA, 2918 bp, Zea Mays
ctccaatgagcatcatgcagaaagtgacatctatgatgttgttgaaagtcagagggaaacacaagatgggcagcttccaagaacacattcagttccagataccacatggactaaagcgaaatcaagcatgccaattggtgtgatttttcagtatatatggtatcagatgcgaagtaattatgattatgtttgctattgctgttttattctggttttcatgtggaattttagtttgttatccatggcctaccttggggcacttttcttatatgctctttgcgtgaactatggcccaagttacttgttttgggtcatcattctgatctacaccgagagctcgatcactgccaaagatggtgaatgggttccggtaacagaattcagctttcttagtgcaaggaacaacattgaagagaaacactgtgtagcttacagttggagagagaagctaaaaagtttgcccttgcctgtttttgatctcataaggatgattgttagaggcttatctagatactggatgtcattaacacatggagctgaatctcctccatattttgtgcaagttacaatggaggtaagccattggccagaagatggaatccagccagagaggatagagtctgccataaatagggtgcttgctattgctcatgaagaaagatgtcaggcaaacttgccttcctcttgccactgttgtagtaaagtccggattcaaagtattgaaaaaagcaaagaaaattgtaatatggctcttgctgtactagaagttgtttatgctgctcctgtagagtgccaatctaagggatggcacaaatctctcactccagcagctgatgtagaaagagagattcatgaatcacagaaagcaggattttttgaagaaataaattttccttacccgatcgtctcggtgattggtgggggtaaaagagagatcgatctttatgcatattattttggcgccgacttggcagttttcttccttgttgcaatgttctatcaatctatcctaaaaaataagagtgaattcttggaagtttaccagctggaggatcagttcccaaaagaatttgttttcatccttatggttctctttttcttgatagtggttgaccgcattatatatctttggtcctttgctaccggcaaagttgttttctatctttttaaccttgtgcttttcacgtattctgtcactgaatatgcttggggaacggagctagctcacagggatattggaggacttgtactacgtgcaatctaccttacaaaatcaatttccctagcactgcaagctttacagatcagatatggtattcctaacaaaagcaacctatataggcagttcttgactagcaaagttactcaagtgaattacttgggcttccgtctgtatcgtgctttaccattcttgtatgaattgcggtgtgtacttgattggtcttgcacaaccacatctttaacaatgtatgattggctgaagttggaggacatatatgcaagcttgtttcttgtgaaatgtgatacacttttgaacagagctaatcatcgtcagggagaaaaacaaacaaaaacgacgaaattctgcagtgggatatgcttattctttgtacttatttgtgttatttgggctcctatgttgatttatagtagtggtaaccctacaaatattgccaatcccattgttgatgtaagtgttaagattgatataaaggcacttggtgggagattaaacttgtttaagactactgcttgtgaaaaaataccttggaagtacttgaaggcctatgatgatgttgatcctctagattaccttggggcatacaatgtggatgacattcagctgatttgctgccagcctgatgcatcaacaatgtggttgatacctcctccagtccaaaacagattcatccagtcccttgaggagagagagatgctttttggaaagatggaacttattttaaattgggattttctcagagctagaccaaaagggaaggaattagtgcgatatgaatcccctattgaacactgcccgagtgtagatgatgttaaacgagtgcttaatggaactgcaaacagcttcagtataattgatgcttacccaaggtactttcgagttactggatcaggtgaagtccggcgattagaagcagcgatagattcagtaagtggcgaattgctattaaataatggcactccttggtggtcattctatgatacaaacccatcagatttggcaggctgtcaagggctgaatggtcccatggctatagttgtttctgaggagacacctcagggcattattggcgaaacactcagtaaatttagcatatggagtttatatattacttttgttctagctgttgcgagatttattaggcttcagtgctcagacttgagaatgagaataccatatgagaaccttccgtcatgtgacaggctacttgacatctgtgaaggaatatatgcagcaagagctgaaggagagttagaagtggaagaagttctgtattggacattggtaaacatctatagatcaccacatatgctgcttgaatacacaaagcctgactagggcacccgttctgctaaggaagccattctgcaaaaaaattccatgtaatgtagtaatgtacaagtagaacacttctttcctttgaggtcacaacgaagctaacttaatcctctcccccccttgtgtcaggacaaaaaacgtgcaaataggctttgtagttgtagttcgtttttgctaacatgtatacggttgaccattatttttggagaagtatacatcaaagtttcattgtgaaagttatctcatgctactaaaatgtgttaagaaagttgcgaatgaagatgtaatccatgtcatcctaatcaaaatgtcttcagatatatcttgcattgtcttcagc

SEQ ID NO: 17563 - DNA, 891 bp, Zea Mays
cggccgtcgacgaggtcaggaccacgccgcagctacaaggcgacgggcacgtgctggacgaggagtcatggtccgacgtcgagtacctcagagcccacaagcctgcaggcccctgggggtacccggtgtccaaggtgctcctggagaaggaggcgagcaggttcgcggaggagcacggcatcggcctcgtcaccgtctgccccggcctcaccgtgggcgccgcgccggccccgaccgcccgcaccagcgtccccaactgcctctctcttctatccggcgacgaagccgcgttcgccgtgctggacgccatcgagagcgccaccgggtgcctgccgctggtccacgtcgacgacgtctgccgcgccgagctgttcgccgccgaggagggcgcggccgcggggaggtacgtctgctgcggcctcaacacgaccgtcgccgagctcgcgcgtttcctggcggacaagtacccgcagtacggcgtcaaaacgaacctgctctccggcgagcggcttgagaagccgagagtgtgcctgtcgtcggcgaagctggtgaaggaaggtttcgagttcaggtacaggacgctggatgacatatacgacgacatggtcgagtacggcaaggacctgggaatcctgcccgacttgtgatgctgcttgcttcctctgctctcggccggcgatcaggactggactttaaaccgtccggcaaaataagcccgtctatttatgctgctactgtgccgaaccataattggaccttcaaaaaatgtcaagaaaatttgtctatgttatgcatttttgtctactcagaaccgtttgtctgactagtaaatatggaatcgaatcctgtattagcaagcgtgacaaatatgcatcaactgttgcaagctgt

SEQ ID NO: 17564 - DNA, 1272 bp, Zea Mays
cacgccctaacgacgacgtcgtatcgaagaatatgcggtccatgtctgggaagctgcttctcaagctcttcttgctcgccttgatcgggaacacattcagcttgaacacgtacaacctgaccctgaagctgacgtccgcgacggtggggtccgcgctagccaactccgtgcccgtattcaccttctgcctggtgctggtgctgaggatggagacggtgaacctgaggacggccgccggcgtggccaaggccgccggcgtcgcgctctgcgtcgccggagtcctcgtcctcgccttctacgccggtccggccatgagccccgtgaaccaccaccgcgccttcgccgccccgaggcagcacgccgcctccaccggtggtccgccgagcaggtcgaggtggatcacagggacgctgctcatggtcctcgccaacgtcacgtgggccctctggatcgtcctgcagtcggcactgctgaaggagtacccgaacaggatgcttgtgacggcgacgcagtgcgtgttcagcatgatgcagtcattcgtggtggcagtggtggccgagaggggtgacatgtccaagtggaagctccgatgtgacattaccctcgtagccgtcctttacgtgggttttgtggtgacgggactgtcccattacctccaagcatggtgcatggagctgaaaggccccgtgttcctggcgatgacgaacccgctctgcttcgtcttcaccatattcagctcctccttcttcctgggagagatcgtgcacctcggcagcatcttgggtggagctctgcttgtggccggcctgtacagcgtgcactggggtaagctcaaggaagacaggaggtctgaggcggcggaacaggagaagaccaagccgcaggaagaaccagcagcagtagctggagtgccctccgtgctcgaccaagcgtgatgctcatacatatggttgcttcatcagagcgccctagcttgagcgagctccatcgaccatcagctaactaatgaactgttgggaccaatatgcatgatgcatatcactgtgcatgaagaaccaattaattaactgtggattattaagagagtgagcatgtagttctacttgcatgcatctgggtattttgtatagaacacatcaagttgcgtctgtgacatcaatgcaagctagggcatgcatgcattccatcattcaatgcatgcataactcacttgaatgctgttgtatccactccacccatgcactttgaataaatacatatgtcgacttatat

SEQ ID NO: 17565 - DNA, 3443 bp, Zea Mays
tgctacagcggtggtcgtgccagccattactccccacagcgagaggtgccggctcatgtttgattctgcagctctaactgaagctgtagatcatttgctccctcactgagtgtggtatgccgaatgtttgaatttgaactggttttgtttacattgtctaattgatttacatgctttagctcgtctcactgcttaattaggctcagtttcattatgcacttagatgcttcagctctgggttgtcccgaaaacttgctaaggtatcatgattttctgccgtttaatttcatatgccggccatatccttttgttatggtttcatatacatttttttgataagaagtgtaaagtagtgacatatttgcctgagctcttattacctgagtagtgcattacaatggtgtgagctataccaagtttctcaaataaccaatacaagtatgttatcctgtccatgaggttaagaggtaaggccagttttgtttaggtcccttttcgtttgaccaaaatattgcttctgttgatgttcactctggtattctgaactggcaagatattgctaatctattcagtcagctcttatttgtttatggctttcggtatcttctgtttacacatgactacactctctgattttatatgtgttatgtggtttctatgtgttttacttcgttggtatacttactaatgtggttgcataggtgttgtctgtctgtctctgcaggaatgcctcgttatcctgcaccgtatcctatggttcgtccaggttttgttccacgtccaatgccgccacctggtgttgtgacaattcaacgaccaccaataatttctgggatccgggctattcctcctttggtagccctgactgcccgtccacctcctccagctgttatgctggctgataaaccgccaaccgcagtttatgttggcaagattgccccaacagtagacaatggtttccttctttcacttctccagctttgtggacctgtcaagagttggaagcgtgccgaagatccaagtaatggaaaacctaaaggttttgggttttgtgagtttgaatctgctgaaggcatccttcgtgcgacacggcttctcaacaaattgagccttgatggtcaggaactggtgattaatataaatgatgccaccaaggagtacctgaagaaacatgttgaggaaaagaagagagcacaagtgaagtcaaaagatgcaagtggggatggaactacagctgttgctgaaaatgaatcatcaaaatctgttcctgatgaatcagataaggagacaggagatgctggagacaaggacagtgacgagagcactaagaaatttgggattgttactgatgaagactctcaagctgataaagacgtcgcagaaaaaataagcagtatgattgagcagtggttaaagactagaccgccacctccacctccaccagttcaaccatcggcggatagctctggtgtagataaggcaaaaaatgattctgctgataagactgatgctgacactgttaaaagagcagtcaatgaaactgaaagatctgaaactgcctctcctgataggaggaaggatagagagcatgataaggataaacgggacaaagatattgaaaggcatgaccgtgaacgcgaacgtgaaaggatacggagggatagggagaaggatcataagcatagagaagttgatagactatacagggatcgccttaaggagtgggaatctagggagagagagaaagaatatcagagatatagtgaaaaggagaaagaaaaagatagagaacataaccgcagaagggagatcctgaagcaggaagatgagagcgacgaagaggataataggaaaaggaagcgaaggagtagtagttcacttgaagataggaaaagaaggcggcaacgtgaaaaggaggaagatttggcagataaaataagggaggaagaggaaattgcagaagcaaggcggcgggctgtagagttgcaacagcaagcagatgaagcagctgcagcagcggctgcagctgctgaagagtctgctacacttatggaggttgatgctgacgacgaaaaagaaacagatgcacaaaacgagccgtctgttgtggaagctgataacatcccgagctttgctaatagtgttggtgctggtggacttggtaaggaaaataacagtgaggaaataagcatggtacctagtcataccaagcaaaacaacaatgtcccagtaaagaaactgggttttggtttgattggcttgggcaaaaggacatctgttccatcagtttttgctgaagaggatgatgaaaataatgttgataaaagcataagacctctagtacctatcgactacaatgaagaattacaagccgtacaggctaattcttcgactggggcaaatgtcgcagcagctgctgagtttgccaagcgcatctcagtttctaactcaaaggaagagaaggctgacacagagaaggataggaataggagatccagtgaaggtcgtcctagcgatgagcgaagagagaagctacatgatcgtgagaaggataagtccaagtcggagaacaagaagattctggatgcaaagcaattaattgatatgatcccaaggacaaaggaagaactttttgcctatgatataaactgggtgatatatgacaagaatgagttgcacgagagaatgaggccttggatttcaaaaaagattattgaatttcttggcgaggaggaatcaactttggtggactatattgtttcctgcaccaaagaccacgttcaggcagaaaagatgctagagctcctacagtcgattttggatgttgaggctgagatgtttgttctcaagatgtggcggatgctgatatttgagattaagaaagtcgaatctggactatcaggaagagcaaattcacatgcatcaacagcctactcttgttctctggtgaacgacgaagaatgtcgaaggctggcagtagtcgcaagtataaatccctaatcatgctcttcgtagttcctgctgtgcaataactctgcagttttatgaccatctaattatggctcattttgttgtgttgtcttttgaggttgtatgtaagcaattttttgttgtttttgctctaattgtggatcatgttgttgcgttgtattttgaggttagcatgtgttttggttagcagacggttggtgttgaggtggtccagcacttttcttttgaatggaaccatcttgtgttatgtttaggtcttgttcgtttgtgtcggattggtgggtcggaacgattcctagccggattgtttctctaatttatataaactttgattaggtctcgttcgtttctggctgatccagccgttccaggcctcttttcagtcagaaaaattatccagtttcgaatccggcactcagctgttcgtttcaatctgaaataaaaacaaaaac

SEQ ID NO: 17566 - DNA, 3146 bp, Zea Mays
tttttccacaaattccttctccttcggcttcaccaccatggtcgtcacgcatgtggagggtaggagctatctccctgcagaggtcaggaacggcctcgagaccctgaagcggaggaggctcgagagagtgcgtttgagtgctcagaacgaagctggcgacaatcctgctgtggctgcgagaagtggcggtgatgccttgcggagccccgctaactgtggagtcagattgcattccaacaacagtacaggtttacctggaaatgtccatgacaagagtccttttgcaaagcgcaaggtggagaagtttgatatgtccaaccttgagtggatagacaagattccagagtgccctgtgtattgtcccaccaaggaggaatttgaggatcccattgcatatatacagaagatttcacctgaggctgctaaatatggtatttgtaaaatcgtctctcctgtatgtgcgtctgttcctgccggtgttgtgctgatgaaggaacatcccaattttaagttcatgactagagttcagccccttcgactcgctgaatgggctgaggatgatacagtcactttcttcatgagtggaagaaagtacaccttccgggactatgagaaaatggcgaacaaagtgttctctaagaaatattccagctctagttgtctcccagctaggtatgtggaggaggagttctggcgtgaaattgcttttggcaaaatggatttcgtagaatatgcttgtgacgttgatgggagtgccttctcttcatctcctcatgatcaacttgggaaaagcaactggaacctcaagaatttttcatggctccccaattctgttctaagacttcttcagacgccaattccaggagtgacagatccaatgctttatattgggatgctcttcagcatgtttgcgtggcacgtggaagaccattacttgtacagcatcaattaccatcactgtggggcatttaaaacatggtatgggataccaggcgatgcggctcctgggtttgaaagggttgctagccagtacgtatataacaaggacattttgattggtgatggagaggatgcagcatttgatgtcctactagggaaaacaacaatgttccctccaaatgtcttgctagatcacaatgttcctgtctataaagctgtacaaagacctggagaatttgttattacttttcctcgttcttaccatgcaggcttcagtcatggcttcaattgtggagaggctgttaattttgctattggcgattggtttcctcttggttctctggctagcaagcgctatgcacttctgaacagaactccattgcttgcacatgaggagctactttgtcgttctgctgtgcttctatcccaaaagctgttgaactgtgatccaagatccttggacaagttggaacatccatattcccagaattgtgtgaaatcctgctttgtgcggttgatacgattccagcgacgtgctcgtggccttcttgctaaaatgggttctgaaatatgctataagccaaagacatttccaaaatctgtcctgtagcatttgtcggcgtgattgctatatcacacacgtgttgtgtagatgtaactttgatcctgtctgcctacatcatgaacaagaactgcggagctgcccttgtaagtccaatcgcgttgtctatgttagagaggacatactggagctagaggctctatcaagaaaatttgagcaggatgtcagctcgtataaggaaggaagttgcattagcccatgtaaggaggttgagatctctgatactactgatgaacaacttccaaatcttgggattactctggatttcgttaatagtaaagctggtagctcaggctttatgactgttgatggaggaaacagttcttctgcagtatcaattttgacatcttctgtgcatcatgaggcatataagcatacagaagcaagggcaataaatacatcaatgaccaaaggaacttacactatggatgagagttcatccggcatagatggtgcttgtaatgaacacggttcatgtaatgcttcagccatggaatgcagtgataattcggattcggagtgtgaaatcttccgagtcaagcgcaggtccacctcatttgacaaacctacttctgaagctaagacatcaaccttgtctgaacagcaggttctgaggcggctgaagaaggtacatcctgaagtacagcaagtcatcagtaagcgtcaagaagaatctggtaatggttcagttcgcgctgcccacatgagccagaaaagctcaaatcctgcccctgctgatgacgaaacagaggacatggctcccataatgtggagaataaagcggcgacagtcagaaacccaagatgctacatgtcctggtacgagaccgcagtcatatccgccttccagtggtggttctggagaagagtttgtggaaagaactagagatgctgcagtagaactccgtccaaaacgagtgaaaatccggctaccttctaatgccagtaggcagattgagcagcagcgcagttcagggcagagatttgctagggaggacaggttgccgcttggttttccacgtacattttagggaatcacaggtgctactaacctctacttgagcagacgaattctttgtttaggtacactgttaactacaaaacgtggtgacagaagggaggagtgggagggatcagttgcagactgactttagaattggcaggaaaggaagcggctatctaatcgattcttttgtgcagcagggcctccaatttgaggccactgggggcacgcttagaagatacacgtgataatattcttgttgctggaggttccgtgtcactgccgatagctctttgatgcctggctatcagtgacacagattaaagagaacctcgctaccttgatatgtccgctagtgtttagagcatgtagctagcttagctgttatctctctcactgtaccaacggcctttcccttgtaatttcctgtaaacaggcttagctgctacactatggctaactctattcttttgttggtttagccttaacgttaaattcaatgcatttcttttttggttagttggtacttgttatggtgttgctgctctcaactgtgggtggaatattctgatggcatgatact

SEQ ID NO: 17567 - DNA, 628 bp, Zea Mays
caaacacgcatgcattcctgtgctgccacaattcccaggctgtgccaacttcaagagggcaggctcttgctgatgagtatggcatcaaattttttgaaacgagtgcgaagacgaacctgaatgtggagcaggttttcttctccatagcaagagatatcaagcaaaggcttgctgaatctgattcaaagccagaggatcgcacgatcagtatcaacagacctgagggtggtgaggcttcagcgtcacaaaaatcagcttgctgcggatcgtgacggggttacattgtcacaaggaagataaatagtgcgataccatactttgtaatttacccttctacgtaccttttatctggctgtcatcgttctcgtctagcttttaaatgcaattgcttggattcaggtttctgtgttgtaatgtgaacaattttagttgtacccctggtagaaatgcatgtgctcataagtcattgcaccttgttttgatggaaatgcttgcaaaatcgttcacagtttaggcgcggccgtactacctgttgttttactacatttagactgactagcagactgtatatgactacaaaacgtgttttgtagtgtagattgtactgtttattaagtggagtttaaaa

SEQ ID NO: 17568 - DNA, 1962 bp, Zea Mays
gcacggctgcacgtcaagacctccacgaccacgactggaccgccgccgagcggcgacggcccctccctcctccattcccccgcgtccctctgccggatcctcccgtccccgccgctctccgcccgggcgcggacgttcgaaagattccttccgtgcaccttgttaactaaacaatgaggcagcagactggtaagcgtccctcccaacacagggaatatgaaagagaagaaaggaaggaccaacacaagaggccgtttccccgtgctcaggaaagctctaataatgatgggctggttctttaccgtatactctgtccagacagtttgattggtagtgtcataggaaagcatggcaatgtgataaatgctatcaggcatcagacaagtgccaaagtcaaggttgttgacccgtaccccggtgcagacaaaagggttatcttggtatattgctacgtcaagcatagagaccttgatgctgagggtgatgacaatgagcctgtttgtgcagctcaagatgcattacttagggtgcataatgcaattgttgatgcactgcagacattacataagaatcataaagactctgataagaagagcacagaggaagctaacattcttgtgccagctagtcaggcatcaaatgttataggaaaatctggtgctgtcatcaagcatcttcggtcaacatcaagagcattcattaaagtgagcccaaaagatccaagtgaccctacacattcatgtgctatgagttttgataattttgttcagataactggtggtgctgaagctgttaaaaaagcactgtttggagtatcaaccatcatttacaagcacccatcaaaagagaacattcctcttgaaacttcaattcctgatcctactccaagcattataatcccttcagaacttcctgtctatcctgctagtaacttttactcggccccagatgctgctataccttctgtacatccaagcatgtctgtcttagggtcaacacgtcatgttcccgaacttgctgtacctgccgatgatcatggtcggctgcctatttatcaatctattcttccagttattcctacttatagtgccccaaaatgttcaggagaacttgagtttcgtgttttatgccctggtggaaaaattggcttggttattggaagaggtggggctaccataaagaatataaggcaagagagtggtgcaaggatagatgttgatgatgcaaagaatgacaaggaggaaagtatcattaccattatatccactgagtccaccgatgatgttaagtctgccgctgtggaagctgttttgctgcttcaagccaagatcaatgattctgaggatgatagaatgaatcttcgccttcttgtgccaaataaggttataggctgtcttattggcaggggtggttcaatagtcaatgacatgaggaagaagactaaggcaaacatcctcatttcgaagggcgataagccccggagagcatcttccagtgatgaacttgttgaggtatctggagaagcagacaagctgcgtgatgctcttgttcagataattttaagacttagggaagccgttctgaaagagagtgttgaaagccaaaattctgacagggatggccaactaactgttgctgcctctgattccttatatggaagcagtcttcctttgcctgcattattacctcacaaccaacaaattgcccccttgggctatgatagaagaggtgaacctgagcgagctctggaagtattccctcgtaccagttcgtatgggtatagttccatgcaggtcacggatgatggctatggaggacttccatcctatgcatcaaaggcatatgaagaacatgtaccacgtttggaaatgactgtacctgctagtggcatctcaaaagtaatgggaaaacatggcacaaacttggacaacattagaaagagcgtcaggtgaagaaaacaaa

SEQ ID NO: 17569 - DNA, 837 bp, Zea Mays
aaacacttgttggtgtacctagcatgcattgacacatgcttctttcaaaagatgtcatcactgtggtactaatgcaacagctacaccaatgatgcgtcgcggacctgatggaccaagaacattatgcaatgcatgtggcctcatgtgggcaaataagggtctcctgagggacgtaacaaaatctcctgtacctctccaagctacgcaatcagctccgcatctagatggtggtaatggaagcgccatgtctgcgcctggctctgagctagagaatgctgcagcagccatgaccaatggccacgagtcatcgagtagtggtgtttaatccagcgatggggtaaaagccacgaggagcatcatcccggagtgatctctgcagtaggcggtcagctgctgtactataattgagttggaggctgcttagatatggaatccttccatttaccttggtgccctgtagttaagagctatgacagtgctttatcccgtgtcatgtttgcagccgctgcgtctataacgaagctatttcttgtcttgaggcgtgactgttaagaaccgttgaagtccactcagttttaaccgtgcagcaacgtcttcgatcaatatctcagagtacttagggagcgcttgccacacggagcagctaaaccaccgaaacgtttccattttcaactagaatcggactgtgccattttgaaatgcgtcaccgaaatgtaatcgatgtatatcgaattggcagaaggttggttccgtatatgaaccatctcagtttctttgcctgaattgcaaacttgcaatggtactttttttagtgcaaacttttaacttcgaaaatca

SEQ ID NO: 17570 - DNA, 548 bp, Zea Mays
gtccaatccaaccaaccaacctgacaacgcagcgttccactggccgatgcgatggcgatgccacgaccgcgcggcggcaagagtacaaaaatactcccgtcctggtacagtacacctccagcttttcgttcccgtcctcgttgttattccgttttccccccttccctctctcgtcgcgtacagctggacgcctcctcccttcctttcttctcgctgttgctgttggctgttggcctgttgcctgcctcgcctccgtcccctcgtcgcctccacctccacctcctcggtcacagagagagagagagagagagagagagagagagagagggggagggagagagggaacccggagaccgccaccaagtgtgaggcagaggaggagcatggcggcgccgccgtcgaggtcccggggcgactacgaccacctgattaagctcctgctcatcggcgacagcggtgcgtgtccctcctccccttgaccaatcccccgaggaacacgccgcctcccgaccctccgcggctccggtctggctcttgattggctagcg

SEQ ID NO: 17571 - DNA, 1839 bp, Zea Mays
gctcatttaccatatctgtggcattgtgctacaagggcagatcttgaatcctgtgccatattcacctgggcgtaggtagctgtaatagccccaaacatccccgcgatctatgaagctcattttggagtgcccatggctggggcagtggtcaactgtgtcaacattcgactaaatgctgccactgtagcatttctcttggagcactcctcagcagaagttgtcatggttgaccaagaatttttcaccctggcagaggattctttgaggattatcgcagataaaaagaaaggcacttttgaacagccacttctaatagttattggtgacgcaacttgcgatccaacaaccctccaagacgctttgagaaaaggagccatcgattatgaggcattcttggaaagtggagatcctgaatttgcttggagaccaccacaggatgaatggaagagtatcgcgctaggttatacttctgggacaacttctaacccaaagggtgtggtattgcatcacaggggggcttacctaatgtcactgagtggtgctttgatatggggaatgaacgaaggcgctgtttacttgtggactttgccaatgttccattgcaacggttggtgctatacatggacacttgctgctctctgcgggacaagcatatgtcttcgtcaggtttcagcgaaggccatcttctcagctatagccaacgagggcgtgactcacttctgtggggcaccggtcgtcctgaacaccatcatcaacgcccctccagccgacacgattctccccctacctcgtgtcgtcaacgtcatgaccgctggcgctgctccgccaccctctgtcctggcggcaatgtcgaagcttgggttccgcatcactcacacctacggcctgtcggagacctatggaccatccacggtgtgcgcctggaagccggaatgggacaggctgccagccgacgagcgcgcccggctccacgcgcgtcagggcgtccgttacgtgggcctggagggcctggacgtggtggacccgaagacgatgacgccggtcccggccgacggcaccacgatgggggagatcgtgatgcgcgggaacggcgtcatgaaggggtacctgaagaacccggaggcgaacgcggaggcgttcgagaacgggtggttccactcgggcgacctgggcgtgcggcacggcgacgggtacgtcgaggtgagggaccgcgccaaggacatcatcatctccggcggggagaacatcagcagcctggaggtggagaaggcggtgtacctgcacccggcggtgctggaggcgtcggtcgtggcccgcgccgacgagcggtggggggagtcgccgtgcgcgttcgtgacgctcaaggacgccgtggaccgctccgacgaggcggcgctggcgcgggacatcatgcggttctgccgcgagaagctgcccggttactgggtgcccaagtccgtggtgttcgggccgctgcccaagacagcgaccggcaagatcaagaagcatgagctcagggccaaggccaaggaactgggcccggtcgggaagagcaggatgtgatcgagcctcgagctcgtcttgctttgctacactgtactattcgtaggatggatggaagttgtatactacagactacagtgcaaactgcgtttcttctgtataacaccactactgtacgaacaatacagtcgtgtctgagcttttcttttgccagtgaggactgaactttgtatgaagtatgaactcgcgaagggcgctgcaacactgctcccacttgtatattccaaatttccaagggtacagtaatggcaagacagttaagaagttgcccaaata

SEQ ID NO: 17572 - DNA, 2501 bp, Zea Mays
ctctctggctgttgacctccttgctccttgtgttccatccgaggcccgtccaaacgcaaaaccccacggcgacgtgttccatccatccggacaagctcgttgcacctcacgaccccgtcttaccacatggcctccagtccccgcttcataagggaaaaaggaaaactaattattactagtatactgttactgctactacaaggttcaactggtaggccctcctgcggtcctgccgatgaccacggccgatacagaagcacataaacacattcgacgaggtcacgactcacgaggggactcccgagcgcacgcgcgaatcgccgcggacctcgccggaggcggcgacgagctcggatcccggcgatctagtcgccggaggcggtcccgatggctcggcggtcgtcttcctcgtcgtcggggacctggcggtacctgaacccggcgtactacctcaagcggcccaagcgcctggcgctcctcttcttcgtcttcgtcgcggccaccttcgccttctgggaccgccagtcgctcgtcagcgagtacgagtctgagatttcccgattagaagatgatataaatcggttgcatgaccagctaagaaaggctggagttaatctggatgaaaatccagtagtaagcaataagaattccagaaaagatcttgtagtagaaattgatcctgtcaataatgaaagacgggaaaaagttaaagaggcaatgctccatgcttggaattcttatgttaagtatgcctggggaatggacgagcttcagccacaatcgaagaatggtatcaacagctttggtggtcttggagcaacccttgttgactcacttgataccctatacataatgggcctgaaagatgaatttcagaaagctagagactgggtggcggagtcattagactttgacaaggattatgatgcgagtgtttttgaaacgaccataagggttgttggaggtctgcttagttcatacgatctatctggtgataaagtatttcttgataaggctaaagatattacagatcgactcttacctgcttgggatacaacatctggcatcccttataatagaataaacctagctcatggacgagcccataatcctggatggactaacggtgatagtatccttgcagattctggtacggagcaacttgaattcatagctctgtcacagaggactggagatcccaaataccagcagaaggcggagaacgtcattaaacagcttcaaaagatatatccaagtgatggtttactgcctatttacataaatcctcattctgggacagcatcatactcaactatcacatttggtgctatgggagacagcttctacgaatatttgctcaaggtctggatccaggggaataaaactgagcatgtaaaacactacagacaaatgtgggagacatcaatggaaggtctattaagtttaaccaagaaaactacaccatctaattactactacatttgtgaaaagaatggtggctcgttgtctgacaagatggatgaacttgcttgctttgctcctggtatgctggccttaggagcctctggttacgggccagaaaaatcagagcaaattatgaatcttgcaaaagagcttgctaggacctgctataatttctaccaaaccactcccacgaagttggctggagaaaattattttttccatactggacaggacatgggtgtgggcacgtcgtggaacatcttgagaccggagactgttgaatcactgatgtacctgtggcgcttgacggggaataaaacataccaagattgggggtgggacatattccaggcatttgagaagaactcccgcatagaatctggatatgtgggactgagagatgtgaacactggtgaaaaagacaacatgatgcagagtttcttcctggcagagacgctgaagtacctgtacctacttttctcccctccatcagtcatatccttcgacgagtgggttttcaatactgaagctcacccattgagaattgttccagtaagtgataacaaaggcattggaacaccggtccgacaattcgggagaaaacagggaaagcctgagtaaccttggatatagagcagtggatttttgaatctgccgtctgattctgacctccctgttgatgtgttctgacacgagggaactttctgcctgaagcagtaagggttagaaattacggcgatagattgtttagagcaaaaatcataggtagaggatgatgttatatgcggggcagtgacctccgtgaggtcaagagccccatagaagcttttatctttggatttgcttacgcaccctgaggtgcattgttgatgtgtagcatacatctaactcactgtccatatgttgttgctttcctgggggctctgcgagctgtattgtcattatgtaccccctagttattacttcttttcagatatgattcatataaatataaaacgtaaagtatctatgttattaaaaaataatgtcagagtgag

SEQ ID NO: 17573 - DNA, 178 bp, Zea Mays
aattaatcacgtgatacggaagacgatccaagtcgaccccaagcgcgggataatccgcaggataaagctgatggaccaacctgaagatggacaatggagcgagtatcagaataaaggctgatcgtcaagtggacgtcatctaacaacactaacctagtgttactcaggcaagccccgg

SEQ ID NO: 17574 - DNA, 1160 bp, Zea Mays
ctgtattaaggattgtggcatcatctcggcgccggagggctgtgatggatccgtcctcctcaccgtgaatcctggcggcgggcagactgagcgtgacgccctcccaaacaacccgagcctccgcggcttcgacgtgatcgacgccgccaagaccgccgttgagcagagctgcccgcgcacagtctcgtgcgccgacatcgtcgccttcgccgcccgcgacagcatcagtctcaccgggagcgtctcgtaccaggtccccgcgggccggcgcgacggccgcgtgtccaacgcgacggagaccgtcgacctacccccgcccacctccacggcgcaaagcctgaccgacttgttcaaggtcaaggagcttagcgtggaggacatggtcgtcctctccggcgctcacaccgtcggccgctccttctgcgcctccttcttcaagcgcgtctggaacacaagcacgaaccccgctaccgcaatcgtggacgcggggctgagcccgtcgtacgcgcagctactacgcgcgctgtgcccgtcaaacacgacgcagacgacgccgatcacgacggccatggacccgggaacgcccaacgtgctggacaacaactactacaagctcctgcctcgcggcatggggctcttcttctccgacaaccagctgcgcgtgaacccgcagatggccgcgctggtgagcagcttcgcgtccaacgagacgctgtggaaggagaaattcgcggcggccatggtaaagatgggacgcatccaggtgcagacagggacgtgcggagaggtccgtctcaactgcggcgtcgtcaacccgagttcgtactcgtcgtcgtcggcggtggagctgggttcgagcgcgccagcagccgtcggtgaagagggctacgccgcgagctagtagctcgcataccagtcttcggccgccgtcgttgtcgagatcaatgattttttttctctctctcgcatgcatccctcttctgcttttattttgtcgcgtggactgtggtttttgttgtgtcgatgatctttgttgtgtgccagtgccactaaacgtacgcatgccggccggcgaactcttaacttcggtggcgggtaataataagcatatgtatgagtaagatgagattgtgtcaatttagggtgtggatgcttttaaa

SEQ ID NO: 17575 - DNA, 1885 bp, Zea Mays
cggcgcggcgcgacgcgagttgcccgggcgccccggccttgtgcttctgcattggaccgcgatccaaatccagggaggatccgaacaggacaacagagaccctgccttgtcggggcagcacacttgggacgcgaggaggaggagttggtgagcgaactcgggatcagtgggtgaccgcagagttcttgcttcttcctcttggaggaggagggctgcagcctgcaggggccggagagagcaggaggaggcggagacatgggtagcttcgctaagctggcgaggagggcggtggagacggacgctccggtcatggtgaagatacaagaactgctccgaggggccaaggatgtgatgtcgcttgcgcagggagttgtttactggcaacctcccgagtcagctatggataagatcgaaaagatcatcagggaaccaatagtcagtaaatatggttctgatgatgggcttcctgagcttcgagaagcacttctcgaaaagctaagcagagagaataagcttaccaaatcatcagtcatggtcactgctggtgcaaatcaggcttttgtgaacttggtcctcactctctgtgatgctggtgattccgttgtcatgtttgcaccgtattatttcaatgcctacatgtcattccagatgacaggtgttactgacatattagttggtggctgcgatcccaagacacttcatcctgatgttgattggttggagaaggttctgaaagaaaatgagcctatccctaaacttgtcactgttgtgaatccggggaacccctctggagcttttattccaaggcctatgcttgagaggatttcagatctgtgcaaaaatgctggtgcatggcttgtggttgacaatacctatgagtactttatgtatgatggaatggagcactactgcttagaagatgctcatattgtcaacctcttctcgttctcaaaggcttatggaatgatggggtggcgtgtaggatacattgcatttccaaatgaagctgatggcttccacgatcagctcctcaaggtgcaagacaacataccgatctgcgcctccatcatcgggcagcgcctggcgctctactcgctggaggccggccccgagtggatcaaagaacgggtgaaagacctggtgaaaaaccgggcgctgctggtggaggcgctgtccccgctcggcgaggacaacgtcaagggcggggagggcgccatctacctctgggcaaagctaccggacagctgctcggacgacttcgaggctgtcaggtggctcgcgaacaagcacggcgtcgccgtgatccccgggagcgccagcggaggacccgggtacatccgcgtctccttcggagggctcaaggaagaagacaccaggctggctgctgagaggctcaggcgcggcctgcaggagctggtgaccgatggaatggtacagtgacggctccatgggtgtaagtaaaagctccaattttccaacggtgtaattccgccgtgattaattcgggagaagaaaaggaacttgttttcaagaatgcactgcgttgctcggacgagagacgggacggaataaaatgcgtctggtctgcagagtcacctatgttatgaatcatatgtagtgcatatgtcatgagtgacagagtgagtaattgtttctgttcgacttccagttctacatattactgatcgatggcagcaactgtacacagtcaaaggtataaccgtataagcaagaaccgtgagctgttcttgacgtgcagagcttgcctgttagcaaatatttctgtccagataacgacagcatctgccttcagaaccagcgtcacattctgtaatggcatggatgagtgtctccaagaaagataaatctactatatctacatgag

SEQ ID NO: 17576 - DNA, 1871 bp, Zea Mays
cgcagacggttgccggttgtcagatccgaatattgaggacactggtccatattctgggcggcgatccgcaggcgggctacacacacatacatggcggcggagggcgccggaggccggggacgagccatgcggtacccgcctctgtcggcgctcgtggtctccgccatcgcggccttctcggccgtgatcgtcctcgccgtcgtccactcggcgtacgacgacgccatgtcgcggacgcggacgctgctgggccacaacctggagccgacgccgtggcacccgttcccgcacgacaagggccggccgccggcgcgcgcggcgctgcggtgcgcgccctccatcgcctgcctgccgccgctatcgtcgtcgtcgtcgtcgccgcagccgcaaggtaacaagaagaagaagcaaaagcagtgccctgcctacttcgctgccatccaccgggacctggctccgtggcgcgggcagggccggggcgtgacgcgcgcgctcctggacgaggcgcggcggcgcgcgtccatgcgcgtcaccatcacgggcggcgggcggcggctgcacgtggacctctactacgcctgcgtgcagagccgcgccctgttcacggtgtggagcctgctgcagctgatgcggcggtaccccgggcgcgtgcccgacgtggacctcatgttcgactgcatggaccgccccgccatcaaccggaccgagcacggggacggcgctctgccgccgccgccgctcttccgctactgcaccaccagggaccacttcgacatccccttccctgactggtccttctggggctggccggagacgaacatcgagccatggaaccacgagttcaagaacatcagggcgggcgccagggcaacgagatgggcggacagggtgccgacggcgtactggaagggcaacccggacgtggcgtcgccgctgcgggaggcgctgctgggctgcaacgacacggccctgtggcgcgccgagatcatgcgccagaactgggacgacgaggccaggtccggctaccagcactcgaggctctcggcgcagtgcacgcaccgctacaagatctacgccgagggcttcgcgtggtcggtcagcctcaagtacatcctctcctgcggctccatggcgctgctcatcgagccgcgctaccaggacttcttcagccgcgggctggagccccgggtgaactactggccggtcgccgccctgggcatgtgcgagtccatccgggacgccgtcgactggggcaacgccaacccggacgaggccgagcgcgtcggcaggcgcgggcagaggctcgtgcaggacctccgcatgcacgccgtctacgactacatgctgcacctgctcaccgagtatgcgcgcctcctcatagaccaggaccacggcttgagcccgccgccccacgcgcaggaggcatgcgaggcatccctgctctgcctcgcagacgacaagcagcggaggttcctccacgcatccaaggcagaccccgcgccgggcgacccgtgcgtgctcccgccgccgtgatccctccccctccctctctctctaggatttctttctttctttatttatttatttattagactcaacagacagatcagaacgagttgggaggatttcaatgatggttctaaagcttctgacaaaagcatgttcagatttcatttttaggtcaattgcaatttccttgaatttaaattgtattatgtatcctgccgtcctgcctcttacaaaactagatgccttcaactatgcaaaatgctaatatgaatgacgctataattaattagtgaagaaaaaaggagctgcaagattttttaaaaaaaaatagatgtcatttacacaagaatcaatatttcgac

SEQ ID NO: 17577 - DNA, 1041 bp, Zea Mays
gctttgctaattgctctaggagagcatcccacgacaacgatagatctcttgtctccaaattgcccgctgccccctggcgttcccctcccccgcgtcgtcgtctcttctctccccaaaaggatcccccaaaccctaccgccgatccgggcccagatcgccatggccgcccccaacagcaacgacgcggccagcgccagtggcaccggcccggctggtgaggaggacatctccatcgaggcgttggcgcggcgcgtgcaggagcacatgaccctcagttccaaccccgccgctcgccgccacaagttctgggaaacgcagcccgtcggccagttccgcgacgtcgccgacacatcgctaccggacggccccatcgagccgcccacgccactctccgagaagaattacgatgtgttcaatgctctcgatgtcatggagaatgagtcgttcctcaaggagctcaagtttggtcctggagatgggcagctccactattacctctacaactaccgtattcgcaatggcatcaagccctctgagcttggtcttgtgctactatagggcagtctaatcaggacagtcctgagtttacaccttcccttccgcagcaggtctcattgtgcaatcccagtggtttctcattttgcctactgtggtagtgattctccttgatatgattgccatggtcactgataggagtcccaagatgatttgcaaacaagggagactggaattagagatatcctttcctcaatttaaggttactgttcccattagtgacatttcgcgtgcatcgtccacaatgtgtatgctggcaccgattttaccgagaaattttgatgtgtattcgaagttgtttgtgtgctgttgtgctatgtctgcacatgtatggatgtcttgatgctagaactgctgccacagctccttcagccctacccaaattttgatggtttctttttattatgaacaagttctattagtttgccatttgatttgctttgtccagattccaaaataaccagaaatgtacttatcgtgtccttc

SEQ ID NO: 17578 - DNA, 982 bp, Zea Mays
atgccgttaggtatgttagtatgttcaaacgtggctatagtgactgtggcacttactgcacaatggccttgggcggctgacatcattgctgtttgtacctcgttgttggatacgttgccagcagtcacaacacctactgaaagggcagatgacgatgatgagatgcccatggatgtcaatattaaaattaatcttgatgttgatttggaaagacagataactgcagcaattgattcaaagctacttcaacatttggtgaatgccctcttcagaggtacattaagcacaaatgattctgatctgtctggaccatcagatgctgaagttgatgctgtaggatctatttgtgcttttcttcatgttacgttcaatacatttcctctagagcgaattatgactgtcctggcataccggactgaaattgttcctgcactatggaagttcataaaacgttgccatgcaagccgaagatggccattttttttgaagtttgcatcttcattacctgctgattctcctggttggctccttcccatgtctgtattctgtcccatatacaagcacatgttgaagatcattgataccggggagttctatgaacaggagaaacccctttcccttaaagatttgaagtccttggttctcattttaaaacaggcattatggcaacttctgtgggttattccatcctcttctactcagaaagtgtcacccaacccttcaggccttaaaaagttgtcagtggagaatgtcaagactagagctagggttgggttatctgaacttctcacacagttgcaagactggaacagccgactaccattcactgctgcaagtgatttctattctcaagaagctacgagcgaaaattttgtgtctcaagcaatacttggtaatactcgagcatcagagatcataaagcttgctccttttttggctccatttaccagtcgagtcaaaatattcacttgctgaataagac

SEQ ID NO: 17579 - DNA, 1631 bp, Zea Mays
atgttgactagtgtattttttttctctttgagtcctttgcatggcattccatatggcctcaaagatataattgcggtaccacactataagaccacttggggctcaaggacgtttaaaaaccaagtccttgatagtgaagcttatgtgtacagaagattgaagtccgctggagcagtcctggtagcaaagcttgtcacgggctcacttgcctatgatgacatatggtttgggggaaggacacgaaacccctggaacatcgaggaattctctactggctcatcggcaggtccagcggctagcacctctgcagaaactgcaggatccatagcatacccagccgctagatgtggagtaactgcattgcgcccaacatttggaacagttgcacgaaccgatgtcatgagcatttctgagagtttggataagcttggtcctttctgtagaagcgcagtagattgtgctgttgtattagacacaattcgcggaacggatgccggtgatccatcatcgcgtgaggttgctttgggtgatccatttcatgttgacatcaccaaactcactgtaggctacctcgatgacgctgagatggaggttgtcgatgttctttcctctaaaggtgtcaagctggtccccttcaagctgaactacactgtggaatcagtccagtccatcctgaacataacgatggacactgatatgcttgcgcacttcgataactggcagcgggaaggacatgatgatgactatgaggcgcaagaccagtggccggtagagcttcgtcgtgcacggttaatcccagcggtagattatatacaggcgcagcgagcacggggcaagttgatcagagaaatcaaagatagcttcactgttgatgcgtttgttggcaacgtgactgactgggagcgtgtctgtctcgggaaccttgttgggatgcctgtggtcgtggtgccgacaggcttgaagagcatcgagaacccgcctaaaggcggtacgaagagaagaacaacagtgacgacaggcatctacgctcctcctgaccacgaccatattgctctggcgctggcaatggcgtaccagtccgtcactgatcacaacaaacagcggccgccgatcgatgatctggggccgaatgatgtcatacaaagatagttcaacctgctcatggaccgcgatgatccggtgatggtagcacgagggtcgttatggttatggaagctgaagttgaagacgatcagtgagccagaatggctggccacctggcagaagacatcagctgtggaagtatcaagtaccaatccacatatgggcttcttcatcagctcaaataactcagcactttttttttctgaagcaggcagcattgtatcaccttaacatacgttacaaaggaggttctggatttcatctggggcctcatcagaccaaaccgagccaaagaactgatcagctagcctagtcattacatgagctgcaacttctctgggagggtatttggtttctatggactagtccatctattttattctaaaaatttttattctattttagttaataaattgtaaaatacgatgagttttcgtatttaataatttagggactaaaaccgaataaataaaagaattaaaaattac

SEQ ID NO: 17580 - DNA, 1712 bp, Zea Mays
ctgatatggagttttgaggaaaagggtttcctatgtcagctgcctggtgtcaccgctcctattcctggggttggggtgcttccaaacttgtataatttggctgcaggacagccacaagccatgacacaacaggctaccaggcatgctcggcgtgtctatgtgggcggacttcctccaactgctaatgagcagaccgttgccatattcttcaatggagttatggctgctattggaggaaacacagctggtccaggtgatgctgttcttaatgtctacataaaccacgacaagaaatttgcttttgtggagatgagatctgtggaggaagcaagcaatgcaatggtcttagatggcataatgtttgagggagcaccggtcaagattagaagaccaacggactataatccttccctagcagctgctctgggcccgagccagccaaatccaaatctcaatctttctgctgttggcttaacacctggctctgctggaggattagaaggtccagaccggatctttgtaggtggtctacaatattacttcactgaggcccaagtgcgggagttgcttgagtcctttggacctctgcgtggatttgatcttgtaaaggatagagaaactggtaactcgaagggatatgccttctgtgtgtaccaggatcttaatgttaccgacattgcctgtgctgctcttaatggcatcaagatgggagacaagactcttactgttaggcgggcaaaccaaggagcttctcagcctaggccagagcaagaaagcatcctgttgcaagcacagcagcaggtgcaaatgcagaaattcgtataccaagttggaggtgccctgccaacaaaagttgtatgcctgacacaggtagtgacagaagatgaactgagagatgatgaggaatatgatgacattgtggaggacatgagggaggaaggacacaaatatggtaaaccgcacgagactcatcgacttctattaccctctttgttttaaaagctcctctacgttctgctgtcactaccctcagttactgaattggtttcctttttgtgtttttgtcttgtgtgtcttttttgtagtcccgcataatgccattgcagattgttttgtagtccgaccttatgcaatagtggcaatcgggccttaacccacagaagacactattcttttgactttgattaatcattttattattagcgcgtcttgtctatatatatctactctgctcactaagatttggacaggtaacttggtgaaagttgcaattccacggcctgaccccagcggtgctcctgttgctggtgttggaaagatgtggagggctcaaccaaagcaaagacagggatgcatgggcggaaattcggcgggaaccaggtggtggcggtgttctaccctgaggacaagtttgcagctgagcagtacgactgaaaagttttagaacccctattctagagttgcagttgtggcacacaatgtggttgttttgaccttttgtagttaagtttggtgattgatccgctgataagtgatataagtttcgtgctcaagtattatatcagctggtaagagtgatacaagtctcgtgcccaagtttcggtctatcaatcgactgcatgttgccctgttggcttcttgcacactgagtgatgtgatcttgtatgacatatacaacatctaggatctagtagttgctgcattagaatgct

SEQ ID NO: 17581 - DNA, 1892 bp, Zea Mays
cccgggaccatccagttacagacggaactgggttctgatgttaacttgtatgctttggtgtttggagaatctgttttgaatgatgcgatggcaatttctctttacaggacaatgtcatcagtcagaagtcatgcagcaggcggcgagaacttttttatgatgattctccaatttctcgaaacctttgttggttcaatgtcatcaggtgtgggagttggatttatctctgctcttctattcaaatatgctggattggacgttgataatctgcagaacttggagtgctgcctttttgttctctttccttacttttcgtacatgttagcagaaggacttggcttgtcagggattgtttctatattattcacagggatggttatgaagcattacacatattccaatctttcagacaactcacagcgctttgtttctgccttttttcatttactatcatctttagctgaaacatttgtgtaagcatcaggagcacttgtagtgtgtaatggcctaattggaaaatataaccgtgcactttcttattttcttttaggttcatctatatgggtttcgatattgccatggaagagcatagctggtcacatgttggcttcatcttcttctcaattatattcatagttgttgcaagggctgcaaatgtcttttcttgtgcatacttggttaacatgtctcggccagaacatcgccgtatacctgtaaaacatcaaaaagcactttggttcagtggtcttagaggggccatggcttttgcacttgctctccaatctgtgcatgaacttcctgaaggacatggaaaaacgatattcaccaccaccactgccattgttgttttgacggtacttctcattggagggtcgacaggaactatgcttgaatctttggatgttgttggagatgaaaacacatcaagagaaaattacgaggacaacaatggttacatgcctccaagttatgaagaaggaacatcctctggaggaggattgagaatgaaactcaaacagtttcacaaaagcacaacatcattcactgcccttgacaagaactatctcactccattttttaccagtcagacagatgatgataacgatgacgacttcagtcagcaaccccaaaaccgaaggctagctttttatgatcaatagcggaatttgatactctacatatcaagctaaatacacggagcagaactgacgtgcatgactgtctatgtgtgatttggtcgaacaaaatatagcaggagcatacttagttgagtagcatatggcagagcatatctgtataccgtaggacaaaaatcataagggttcgaatcagttgttcccatgggggacgaggatgatgatagccaggcagcatgtatatatttctaggcttccttaagaacttagtggggctccagatgaaaagcagtgtgttgttggaattttatagaccctaccttgtgttaggttaaattttaataaacccgaccgtttgtccgctaagtcggctattatgctcttgttgtaattgacgcgttgcaccagttgccccactggctggttgcaccagtgggaaattgacgcgtaccatatataatgttgccatggctgattataaaaattctgcaaagcactgaaagcaaatatcatcccaggtcagggaagtatgctgatgtttattattttaacgttaacatttactcctattctaacaaagtagttcagttttgaaatggttggccggtttaagctggaactagaatttattgcaagtaccatgtagggattgagctggaaagttgttctccagttctgctactgcaagcaagcaaagtgaaggaggtacacaggcataagttatttcttaaacctaagttctgcatgccacatttg

SEQ ID NO: 17582 - DNA, 2176 bp, Zea Mays
actgcagattcgatttcaaagaagtacaagcgggtagcggtagccctgtccctgacctgatcctgacccgtgcgggcgtgcggctcctcgcggacagctccagactccagagccgcctcttcgccctctcgccatcggcaggctacggtggctgcttccccgagcctgcaggtagaccaccttgtgttgattcctcgagtcttcacctggtgcttccgtttgcagcttcatttttaactaagatgtcacaagccaaggaagtgaggtacactgcacggtctattacacctcctgctgatagaaatggcacttcaaggtcgcctcctccaaagagacgcagcccttcaaggtcacctccaccaaagagtgcttcacggtccccacgtccaaggagtccaaagagacgcagcacttcaaggtctcctcctaggagacgtggtagatcaaggtcaagggataggagtcggtccaggagcccagatgatagaaatccagggaataacctttatgtaactggattgtctactcgtgtaacggaagatgatcttgagaagttctttagtaaagaaggaaaggttaagaactgtcatgttgttcttgatcctaggacaaaagaatcccgtggctttgccttcgtgactatggatactcttgaaggtgcaagacgctccatcaagtatctgcaccgcactgtacttgaaggtcgcctggtcactgtagagaagtttaacatggtgctgggctgcctctacgtcaacctggttggtccaggctgtgcagtctccaaccatggttgtctccaaaggatgtgcagctgacgtgatggtgcttatcaccacaccctcagagctcatcaccacttgccgtcttcacctcgctcaccgacaatgcatacatgctacatcaacacgacggctgtcgccatagagcgatcttggagtcttgttgtgcatcgcgtcaccaccatcgccaccgcaacttctaccacaaccgccatcgtcaacatcacgctcgtgatccaacaggctctacgatttgtctgcttcgactaagcttacatggtgcatgctgctgccatgtcacgacaccaaccaccaagtctgatgcgaacttcatcgaccagtatcttgatttgatggacatcacgagaggcataatctggcgcttccttggaccatggctacaccgaccacggaacaagtgcacaaaagtcatctttggtttagttggcatgcaacgtaaagtttaatctacctatatcacaagattttgatcaagagttgacaagcttaatggaccatgactatttttcaccaaaagggcaaagtttagtttcattatcaattatattaaccactctgttcaaatttaagatcgaattgggttcttcctttatttagcatacttgaagttcattgcttgtttcattcgtaccaactaatacatttgttcacgattttattccaggctaaaagaactcgtgaaaggacccctactcctggaaaatactgtggtcgaagaggaggatctcaaaggagcccatcaccttaccgccctcgcagaagggagcgttcgcgctcaagggaacgcagaagggagcgttcgcgttcaagggatcgaagggagcggtctcgctcaagggatcgaagggagcggtctcgctcaagggaacgccgaagggagcggtctcgttcaagggaccgcagggagaggtctcgctcaagggaccgccggagggagcgctcacgctcaagggaccgcagaagggagcgctcacgctcaagggaccggaggggcagttcaccccatggcagaaggcatagagatcggtccaggtcacccaccagcaatgggaaccataaggcagactaggaagcgcttttatggacttgtcgttgattgcgtgaacaaaggaacttgtaacactacctataaactggtcagactgagacggttagcatggatttttagtagtgttgctgtattttgttgtttcatacaagtactctattctgttagctttcggatcgaaatgtcggatgatgatggttgttattgttctggaaatcgtagacatgtcctccagaatacctatgaaactatggcatactcgtgtgtttgcttaaggttgctgtggtatgttctgatcttaagattgacacgttgcacggtagat

SEQ ID NO: 17583 - DNA, 1669 bp, Zea Mays
cacatgggcactccaaaggctgaagtagtcgcgtgcgttttaggccaggaatccaacgtgcttcaccccaaaaatccatttgctccaacattgcattttaactaccgttactttgagacagatgcacccaaagatgcacctggtgcaccaagacagtggtggtttggcggtggtactgacttgactccctcatacatcattgaagaggacgtgaagcattttcattctgttcaaaagcaagcatgtgataaatttgatccaagttttcacccaagattcaaaaaatggtgtgatgattatttctatattaagcaccgtaacgagcggcgtgggcttggtggaatattttttgatgaccttaatgattacgatcaagaaatgcttctcaacttcgctacaagtgaaaccatttgctagaatgattggatggaattatttgtattcagatgtggagatgtctgatgcagggaacaacaggtctaagaccttcttgaggccacttggcagcattagcaagaagaaggtgcagcttcatttgaagatcaagaaagacaagagaaaagctaggaagaagggaaagttttcttttaagaagtagaggagtgtatgataaatcatgcagttttgttcccagtttgtaaaacaaacgcactgcagtcatgtcatgtggtgcacctacctaagtccattcgtgggtgacctactattaaatatgttgaaatgggtacgaaaaaaggatagtgctgacctatcagctgtttctgttctgcgggtataaatgtcaagtactcaaattgctgagatttggtttcattttcacattgtatcgtggtgaaccatgtttggaaacaatggccttgtttggcacagctgctgcttgttgaaaaactggtaaaaagcagcttctgtttgttggctgtttttagtgtattttgagaagcagctgaactgataagctgctgcaaaagctagctgtttggtagaacttctgcttaaattatgaagaagctgaaaataagctgtgccaaacagggcctgatgtcgagcacttagggagcatatgaactgtcatttgttgtcactcataggcctgctaatggcaaaaaatccaatccactcccacccatacctaaatctaattactttgatatccatcccacacccaaccaaaaatactagaggaaagttaaactcaacccaaaccgacccgtaattgggtggaaacccatggaaaacccgtgggtttagcttattgtctcacatcaagccaactgcatacatattttaaaaatcacattttaaagcagtaaattaatttaaataaaaaagttttcaactacaaatttgtataactcatcatgatgtacattttatatttcgaacatttcttcatatgataaactaaaaataaatttgttcatacgacctatatctctctcatagtttatggaactacgagatatatgtatagaatttgtgcatattgttagaactatcatgtgagatgaataaatgatcaaacaaccaaaataaactttgtagatcttgaaaagttataaaagtttgtagttgacaactttttcatttgaagtcatattgtcaacgaaaattatgcctgaatttaaaaaatttaaaatttgaattttgaaaacaacctcgaaagaaaaaa

SEQ ID NO: 17584 - DNA, 1450 bp, Zea Mays
ttttcactgatccaccgaaagcacaaccgccgccgtttcttcatctcccatcttcgtcgtcttcgcagcaccggcgctccattttccgctctcggcacgcaggcgacggcggcggcgctcaggcttgggatctcaacgacggagtcagcggtttcccctccccctctcgccagccgcctcgcgccttcgcctccggtcctccgcacaccggctggtgaccctgcgtgcgtgcctctctctctcctcccgccttcggtggatcgtcaacgccgccaggccccggcatctgagccgcgcgcggcctgagggcagcgagagccagcagatgctgctccaccaaggtggtcgcgcatgcccaaagcgaagcgttacccgtcctcttagcgctgaagcgtgcgcttagtgccggcttttggaaccctgtatcataccgaattgcgcattatagaaattggctaggactacactgggtttgccattggccatgacgtgtgctgcttacagtatcagaggtcctctcatgcttgctgcaaggcgcagctcggatgtgttcgctagtagcaagtcgtgcaatggcaagtcttcggtgtcttaccccgttattcagtggtggagcagtaactgctcatccttcacaatgcggcatgtcgcctcccatcatcacttgattgttaaggcttcagcaacgtggcactcaaaagcttcagcaactgatgcagccactgcttccgatgagaggataactgtactggtcattggtggtggaggcagggagcatgctctttgttatgccttgaaccgttccccatcatgtgctgcagttctatgtgcccctggtaatgctggtattgctcagtccggggatgcaacatgtatttcagatttggacatctccagtagcgatgatgttatctcgttctgccgcaagagggaagtgggaatggttgtagtgggtcctgaagcccctcttgtcgcgggtcttgtgaatgaccttgtcaaagttgggataccaacctttggcccttcatcagaggctgcagcattagaaggatcaaaggacttcatgaagaagttgtgtgataagtacaacatccctacagccaagtatcgcacattcacggacgctgtggaagctaaaaaatatgttaaaaatgaaggagcccctatcgttgttaaagctgatggactggctgctggaaagggtgtggttgtcgcaatgactttggatgaggcgttcgaagccatagattctatgttggttgaaggctcattcggttctgctggttcactggttatcatcgaagaatttctagagggtgaagaagcctctttctttgcattggtagatggcacaaatgctttacctcttgaatcagcacaggatcacaaaagagttggtgatggtgatgttggcccaaataccggtggtatgggtgcatactcccctgct

SEQ ID NO: 17585 - DNA, 814 bp, Zea Mays
atcggttagcttgtttcggcgtttcgttggatcagcagagcgttaaaccctatccgttggatgtagcactacaggcgtcgagcactggtaatcctgcaaccttcgtcatggcgcatgcggcggcggccgccgccgtgccgttacgtcgtccgctcctcttcctcaaggaggctcgactcctgtccacactcgcgacccccttacctgggctccgccacccgcgcgccctccgacccacaggccccttgccctccgatgccgaggacaccgacgatccagacgccggcgacggcgccgccgtgtccttcaagaagagccgcaacgaactgaagcgggaggcccgccgcgccgtgaagtggggaatggacctcgccaagttctccccacctcagatcaagcgcatcctcagtgccgcgtcgctggagcgcgaggtgttcgacgcgctaatgctcgtgaagaagtttgggccggatgtgcgggaaggaaggaggagacagttcaattacatcggaagtcttttgcgcgatgcacaaccagaattgatggatactctaatacaagcttctaaggatggagatgagaggaagttatataccttacttagtgaaggtaaactgttggtggaagaagaggaagaggaggaagaggacctacctgatggagaagaggagaatcaagagtatatgaaaattgcagatagatggtttgacggcctcctctgcaaagacatttcagttactaatgaagtttactctgtccatagtgttgaatttgatcgtcagtaggagtattgattaaactatgtataaccctg

SEQ ID NO: 17586 - DNA, 1211 bp, Zea Mays
cagattccgctgcaaaaaatttccacgtgctggtggcaagttttctgccgttggcgcattctgccgctccggtgtgggcgggcatcaatcttctccgggacgctttctctctgtcggccactacacacacgccgcccaccaacaccatggacgccgccgcgaaggaggcgctgatcctggacctgcacgcggtggaggccgtgaagctgggcaccttcgtgctcaagtccgggatcacctccccgatctacctggacctgcgcgtgctcgtctcccacccgcgcctgctcgcctccgtcgcgtccctcctcggcgcgctcccggccacgcgcccctacgaccttctctgcggcgtgccctacacagcgctgcccttcgcggccgcgctctccgtcgccgcctccgtgcccatgctgctcagccgctacgacaccaagcgcgtcgagggcgccttccgcgccgcccagaccgtgctcatcgtcgaggacctcgttaccagcggcgcctccgtgctcgagaccgtcgccccgctccgcgccgaggggctcgtggtcgccgacgccgtcgtcgtcatcgaccgcgagcaaggtgggcgcgagaacctcgccgctagcggggtcgcgctgcactcgctcatgaccctcacggagatgctcgccgtgctggcgaggcacgggaaggtcggcgaggagaagatcgcggaggtcaggcggttcctccaagccaacaggaaggtggcggtgcccggggtgcctgctgggccacccaagccgtcggctactgctcggaggaagtcgtttgcggagagggcggggttggccacgaaccccatggggaggaggttgttcgaggtgatggaggcgaagcagagcaacttgtgtgtcgcggctgatgttgggacagccaaggagctacttgagcttgctgacaaggttggtccagagatttgtatgctgaaaacacatgttgatatcttgtctgattttacaccagattttggggccaaccttcgcacaattgctgggaagcacaactttctgatctttgaagaccgcaagtttgctgacattgggaacacagtaactatgcaatctgaaggaggtatattccgcatcttagactgggcggatattattaatgcgcatatagttcctggacctgggattgtagatggcttgaagctcaagtcactgttgtcttctggcattgaa

SEQ ID NO: 17587 - DNA, 687 bp, Zea Mays
aagccgagccagtagtccctcgacggcggcgccatcgccgatcgatcgcccggccggcacagcccggagccccggacgaacgcacgcacgcacgcacttgtgcctctcctagtagcagattaattttacgttccttttttttttccaattcgattcgattgattgggggtcttctttcttcggttctgttacacgggttcaggaacaggtgggggggagagagaaaagagatgcagattgccacgctcggacgcaacaactcgcgggcggattcaagaggtcacgagagaacccgaggaggacgcgaccggcgaaggagaaggcggcggcgagggcgaagaaaagggtttcctcctcctccggtcccttctatgttctctctcctgggctcctcccgggtgggtgcgtgactaattctgatgcttgccctttctacctgtgcctatctgccgatcccctcccgacctgcccccacaaaagcgagacgacgacgacgatacgagagggcagagagagagaaggcgaggtcgggccgtcggggcggtggtgggccgtgttgcggtgtttgtttgctgttgcgattgctcgcggattcgctcgcgagcgcagcgccgcaatccgggtgcgtgggcgtgcgctgccgtggcccgtggggaggaggaagcggtaagccaagaccgcgcgggc

SEQ ID NO: 17588 - DNA, 1264 bp, Zea Mays
taaaaggaatactataatagcaaaaagctcctcccagcagtgcacgcgtgaagctcggcggcggccggcacggtgcatcctccgctcttgcctcacctcccggtccatcctcgctgctcacgcgtgcctcacctcgacagcagccttccctcgcgacagggataaggacttaaggaggcgtcgctcggtgcaaagaatccatggcatggggaggtctgttcttgtgcatgggccgccccacgcaggagcaacagaagtcctgccttgcagccgctggtggcttcaactacgacacagctctccaaggcgccacacgcccaaagtcagtgtctaccttgacctctgacgaagctggtggcgaaataggtgacaaggatcttaccgagcgtggattctttgtgaaccgatcgcgtgttctggtcggctcaggttctgacgcctttgtccatgccaaatctgccctcctctcatggaggaactggtggttttcaggcacttggctttagggtgggcgaacgtggaaccggacaccccggtgaaggtaggtacaaggttctgcatctgctacaaggagttgatcccctgggtgacgctgccgcttcagatagcgtatgtgaccgacgtcgattcagacacgtccaaagggtgctcccggtccaagatgtttgccttcggcagcggcactctacagggccatctgctggccggagaggagcggttctcggtacaggtggacgaggaggagagggtgtggtacgaggtgctttctttctcgaagccggcgcacgtcctggcgacgctgtgctacccgtatgtgcagctgaggcagaagcatttcgcgcagcagtcgggacaggcgctcgtcaggcatgtgtccacctgctcttccaagcagaagcagtagtagagctttgtggagatgcactgcacagagaatgctgtatgtattccccctttgaattctattccgacatggcctggtttggcggcgctggggcctgggtgggatgatatatgttcgggcattccgagtggagtttgcccatcccatattttaatttcttcatgatggtggtggatctgttgcagctgaatgaattaagacaggaagatatataaaattcatgcgcacacagaatgaacacgagatgagaatcgagaaggtgcagtgaatgatttatccattatttatgaagtgattaatttagtaattaatttaatcttcaaagtgcgtagttatctaacaaattattagaaaacatgg

SEQ ID NO: 17589 - DNA, 2701 bp, Zea Mays
atgcccggagcgctctataaaacctgggggatcagaggaggaggacgtaggtatcgtgtcggtgtgcagtgtgttgtcatctccatctccagctccagcgccgccttgctctgtgtgcttccgcccgctctgtgttgctattgctaaactagtgtgttctgtcgctatgggctccctggccaccgcggacgggccgttgccgccgctcaagtaccctcaggctcgccgggacgaagacatcgtcgacgactaccacggcgtcctcgtgccggacccttacagatggtggattcgaaggaggtgaaggagttcgtggacgcgcaggcggccgtgaccagcgccgtgctgtccagctgcgaccaccgcgggcgcctgcgcgggcagctcaccgcgctcttcgaccacccgcgcttccgcgcgcccttcaagcgccggggcagctacttctacttccacaacccgggcctccgcccgcacagcgcgctctacgtgcagcacgggctgggcggcgagcccgacgtgctgctggaccccagcacgttcagcgaggacggcacggtgtcgctcggcgtggtcggcgtgagcgacgacggcgagcacctggcctacggcaccagcggcagcggcagcgactgggtcaccatcagggtcatgcgcgtgcgcgacaaggagcacctgcccgatacgctgtcctgggtgaaattctcgcgcatcgcgtggactcgtgacggccaagggttcttctactcgcgttttccggctccaagggatgcgctggattctgggatgaagactggcgtcaatctcaaccacgaagtctactatcatttccttggaacagagcagtcacaggacgtgttgtgctggagagaccctgatcatcccaagtacatatacatccctcaagtcacagaagacggcaagtacgtgatcctttcggtctcagaaacgtcagagccggtgaacaagctgtactactgcgacctgtcggctctcgctcacgggctgggcggcgtgaagagcgcccatggcaacggcatgctccccttcgtcaagctcgtggacaggttcgaggcctactacgggctcatcgctaacgacggcacccagttcacgttcctcacgaacaaagacgctccaaggtacaagctggcgagggtggacgtcgacgacgacgagcccgggtcgccgtggtggaccgacgtggttcccgaggacgaggacgggaaggcggtcctggagtcggcgtgcgccgtccacggccacaagctgctggtgagctacctgtcggatgtcaggtgcgtcctgcagatgaggagcctggtcactggggagctgcttcacgacatacccgtcgacatcggcactgtcagcgggatctccggcagacgatgcgacgccgaggtgttcgtcgagttcgcgagcttccttacccccgggatcatctacaggtgcgatgtcggctctgcggtcccggagatggacgtgtacagagagatctcggttccaggattcgatcgaaacgagtttgaagcgaagcaggtgttttatccgagtaaggatgggaccaagatcccaatgttcatcgtatccaagaaggagatcagcctggacggatcgcacccggcactactgttcggctacggcggcttcggcgtgagcgtgacgccgcagttcagcgtcgcccgcgtggtcctgatgaggaacctggggttcgtggcgtgcgtcgccaacctcaggggcggcggggagtacggcgagggctggcacagggccgggtcgctcgccaacaagcagaactgcttcgacgacttcgtcgccgccggcgagttcctcgtgtccgctggctacaccagcccggcgaggctgtgcgtcgagggcggcagcaacgggggcctcctggtagctgcctgcgtgaaccagcgccctgatctgtttggctgtgccctggcccatgtcggagtgatggacatgctacggttccacaagttcaccataggtcgtgcatggacatgcgacttcgggtgttcggagaacgaggaagagttccagtggcttatcaagtactcccccctgcacaacgtgcggcggccgtgggagaacaaacgggcggccgcagctgccaacggcgacgcaagctgccggggcttaggcggccagtaccctgcaaccatgctgctgacggcggaccacgacgaccgcgtggtgccgtcgcacacgctcaaattcctcgcgacgatgcagcacgtcctgcgccccggcgcggatggcagcccgcagacgaaccccgtcgtcgcccggatcgagcgcaagagcggccactgctgcggccgctccacgcagaagatcatcgacgaggctgcggatcggtacgcattcgccgcgaagatgatgggagtctcttggatggactgactgagtaacccaccaaatgagtactgcgcatttggctcaggctgttaggttacaatgtatcggtgctgtattgtaagcggccaggctggcaacttggcgtgacacatgtttggttctgcttctggtttggaaaattagaagctgaactaaaagggcttcttttctgcgactactttaaaaaaaacagcttttctttagtgtaaatttgagaccttgttattgatacttacgaagtttgttatattaatgcacagtaaattgaaactagattagaatttaaataatt

SEQ ID NO: 17590 - DNA, 535 bp, Zea Mays
catgaatgcatggtgctaacatagatgttgttcatttcaaaggttccagaaagcgattgatgcttgaggcatggaatttctacagctcaacctctaagctgtctgatatgctatgcctaatcttgagaagtggccggacgaaatatgacttctgaacttttgggttaaaactgacacatgttgatactgttcaaagctgttgtatgttcaagtatagtacaaaaaaatgctgaccatgaggctgtcattgcaagaattcagatcagcataaaaaattgctagtagcattcagtatgtaacaaaaacatgtgagaacccatacgagaaccacgcagggtgaccatcgccttgtgttcttttggtttatccctacctgttaaatatgtaatgtggttccccaccaatgtgcgctatgtaggcaatttcgccgtcagatgtcgtcagcagtattaaatagagctggcgctgtttcaatgtgtcaccggcaaaatttgcagatgtttttttttgctgtcattcatcgcattttcaccca

SEQ ID NO: 17591 - DNA, 817 bp, Zea Mays
tctatcaatggcccaatataatgcattcaacaggagatgtttgagcgggaaattggtcgtctcagaacaatatatcagcaacagcagcaacaacaggctcctgctcttgttcgtagtaacagcagggaccttgatgtgcagttcgccaacttgtctctgaaacacaaagaccccaacacgggccgggatgctctctctgggcctcttcgtacttagttctttccatccttccgttcttgtgggttctatcagtggccaccactgtgtctgtcatctccaccaagaaaggagaagtgcacttggattgtgtgaaaaacaccggaaaaaggctaatagctatggatctgatgtttattatttcgggatatgcacctggcggtcatcctcagctcgcgtccattggtgatgctcgaccagtcggcggtgtttagggtttttgtttttagctagatgcttttcaagcatcattgtaccatttttcatgctagggttctaatctgttactacccccgttttcctgaactgtgtgcttcaagcatcttagtcatgtttggattagttctgcgttatcagtgcctcagtggaatgtggagcactaggcagcatcaggtaagttgctttggagatgtgccacatccttgacaactgcatgttctgctattatttcttagtactcaataagctagtgcaaatgaggtattagcgatcttcagatttcaggttgttcttgatgtactcctatgaatatatctcaattgctcaacgtttcctttttatgttaaaatttggctccataattgtatattttgaatcaagc

SEQ ID NO: 17592 - DNA, 1059 bp, Zea Mays
ttcacatttcaactcatcttgctaggtcagaaaatgtttggtgttgctgggagccctgcatatgtggcacctgaagttctttctggaagctattcggagaaggttgatatatggggtgccggtgtgctactacatcaccccatgggaatcaatatcagttcttggacgggatcttattgggcgaatgctaaatcgagatgtctcttgcagaatgactgctgatgaagttcttagtaggtcacccatgggtcgtattttacacagaatgccccctgaaggtggtagctgctaatttgtgtctccctaacaaggttatagcacccaaaattccatgggacagacacaaatcagaatgtgactcagtgtcagacgcaagccaaaggtcagaggatcaggatgagtgtggcatagttgacgcattggcggcagcaataacacgtgttagaatatcagagccaaagagaagtcggctctgtagccccgcaattaccattcagcaggaatgctcgtcaaacttgaagaataatctttgcacggctttctgacctgacctagtttatagcacctgatcggaatggcgtccattcttctcgctgagaaggtcgttctgatttaggtgttgtagaggcgaggataataactcagcttttccagccagcaacaaacgtctggtatttagtgtttctttcagtgttcctgatgaaccccgcagttgtagctgctgtaaaattctgtaaatagcatggtcctttctcaagctgcgcctgggttgctaatttgtgccaccaaaaccgtttcacgcaatgttcataattcatgatcgagttgtgcaagacctgtcttaattctgatgcttgtcacccgaaactatatttggcacacgtatcatgaatagcttggtaccaccgatacccatgtgctacccgttctaaactgtggtaatggatatcattcaaatgtttcttcacaatttatttgagttcttaattaattttagtttaaaaatataatttgtttgagtttataattaattttaattcaaaaatatatagaaatata

SEQ ID NO: 17593 - DNA, 1200 bp, Zea Mays
ttttcacttgtttcaatgtgccattgataacttacttgtccggccgtcgacaccaagcaggccttgagcttgtggcagccgtggtgatcggtcttatcaccagtggtgtcgttagatgccaaatgcagtttgctctgcacgaggattttgctttctggtgtctgtcccgttggaaccggggatttcctgagtgacgaatagacttcccatggcagctattctgttgaggatgtgggaaaggtgcactgcagagtctgagaagtgagagaaataaatgacaagtggtttcaactaaaccaagcaccacagttggaggtcaaatccttggaagacaatattgtgaagttattgtagcttgtgtgctaaaacgagatacagttttgcctcgccctggagtgatgtcgttgtggtgcttttgtgactgatcatctctggagcttttgtgaatgatctagctagatatctgtaaatgatctagttgtgaatgatattataattgtgatgcttttgtgaatatataattgtggtgcttttgtatttataatcaccgacaagcaaaaaggacagttttcataaattataattagaaacacatgtggatcatctggcaacgaacgaggaatcgaatggagtacgtacgtacgcgcgtacactgtctttatacatgccatcgacgacgacaattaacctaagaaatgaatgatgagggccatacatcatcagccagctgacctagacggcgtcaccgttctcggccgccgggtagtagcccgcgtcaacgtcgccgcggcacgacagggaggacgcggagcgcggcggcacgggcgggcgcgccagccggcggccgaagctgtcgtagtggatggcgcccgcgaagtccagcggctggcagcgctcccccatcaggatccgccggctccagagggccacctcgcccgccgaccccgacgacgccctgcccttgtcgatggccgccccgcgcgcgcacagcgccgccgcaaccacgtcggccgtcgtctggtggtgcttcgttggcctcctcctctggtggcgccggaggaggcgccgcgtcgcgcgcgacacgcgcactgtgcacgccgccaccaggcccgacaccctgcccaggagttcctcgccgtagcccgccgccatgcttttgtcgtgcgatgatctggaaagtgctacagcagcgggttcaat

SEQ ID NO: 17594 - DNA, 753 bp, Zea Mays
ggaagaccttcttaatacaatacccggggatgtcttatccgctgcagtatcaaggagaggatggctggaagccaaagaactacactggactatgtgagaagattctagctaaaagtcaaactgtggctggatttttccttgttcagtatgctcacttgtggcaagatcatcttaacaaactttttgacctgtatgcctctggaaagctaaaggtttccctagaccccaagcaattcttgggtgttgcttcagtcgtagatgcggtcgaatatcttcattctggcaagagtgttggcaaggtcgttgtgtgtattgatccatcatacggtcagatcgttgcaaaattataatccatggacatgatgcgcattgtcttccatggtcacgtaggttattgtcttatagttacacatatacatcaagaccgtattttcccagcgggtgacaaatgaataagggaacatgttggtgtatagtttagtttcatttttccaaagtgtaagatgcacaactatactgaaggacaagcatgggcatggaaatcgattaagtttctaatcccgtgcagtaggatatgcattcgtgtggcctcgttccacgttgtatgtatacagtatatattatataacttgtctcagtgccacatgcttcaattcgaaccggtaacaataattcaaacagctcatgcagatgcattctcaaatacacagcttggaacatcgatattttcttttgaagaaaatttgtttgtgc

SEQ ID NO: 17595 - DNA, 339 bp, Zea Mays
cacagccagcacgcacaccaccaccgccagtggcgtgccaatggtattgaactcaccgccgaatagaacaggtgcaagagttgtcatgttcttagatcaaggcagacagaattttgagcaacaacggagagagcatcctgatgttgtaacttcggatttgcccagtatagccttcctggagaaggctgcatctgggaacaagtatgaaataacagagttcgttgacgagcctagcttttaccttgctgttttgcagtttcaaggatgatttgttccttttttgcaatatttgtgaagcaaattgtgactgtcttaatgattaagtgtggaacaattagc

SEQ ID NO: 17596 - DNA, 2029 bp, Zea Mays
cccaaaacgccgctaccccctctcattttcttcctcgtctccacctccttctctcctcctcgatacatccgagcacgccgaacgctgtcggaaggcacaaagcggcgagcggcgccgggcttcccctctctttctcgcccccgatctgcgccgatcggggcgaccgctctctggggacgccgatcgaaggatatacggaagcagtttctagttttcttcagttggtcgccacagtttccagcgctttcagccagttgtctaataacttgttgttgttgttgtacttaagattgacacgcttcgtgttgtaaagcattgccatgtttggggcatgacttgtttttgttgaaatcaattgacttccaaggggtacactaaatccttgatgcaacataataggatcaccgtactgtcttcctcagagaccttccaacttggttctagttccagcaaccctgtcatggatcatcagaatttacttcccaacaactctaatgtggatgaacagattttactcccaaatgcattagagcatgaggactgcccacactatttgctcaacggtcatgatgtgggtgtgccaaatggaagcttgattggtcagcaaaatacaagcttgagcttgtgggaaccagctggatctagctcaatgagctgcttagttgatcatgacaactttttccaggcaaaaagggagcatcttgcctcttctctgtctattggaggccccttaaatatagacaggaggagacatgaaggcactagttcattgcctttacacaacctaaacatagacctcaacattaatcaggctgatcaatttggctctgatgatgttgatcttgtacatggtaatggacaatcaagtgcaaatactgtcacagcccacaggggctctttcataactgatcatattatgcatcatggagtttcttcagatgctacaggaagttcatcatggaatgcagaatgttttaatggtgcagcaagccagcacagtcgtcatccagcttttaagagaaagtatcttgatggatgtcaatgtcatgcagagtcttctgctaatggaagctcacacaattgtcaccagaatgatagtactctgctacctcttcggaccacctgtgaaagtttgactatgccaaccacgacaaattttagtgttccacatcctcctgtggaacagctaaaccagagcactaatatttctgcaaattctactttgattgaccactattcttcttatagtggtccacatgcaaacgaattcatgcgaaatacacggatgcgaataaaccctagtgattatgatcaatcactgcccagccttttacctgaagggagtttcaggtgcccagcttatcagcatacacagcagcagtcatcatttaggccagtgcaacctagacaagtgagctcttctggttctcatagtcgacctcacttgcctgttgttactcaattttcgcaaaatcttcaccgtccttcagcaaatattagttttggatcaaggattgggagttcttccagttctggttctacagtactgatacctgcttcacaagatcccagtacaagcttgataggaagtgattttcctgagccccttttgttaggttctttgtttacagctgattcaacaaatttcttatctgcatctggaaacagaagtaaccagcaaaattctggatccagctctagttccatgcttagacctgctgtaaatgttgcagctcaacaagtccctgggttcaacgtatctcagccaagtacaactctaagaggttcagctgatgtgtctaggaggtccttaactgctgctggtgtttctcattttagaagttcaagcatggcattgcagcaccgtgggacttcatccacaccgcatgagattcggagtcaccagccaggatcaagctctcgtgcccatcagcagtcattaagacctggtcattcctcgatagacaggcagagctctggttacttggaccttcagtcttttatgcagtccatagcttcaagggaagga

SEQ ID NO: 17597 - DNA, 2933 bp, Zea Mays
atgcggtgccatgcacctggactactagtacgcttggggaatggggatgggtgcaacggtagaggaagatccggcggtgaccgtgctcctgttcgttctcctggtcttgattcgattgggaggggaaggggttccttcggtcttgggaaattcgaagacatgcctgcgctctacgcttattacggagatggcgggtgcctcgtctcggcgccggctgagctggccgggctcttctgccgcggcgccgtgcagcagcggaagcgcacgctggtgaccgcgtccgcggtcgccgcggcggcggccgagttcgtgagggcggccaagaagcagaggcagctgccgctgccgtcgctcgacgcgctcccagacgagtgcctcttcgagatcctgcgccgcgtgcccggcggccgcggccgcggcgcctccgcctgcgtctcccgccgctggctcgcgctcctcggcagcatccgggcctccgagctcggccaggccgcggcggcggcggcggacaccccgtcgctgcccgacctgaacgaggaattcgtcatggaggaggataatgaggagtcccccgcggatcggtgcgtcgacagggtcctagagggcaaggaggccaccgacgtccgcctggccgccatggccgtcgtcgccggatcccgtggcgggctggagaagctcgccgtccgcggcagccacccgacccgtggcgtcacggaccaaggactgtcggcggttgcacgcggcagccccaacctcagctcgctcgcgctctgggatgtgcctcttatcaccgatgctgggctcgcggagattgctgccgggtgtccctcgctcgagcgtctggatatctgtcgatgtcccctcatcacagacaagggcctcgtcgctgttgcgcaggggtgccccaacttggtgtctctgaccattgaggcatgccccggtgttgccaatgagggcctgagggcgattggccgcagctgcgtgaagctgcaagctgtgaacatcaagaactgccctcttgttggtgaccaaggcatttccagcctggtgtgctctgctaccgctgctcttacaaagatccggctccagggattgaacataactgatgcttcgcttgctgtgattggatactatgggaaagccatcactgaccttacacttactcgtctcgctgctgttggtgagaggggtttctgggtgatggctaatgctgctggcctgcagaatctcaggtgcatgagtgttacctcttgccctggagtcaccgatcttgcgcttgcttctattgccaagttctgcccgaacttgaagcagctgtacctcaggaagtgcggatatgtgtcagatgctggcctcaaggcgttcacagaatcagcaaaggtgtttgagaacttgcatctcgaggaatgcaaccgggtttctcttgtcggtattcttgctttcctcctcaactgcagagagaagttcagggctctatcgttggtgaaatgcatggggatcaaggatatctgctctgcgcctgcacaacttcctctttgccgatcacttcgtttccttacaatcaaggattgcccaggtttcaccgatgcaagcttggctgcggtggggatgatttgccctcagttggagcaggttgacctgagtggtcttggtgaggtcactgacaacgggcttcttccattgatccagtcttctgaagctggtctggtcaaggttgacttgagtggttgcaagaacattacagatgtggctgtctcctccctggtgaagggacatggaaaatctctgaagaaaatcaaccttgagggttgcagcaagataacagatgctatcctcttcaccatgtctgagagctgcaccgagcttgcggagcttaatctttcaaactgcatggttagtgactacggtgttgccatcctggcatctgcaaggcacctcaagctccgtgttctctcactgtcaggctgctctaaggttactcagaagagcgtgctgttcttgggcaaccttggccagtctatagagggcctcaatcttcagttctgtgacatgattggcaaccacaacattgcatcgctggagaagaagctctggtggtgtgacatccttgcataggcagacaagatggtccattgctggaagggctcatgtctagtctactgggagccacctccagatgcagatatacgaccgtagcagtagcacaaccaggtgatcttcaggtttttggctcgcatgcgatgcgagtgatgatggtgggcttccgcattgttcaaggaccagttgttttagggggtgctttctagtcaagtgctcgtttttcacagatcacctctcgggaggtttatctgttttttgagccttggctgccatcactggcatcctgcccctcgatccagacactggtccttgccttatagtcatataaggttttttaggttgccatagtgtccaagtcctttttcgttttactgcttcctggttatgaagttgcaggcatccgtgatccattggcagctctggactatcacaattctaactcaagaaccagatgctggtgtcatcttttccagggctgctgatgctggagcgtctgtggatttgtgcagtgtgtttggttgtcgagttttgagtttgtttttagtcttgatgtgttgtgtgctgttcatgttctccatggtgtgtaagggtcatgtagggttgcatcttttttacagtctctctgggatgcttggtgttcatggtgatcttggccaatgctaggcgcatactagaagccttgccttgacaaccttttatggtttttttgccagatccctatttttacaagcagattgttgagtgctgtaagcttggcgaccctctttgaataaatgaaatatgtgtttatgttgaaattttgtgcttgccttgtatttataacattgttgtgc

SEQ ID NO: 17598 - DNA, 2621 bp, Zea Mays
ccctggcccctgtgctccccttgccaccgaacgagagccaaaagcctcccgccccacgacgcgcccgccccggcggcgacgccccggaggacgtttcccgcagcgaccggcgaccaagccttgattgcctccgccccatggctacccgggcgcgggcgtagccgccgcctcggccgcagcaggctcggtccgcccccctcggcgatttctgttccagtcgcatcgcgcgacagctcgtcgtccgattcggatccccgccaccgcggcggaacgaggcgtctccggtccccgagggtattcggggaatttgagactgataagtcgggatcctgtcgataatgcggggctacgtgtacgagaccaatgaagtggaagatgagtacggagatgagtactatgatcaagatgagtatgaggaggaaggttcgggtgctggggatgggtatgctgaggaggaagagcctacagagggacaaaaggagatccttgaattgagagaaagattaaaagagcagattaggcgaaaggcaaaggctgctgctgcctgcacagctggtcgatcatcttcttcacaaatacctcaagccagggacaaatttggctctttttttgggccatccaagccggtgatttctcgtcgagtgatagaagaaagaaaatcattgaaagaactgcatagcacggttgcaagggagccaaggccttctggagtacataaggatattccatcgtcctctaaagtgcaaagtagagtaaatggacatcagcataaacaaaagattgttaatcaggtaaagaagaaggctgaggcacttaaggataaccgggattattcatttctactctcggatgatgctgacctgtcatcctctccaaaggagaaacctgctgctagatcttccttgactcaaagggctgatcgtgaggtgacacaatcaacagtaaagaggaaggcaccaacaagtcaacctgcacgcttgtcaaatggatatggacctaagaacacaatgtcaactcaaaggcatgctgaaggtaaggtaaattccatgagaagggaggatttctcgaatacagaaagggttgtttcacgtgacaatgagaggatgtatgaaagggttgtttcacgtgacaatgagaggatgcatagtattgcaagaaatggatccaaccaggcaagtactagcaaaaccacaatccaaaagcatccaagcaggggtcccattgctaataagcaaccgtccaaggattcgaatgatgcaactctgaggaagagcagtgtagcctcaaagcaccatcccttagagattgacagaccaaaatcctcgcaaagtcagaggatgcagtcagctggtcagagaccacagcattcttcccatggtcagacgccacatcaatccatgcagcataggacgcagcagtcattgcagagtcggaggccacaacaaatgacacagggtcagaagccacaacagtctttgcagagtcaaaggactcaacagtccttgcagaatcgaaggccacagcagtcctcacatattcagaaatcgcaatcctcacaagcacacagaccacagtcattaagtaacaggtctcaggctttacaaggacaaaggcctctttcttcacagggtcaatatccggagcaaagaagagtacatgcaagtgacagagtcaaacaagctgaaaggcagattcggcctccttccaagtccatgccatcacggccagtctcttccaatggaattcgtgatgatcatgcaaaaaggaagcaagtggcaaaaagaagatttgatgaagatgatgaagaccccttagcaatgatcagaaatatgtttgggtatgatcctagtagatatgcaggcagagatgaagatgtcagtgacatggaagccgattttgctactatagaaatggaagagaaaaggagcgcgaggattgctaggcaggaggatgaagaacaacttcgcttgattgaggaagaagagagacgcgagcaggagagaaagaggcgaaagatggcacgaggccgatagtcgaatacactcctatttggatgttataatatactaccttcgttctcgaatatttgtcgtccgctggttcatttttgaactaaaccgtgacaaataaaaaagaacgcaggagtatctggcaggcctgattgcctgaatacgaagccccatggcggatcagacaggcacttctcttgcagtcctgtttacccttaccacgatgattatctggaggcaaatcaagggaaaacgacaggtgaccaacactgggcacgtgtaacagcagactgtagttgtagtggtttagttctcgaagctgacatggactatatttaagttctcgtcagattgtttggatagcagaaggtttccattgttgcagcgcctcaccagattgtttcttcatatgatatactgattctttcagtcaagcctatataaggatgcgtaatacaagtgcccctcttgtatatctttttcgggtgtaatagtgttgtaataaacgatgttcgaattttcggatatgattttgagctttgtcaggcgatcactgcaccacggtccacagagatgcgcttctggccgggagccaatcgaaggaagcgggaa

SEQ ID NO: 17599 - DNA, 466 bp, Zea Mays
cgcgctcgccgcgcttgaggctcgggtgcgcctccccgctcgctgccctcgtgcctctggcttctgcaccgccgtcggccagggagacacaaccgacctccctctccgccaggtggcctacgacgcccatgcgtccctggggaacccgtggccactccaggccgaccacgcgcgttctctgcactgctgccggcagcgtccaaagagaggggaaagaactgctagttcagcatttgcttgttggtgaaaaggatgtcaggcttctggttgatctcgaaaagaatatcattgcaggaggagtagacttgagtgatttagccgtggagcactccttatgtccatccaaagcaaatggtggtatgcttggtgggtttgaaggcgacagatggtacaacattaactttgtagctatgatgatgtgtttccacatgcttgcttgtgtattgttttcactgatatattaaat

SEQ ID NO: 17600 - DNA, 4642 bp, Zea Mays
cgctgccgtcgtcgcgccggcctcgatacgttcccgggaagtcggaggcgccgcgctcgtcacgccgccggctccgacgagatggaggatggcgtatctacttatactgtggatgaggcacttgtgtccatggggtttgggaaattccatgcattcgtgcttgcatactctgggatggctaaaatctctgaagcaatggagatgatgcttttgtcatttgttgggcaatcagttcaagctgagtgggggctttctgcacatgaagaaagcctcataacaagtgttgtctttgtggggatgcttgtaggagcatatgcttggggcatagtttcagataactatggaagaagggttgggttcaacttcacagctattgttactggaggagctggccttcttagcgcttttgctccaaattacttatctttgattgtactgagatttatggtcggtgttggactgggtggtgggccagttttaggttcttggttcctagagttcatccctgctcctaaccgaggaacatggatggttatgttctcagcattttggactgttggcacaataatggaagcttctcttgcttgggccgttatgccagcttttggctggaggtggctgctggcactctcatcattgccatcgtttgccctgctactcttctacccagtgacacttgagtcaccaagatacctatgcatgaagggtagaatagctgaagcagttcatgttctggaaacaatgtcacgcgtgaactgtgtttctctcccctctggccgacttgtctctggccatcgggtggaacttcatgatatcggggattcttcagaaacggcacagttggtgacatctaataagaataacactgctgatcgtggtagcaaatccgagattggaggcctcagtgccatcttaaagcttctatctccaaacttaatcagatcgactcttctactctggactgtctttcttggtcatgcctttctgtactatggtcttgttctactcacatcagaactaaatcatggaaataggatctgtggatcagaagagggggcagaagtgacaacaacagcccacatacatgatgagaatctctacagaaatgtatttataacaagctttggagaggtccctggtcttctcctgtcggctgccattgttgacatgatcgggcgcaagctctcgatgtcttccatgctttacatcagttgcctgtgcatatctccgcttatgttcgcccagacggaatcgctgacgaccatctttttgttctgtgcccgggtttgcatctctgcaagcttcactgttctgcacatctacgcccctgagatatacccaactgctgttagggccacgggtgtcgggtttgcaagctcgattgctcgctttggtggaatcctgtgccctctcgtggccgtcggcctggtgcacgcgtgccaccagatggcagctatcctgatattcatcacggtgatgctggcttcaggcatcgccgtgtcatacttccccctggaaacaagcggccgaaagctgagcgaccacgtcgccgccgcgtaagagctgattaattgaagaactgactttttgagagggatacaccaatacagaatcaaggcccaaggggccattattttttttgttcagttgttgacaaaggatacagtgggaaagaaagtgcaaaggaggcactagattgttacgttattatactgttgcttctcaatagaaatctacagatcactatatgatttttgttctcttgtcaatatggtattagtatgaattctaaacgccctcaaaattcattttttgtttcaaaagtgaaacgtctttttatatatgaattgggaaactaaaaaatgaaattccgttgccgggactcgaacccgggtctttcgggtgagagccgaatatcctgaccagctagactacaacggattctgtttatgttgtgcatagtaatttataagattacgtagagctattcacagtaatggcttagcgacattctcgctgctgcaatggcgacggtctcgttccatcactgtcccccgtcattctcgctgctccaatggcgacggtctcgttccatcccccgtctcttcctcctccgtctcctaattttggaaaggccatagtttcccatcgcgagacctgtatccccatggatccatgagagaaaggcggaggagatcaggcgacgtacgcgcgtgggggtctcctcctgcacgctctcagctgaaccgccccgtgctcccctgggcgcgccgcgcgcaatggcccgacgacggcgccccctaccgccgccgctgctcgtctggttggccgtcctcttctctgcggtggcgcccgctgtcgccaagaccgacaagtctgacgttgctgcgctcaatgtgatgttcaatagcatgaacaagccatcgcaattgtccggttggaaatcgagcggcggtgatccctgcgatgacgatgacgagtggaaagggatagagtgcagcggctcatctgtcacagaaattaacttgtcagggcttgaactcagtggctcgctaggatatcagctatcaagcttgaaatcagtaaccaaatttgatctcagcaataacaatctcaacggcgatcttccatatcagcttccaccaaacgtggttgaattaaatctttacggaaactctttaactggaggagttccttattcgatatctcagatgggtgatctggaaacactaaatttgggcaagaaccacctaagcgggcagttgacggatatgttttcagaacttccaaagctctcaacattggatctctccttcaaccgcttctcaggcagcctgcccaagagttttcagcacctaaaagacctcaagacgctgaatgtggagagcaaccaattcagtggtcatatagatgttctagcgaaacttcctctcgaggatctgaatctgcagaacaacaagtttactgggtggatccctagtaaactaaaagacatcagcaatctacagattggagggaaccagtggtcgtccggatcagctcctcctggtatggagaagggctctgcactggagggctcttcaggcggaggtggtcgaagtggagtaaacggtatcgccatcgcagctgtggtgatagcggtgcttgttgcagctctgattctcttgtctgtgttgaagaggaaccgttcttcttcctcgtctcattacctcatggatgagtcagcgatcaacatgaagccactggagcattcatcgtcaattagcagtacgacaccgtctgcaatgcctatcaagccgattagtgacaacgagttcgagaacaaactaaactattcgaggcggagcacagatccagtcaaccttgttgcttattcatcatcagacctccaagcagccactggaagcttccatagtagcaggttactaggtcaggggacaatcggtggtgtttacaaggcaaaatatgctgatggaacggtgctggccgttaagaagtttgatccattgagcttctcgggaagcagcgacttcatggatcttgtgaacagcatttccaagctgcatcatccaaacatctccgtgcttgttggttactgctcagagcctgggcactacatgttggtctatgactacaacatgaatggatccctctatgactttctgcacttgtccgacgactacagcaagccgctgacctgggacacccgcgtaaggattgctgttggtacagcttgtgctctggagtacctacatgacgcgtgttcacctccagtgatccacaagaacatcaaggcatccaacgtcttgctcgatgctgacctcaaccctcacctcactgactgcggccttgcatacttctatgaggatccgagtcagagcctgggaccagggtacgatcctccagagtgcacaaggccatcaggttacgttatgaagagcgatgtctactgctttggtgtcgtcatgcttcagctgttgaccggccggaagccctacgacagctcgaagcctagagcggagcagtccttggtcaagtttgtcggtccacagcttcatgacaccaacgccttggaagctctggcggatccaggccttcgtggcctatatccaccgaaagcattgtcccgtttcgccgatgtcctctcccgctgcgtccagtcggatccagaactccggccatccatgtcagaggtggtgcagttgcttctccagtgcgtccagcgcacaaccagcaacaggaggctgggtggccaccgcaccgtctcgcagcgaagcgacgattctgattggtgatgctctgtttctgcctccatcctgctgctgcggcccagttgctgaaactgtctcagaacagaaccgtaggtgtgcggcccttggcatgccgctgtacaaaagaaaatgctttattagacaatctggttgctcgaacagtgtggcaacaaataagtcggttgatttaggtaaaggtaaaagcagattgggtgttctagtgagtagtgacattgtatttgtactcataaacttaaaaacatatgaccagctaatttttaaaaatatataaaccatcttagaacaactccagcagggcctctcagatccctattctacttttgagaatgcaagagccaaaaaaaaaaaaa

SEQ ID NO: 17601 - DNA, 1910 bp, Zea Mays
gcttcctccgttccatttccccacgcccaccccctcttcttcccatctcaactctctcccttcctccctctctctccagcgcacaaggatcttttcttcgggcagggacggccaaggaagcgcccgcggagagagatgatgctggcgatcctagcgaggcggcgtgccgcggaggccgtgctgcggcggccgcaggcggccttgtccgcctggagggcgtacgcggcggcgggcgaggagagcgatgtggtggtggtgggtggcgggcccggagggtacgtggcggcgatcaaggccgcgcagctggggctcaagaccacctgcatcgagaagaggggcaccctcggcgggacctgtctcaacgtcggatgcattccatccaagcaaagagttcttttgcacatcatggagtaaagttttcaaatctggaagtggacctcccagccatgatggctcagaaagacaaagctgtggcaggactaacaaaaggaattgaagggctctttaaaaagaacaaggtgacttatgttaaaggctttggaaaattgtcatccccctcagaagtgtcagttgacttgattgatggtggtagcactgttgtcaaaggcaaaaacataataattgcaactgggtctgatgtaaaatcacttccaggaataacaattgatgagaagaaagttgtttcatctactggtgcactgtgcttgtcagagatcccgaagaaactggtggtaattggagcaggttatattggccttgagatgggttcagtctggaaccgccttggttcagaggtcactgttgttgaatttgcgccagatatagtaccatcaatggatggcgaagtcaggaagcagttccaacgcatgctagaaaaacaaaagttcaagttcatgctcaagacaaaggttgttgggtgtgataccagtggagatggcgtaaagctgacacttgagcctgcagctggtggtgagcagaacatccttgaagcagatgttgtccttgtctctgctggcagaaccccatttacttctgggattgggcttgaaactcttggcgttgagacagataaagctggcaggatccttgttgataagcgcttcatgaccaatgtgaagggagtctatgcaattggggatgcgatccctggtcccatgcttgcccataaagctgaagaggatggtgtcgcttgcgtagagttcattgctggaaaggaaggccatgttgactatgacacagttcctggtgtggtttatacgcatccagaagttgcatctgttggcaagactgaggagcaggtgacggctctaggaattccctatcgtgtgggcaagtttccacttttggctaacagtcgtgcgaaggccattgatgatgctgaaggggtagttaaggtgatcgcggagaaggaaaccgataagattctaggtgtgcacataatggcacccaatgctggtgaaatcatccatgaagctgtcatcgccttgcagtatggagcatccagtgaggatgttgctcgaacatgccacgcacaccctaccgtgagcgaggccctcaaggaggcttgcttgcaaaccttcgataaagcaatccacatataatttctcattttctatttccttgccatccaaacttttggctcaacaagatccaaagtttatggtaattttgggcctgttggaacagaaggcctccagttgtccttttgttttgttggcaataatgtgaattctttgagttgcccacatcttatagtcgtttatgcttcattggcatggcatatccatccaaattccaaaataatgttctgatactatgttttactgtgtatgcccatgaaccattgatggatacatttcggacgttccagtatggccgtgttcgtgccttgatttctttttctactgttg

SEQ ID NO: 17602 - DNA, 3749 bp, Zea Mays
cgtcgcttgctcttccggctcacggcggtggtctccggccaaggggtcgtcacatacaaggaccagcgagatgggcggcgaggctgagcctgacaacgcggtgctcttcgttggggtgtcgctggtgctgggcatcgcctcccggcacctcctccgcggcacccgcgtgccctacaccgtcgcccttctcgtcctcggcgtcgcgcttggatccctcgagtacggaacacaacatggtctaggcaagcttggagctggaattcgtatctgggctaacataaaccctgatcttctgctggctgtttttctacctgccctcctctttgaaagctccttctccatggaagtacaccaaataaagagatgtatggcacagatggtgttacttgctggacctggtgtgctaatatcaacagttttacttggcgttgccgtaaagctcacttttccttacaactggagctggaaaacatcattgttgcttggcggactgcttagtgcaactgatccagttgctgtggttgcactgctaaaagaactcggagcaagtaaaaagcttagcacaatcattgaaggtgaatccttaatgaatgatgggaccgctattgttgcctatcagctattctatcgaatggtgcttggaagaacctttgatgctggctcaataataaagttcttgtctgaagtttcacttggagctgttgctctgggccttgcatttggaatcatgtcaatactgtggctgggctttatttttaacgatacaatcatagagattgcacttactcttgctgtcagttatatagctttcttcactgcacaagactcactggaggtctctggtgttttgactgtcatgacactgggaatgttctatgcagcttttgcaaaaactgcttttaagggtgaaagtcagcaaagcttacaccatttctgggaaatggttgcttacattgcaaatacacttatttttatactgagtggggttgttattgcagatggtgttctacaaaataatggccactttgagaggcacggcagttcatggggcttccttcttctgctctatgtctttgtacaaatatctcgagttatagttgttggtgttttgtacccgatgttgcgtcactttgggtatgggttggacttgaaagaggccatgattcttgtttggtcagggctgcgaggggctgttgctctgtcactatcattatctgttaagcgtaccagcgattcagttcaaccttaccttaaaccagaagttggaacaatgtttgtgttcttcactggtggcattgtgtttctgacattgatttttaatggctcaaccacacaatttttgctacatatactcggcatggacaaattgttgcccacaaagcttcgtatattgaaatatacaaggtacgaaatgctaaagaaagcattagaggcttttggtgaactaagggatgacgaggaacttggacctgctgactgggttactgtaaagaaatatatcacatgtttgaatgacctagactatgagccagagcatccccatgatgttggtgacgaagatgactgcatgcatatcatgaacttaacagatatccgagtgcggcttttgaatggtgtgcaagccgcgtactggggaatgcttgaagaaggacgaataactcaagttacagcaaatattctgatgagatcggttgatgaagctatggaccttgtttctggacaaacattatgtgattggaaaggtttaaagtccaatgtgcagttcccaaattactataggttccttcagaggagtaggttaccacgaaagcttgtcacatacttcacagtcgaaagattagagtctggatgttacatctgtgctgcatttcttcgtgctcacagaatcgcaaggcggcagctacatgattttcttggtgatagtgaggttgcaagaactgttattgatgaaagtaacgctgagggggaggaagctagaaaattcttggaagatgttcgagttacattcccgcaggtgctacgagtgctaaagacacgacaagtcacatattctgtgctgacacacttgagtgagtatattcaaaacctccagaagactgggctgctggaagagaaggaaatggtccatttagatgatgctctgcagacagacttgaagaagttgcagaggaatccaccaatagtgaaaatgccaagagtcagtgatcttctgaacactcatcctttagttggcgcgctgcctgctgctgtacgtgatactttgctaagcaatacgaaggaaaccctgcgagggcagggcacaacgctgtatagagaaggatccaggccaaccggtatctggcttgtttctattggtgtagtgaagtggacaagtcagagattaagcagaaggcattccttggatccaattttatcgcatgggagcactctgggtctgtatgaggtgctgattggaaagccatatatctgtgacatgaccacagattcgatggtacagtgtttcttcatcgaaactgaaaagatagaagagctgctccattcagatccttcgattgagattttcctgtggcaggaaagtgctctggtgcttgccaggcttttggtccctcatagattcgagaaaatgggaatgcatgagatgagggttctggttgctgaaaggtcgacgatgaacatatacatcaagggagaagacttggaagtggagcagaattgcattggcattttgctggaagggttcttgaagatcgagaacctgactctcatcacgcccccagcgttgcttctgccatggaatgctgacttgagcttattcggtctcgagtcctcagactactgccatactgcacgcaggtatcaggtggaagccagagcgcggatcatcttcttcgacgaggcagaggccgcccatcttcatgttcagacaagtgcgtcgctgccccaaggtgagccagcacggagcatgagcaaggagcacagcggcttgctcagctggcccgagagcttccggaggtctcgtggcagcctaggcttagcagctgagatgctgccgggcggcttgtcttccagggccctgcaactgagcatgtacgggggcagcgtggtgagcctctcctccggccagcagggtcaccggcggcagaggccacgtcatcgcgtgcaggcggccacgacgatgacaaaccagaagaagcacagctcttcctaccccaggatgccatccatatccaaggagcggcatctgctctccgtgcagtcggagggctccaacatgaagagagtggcagctctacctgaggttgctgccaccgctcctgctccggcaggggcagcacaggggcagcggagggctatgaacttgcaggaggaatacaactcgagcgaagactccgccggcgaagaagtcatcgtcagagttgactcgcccagcatgctctctttccgtgagtccaccgccgtgcctccgccccaggagcagtagctggatgcctggatgtggtcttctcttctcgtgtattgtattgtactgtatgtattgtatcagggaagctttggcgcagtggtgtggtgtggtgtggtgtggtaaacaaaataaataaaacacatttccgcgttccatattttctcttcatgatcaccgaataaataaaagaaacagagacaatgatgcggaagaaaaatgcgctctttctgtctggacccgccgccgcctcaacttacgagaccaacaaaaactgggtgcaacccat

SEQ ID NO: 17603 - DNA, 1597 bp, Zea Mays
cggaaccggaggcagtatgggatttggtgcccacaggaagtggagggagagcggtctccggtctcgcctccttcctcccgttcccgtcgccgccccgctcccgcccctggttttgccttgcctagccttcgtccgtctactacttgtcggaggcagcaaggtggcggacccgaggccggccagggtggtggacctatcgcccgtaggcgacaggtcccgcgcctcctccaagaagaaccgccgccgccacaagaaggccgacgccgcctcttccatctcgcccatgcagaggctcttcgacaccagcagggaggtcttcgccaactcctacccgggcttcgtcccgccgccggacgccgtcgcccgcctctcgggcctcctcaatgagctgaagcctcgtgacgtcagggttgccccaagcatgtccgtcttcaagcatgccgatcctacaagcccccctccagttacctatttgcacttctacggttcctccgagttttcgtttggtatcttctgtttaccgaaatcggcaattattcccctccacaaccatcctgggatgacagtgtttagcaagatactgtttggttccatgcacctcaagtcctatgattgggctaaaagtctgccggcgggtagcaacgataatgcacttgagaactctgatggagcaggagctcgtctggccaaggtgaacacagatgccgtttttgacgcttcatctgagaccgtagttctgtaccctgaaaatggagggaacttgcactgctttacggcgctgaccccttgtgccgtgctggatgtgatgggccctccctacaaccgtgctcaaggaagggattgcgcgtattacagcgaatcgccctactcgtgtgctggagatgcacaatattcttggctcaaagaggttcacagcacatttgagatggaaggcataaagatggagcccaacttcatcgtctaataattaagcaggcatggcatggcatgtcatcgtaatgctgctagtttcatgtagataatctctagctgcgggggtgtagtacaactggaagacggccagatgctcttttgacattcgtttgccttaatttcatatgcctccctttatgtatgttaacaattcgaatcttgggtcatggtcactttttttctgttttccctgtagacagcaggtgctactttttgaagtgatcatggaccaaattctgtgggtcgtttggttggtttttgttgagcagcagaacagtcttcaactttctgcctgccatcgtgtttcagtttcagggcccatgccttgtgttttctctttgaatgaacaaagaactgtctctagcatagttataaatggatatggtccaggcttccaaatcaggagctgtgaggtgatggggacggacgtagttgtgtagtacgggggtcaggtcaggtccggccggacgatgttcttcgttgcagcgtactctctgttggctgcaccgcattagcgcaatgattcggtctgatttgtcatactttttaacctacaaatgttatgcattagcaatggttttagataaaaaaatattaacaaataaaaaaaattagagaaatctcc

SEQ ID NO: 17604 - DNA, 1440 bp, Zea Mays
ttgtgcacttgtgcctatggaaaacaagaaagaggagtgtctgtgagcgatttacggaaattgtaggcagtccatactacatggccccagaggttctgaagcgaaactatggccctgaagttgatgtctggagtgctggagtgatactttacatacttctttgtggtgtaccaccattttgggcagaaaccgaacagggagtagcgcaggcaatcatacgatctgtggtagatttcaaaagagaaccatggcccagagtatctgagcctgctaaagatcttgtcaggcgcatgcttgacccaaatccattgacacggtttactgcagcacaagtacttgagcatccatggctacatgactctaaaaacacgccagacgtttctcttggcgatactgtccgagcaagactgcagcaatttgctgcgatgaacaagttaaagaagaaagcactaagggtgattgctgagcatctgtctgcggaggaagtagctgacataaagcaaatgttcgataagatggacgtgaacaagaacggcaagctaacattcgaggaattcaaggccggcctccgtaagctgggaaaccaaatgcatgattcagaccttcagatactgatggatgctgccgacgtcgacagaaacgggaccttagattacgaggaattcgtcacggtgtctgtccacgtgaggaagataggcaacgacgaacacatccagaaggccttcgcatacttcgaccggaataagagtgggtacatagagatcgaggagcttagagaggcactggctgatgaactggatggcagtgatgaagacatcatcggtggcatcatccgggacgtggacacagataaggacgggaagataggctacgacgagttcgcggcgatgatgaaggccggcactgactggaggaaggcctcccggcagtactcgcggcagcggttcagcaacctgagcctgaagctccagaaggacgggtccctcggcgccgacacacggtaggccgccgagtgtagtggtggtgctggtgttcgtccgtctctttgcttgcttgcttgttttgctgtgcggggtttttgttggttggtcagacagtcagtcaggtcattagattccacctccacgttctgtttccattacacggtgaaccctcagctggagctgtgattcttgggcttgtgattgtagaagaaagatgcacgtacaacgtacgtattgtagatgggtgcagcagcgtgtgctgacaaagaatgctggagtagcacaagacacgagtagtcttgctttgcttgtaacttgtaagtagaatttgttttgtgtgcttgcaatgcatgacgatggtgattgccctgcaaaaccgtgtgaatgcctgcacgcaagctgctcgcgtcgcgaccctcgctcttgctggctgtaaagaaggacggtgtggttttag

SEQ ID NO: 17605 - DNA, 953 bp, Zea Mays
tacgtatccaaatttgtctgcaggttggcgcctgggcagctgaagcccgtggatgggctgcaggagctgtgcggatggatggaaggccgcgacctgaagcgcgcggcggtgacgaacgccccgagggcgaacgccgagctgatgctgtcgctgttgggcctcaccgacttcttcccggtgctcgtcatcgggagcgagtgcgaccgggccaagccgttccctgacccgtacctcaaggcgctccagctcatcggcgcatcgcctcaacacaccttcatatttgaagtacggatgaagctctctctctctcatcgtaattctgtgaagaagctttgttgtttgtttcatcgtcgctagtcgaaacagtcagtgaccaacggtaatgctgtctgtgcgtgttcgtgcatctcgttctgccgcaggactctgcatcgggggtccgggccggtgtggctgccggagtgcccgtggttggcctgacgacgaggaaccccgggaaggtgctgaaagacgcaggggccagcttgctggtcaaggattttcaggacccggagctgatgtccgtgcttcaacaggtggaggtcgaacccgcagcggcgaatgcgcaaggctgatgcgtcggtcactgcggacaactaagaaatgaaatgtcgtgctggactagccttcagcgattctttcagagtggaatagctgtgtaactgcatcgtgtaataaactaactccggtcggttcctcggctggaacctggagactagcttcttggtggattcaaacagggcccaaatagaccctaagttaagggaggtttcctgtgcccaacaataatgccttactagtaattagcgcgcgtcttacgcgcgtaaaaagaattcgtaatttaagtgataataatattatattattttaaataaaatgtacataaatattttataatataagtgataattcag

SEQ ID NO: 17606 - DNA, 3240 bp, Zea Mays
tgcacgcataggcgacgccttttaaaccatggtcgtcccacttggtgtagtccagagagtggctgaagctattttagtgccatcattatatgagaaaaacgggtttagtagggtcattcttaaagcattgaagggccttgctctcttccaccaaagggttatagcgttacctcttccacatcggccactctttcctggattttacatgccgatctatgtaaaggaccaaaagctgttgcaagccctaatagaaaatcgcaaaagatcagctccgtatgctggtgcctttctcgtgaaagatgaagaaggtactgaccctaacattgtgactggttcagattcagagaaaagcattggtgatctcaaagggaaagacttgctgaagcgtcttcatgaagttgggacgcttgctcagattacaagcattcaaggggatcaggtagttctacttggtcacagacgtttacagataactgagatggtcgaagaggatccactcacagttaaagttgatcatctaaaggaaaagccctacaacaaggatgatgatgttataaaagctacctcattcgaagttatatcaactttaagggaagttctaaggacaagttccctttggaaggatcatgtgcaaacctacacacagcacattggtgacttcaactaccaacggctagcagattttggtgctgctatctctggtgccaacaagttgctttgccaggaggtgcttgaggaattagatgtatacaagcgtctgaagttcactcttgagttagtaaaaaaggagatggagattagtaagctacagcaatccatagcaaaagcaattgaagaaaagattagtggagatcagcgacgttatttgttgaatgaacaacttaaggcaatcaagaaggagctcggtttggagactgatgataaaacagcattatctgcaaaatttagggaacgtatagaatcaaagaaggacagatgtccttctcatgttttacaagtcattgaagaagagcttaccaagcttcagcttttagaagccagctctagtgagttcagtgtaactcgtaattatttggactggctgacagtattgccatggggaaattatagtgatgaaaactttgatgtccaccgtgctcagaaaattctcgatgaagaccattatggtttgagtgacgtgaaagagaggatactggaattcatagcagttgggaagttaagagggacttcacaaggcaagatcatatgtctttctgggccaccaggagttgggaaaactagtattggtcgttcaattgcacgtgcactgaaccgccagttctacaggttttctgttggaggtttggctgatgtggctgaaatcaagggccatcggcgcacgtatgttggtgcgatgccagggaagatggtgcagtgtcttaaatcagttggaacagcaaatcctctagtattgatagatgagattgacaagcttgggaagggtcattctggggatccagctagtgcattgttggaactccttgatcctgagcagaatgttaatttcttagatcactaccttgatgttcctattgacctatccaaggttctattcgtttgcacagcaaatgtaatagagacgataccaaatccgttattggataggatggagatcattgctatagctgggtatataactgatgagaagatgcatattgctcgggactatttagagaagaatacaagacaagcctgtggcattaagcctgaacaggttgaagttacagatgctgcccttcttgctcttattgaaaattattgtcgagaagctggagtgaggaaccttcaaaagcatattgagaaaatttaccgtaagattgctctccagcttgttcgccaaggagtatcgaatgagccagaccaggagtctctcggtgtcactgtaaatgaggaatctaatagtggtgatagcatcacagcaaaagatgagattgtgaaggatcctgctgtagaagatgcttcagtcgccaacaatgttacaaatcctgcctctgaggaagctaatgaagtaaatttgacaactgaagcaccaaaagaagacagcacatctaagggcaacaagaaaacagatggagtagcagaagatgcagcagacaaggcaactgagaaggttgtggtagattcatcaaaccttggtgattttgttgggaaacctgtgttccaggctgagcgtatatatgagcagactcctgttggagtggtcatgggtttagcttggactgctatgggtggttctactttgtacatcgaaacaacaaaagtggaggaaagggaagggaaaggtgaccttgtgctgacaggacagcttggagatgtaatgaaagagagtgctcagattgcgcacacagttggcagaactgtattactggagaaagagccagataatcatttttttgcaaactcgaaggtgcacttgcatgttccagcagggtccaccccaaaggatggccctagtgctggatgcaccatgataacgtctatgctgtcgttagctatgggaaagcctgtcaagaaggacctcgcaatgacgggtgaagtaacattaactggaagaatcctcccaattggcggggtgaaagagaagacgattgcggcaaggagaagtgcgataaagacgctcatatttccggcagcgaataaaagggactttgacgagcttgcttctaatgtgaaggaaggactggaagttcattttgttgacacatacagtgaaatatatgatttggctttccagagtgacgccgggactgagatgatttagctttacattacaggattgagattttttccccttctctagatctggttacaggctaaataccaaagaagtttgtcagcagaggcagaccattgtaaccaagatgagtggagttaattgatatttacgagaaagaaaaataatatttctttttttggccccaatataacatcattgaatctaagagatttatttggctaggctgtacgtaactagtgtgctaggtggtggtattggccttttatattgttgggacttgggagtgtgggaaaaacagtactggtgcaccatctgttatttattttaagtgttttccaaaggcagcaaggtcatatacctcatatcataatttagccacaaatggcctgaatattttgtattttggtcatttttttttcgaaaaaatcacatttagacccctaaaccacttaattctgtttttg

SEQ ID NO: 17607 - DNA, 2838 bp, Zea Mays
atcgtaggtggttggtttgcgtgcgtgtcgtgcaattagcctacttcaacgacaggatcttcttcgagacgatctcgcagtccgcgaatctggaggccatcaagatgaagctgtgggagcagatcagcggcaacatggtgctgggtacatacaaccagatcccagaatggcagctcaagctaggaccaagggaccgaggacccgtccttgtgatcctcgacgatgtttggtctctcccgcagcttgaggagctcatcttcaagttccctgggtgcaagaccctagtcgtatcaaggttcaagttccccacgctggtgaaacagacgtatgagatgcagctgctagacgaggcggcggctctgtccgtcttctgccgcgctgcgttcgaccaggagtgtgttccgcagaccgccgacaagagattggtcaggcaggtctctgcagagtgcagaggtctccctctggctctgaaggtcatcggcgcgtcgctgcgcgaccagcctccgaagatttggctcagcgccaaaaaccggttgtctcgaggagaggccatttctgactgccatgagaccaagcttctggagaggatggcggccagtgtcgagtgcttgtccgagaaggttagggactgtttccttgacctgggctgcttcccggaggacaagaagatccccctcgacgtcttgatcaacatctggatggagatccatgaccttgatgagccagatgcttttgccatcttggttgagctttcgaacaagaaccttcttaccctcgttaacgatgcacagaacaaggctggagatctgtacagtagctaccatgactactcggtgacacagcacgacgtgttgagagatcttgctcttcacatgagcgggcgtgacccgctcaacaagcgcaggcggttggtgatgccgagaagggaagaaacacttccgagggattggcagaggaacaaggatgctccgtttgaagctcagatagtctccattcatacaggcgaaatgaaagaatccgactggttccagatgagcttccccaaggcagaagtgctgatcctcaacttcgcgtcgagcctgtactacctgccgccgttcatcgcgacgatgcagaacctgaaggccctggtgctgatcaactacggcagcagcagcagcagcgcagccctggacaacctctccgccttcaccacgctgagcgggctgaggagcctgtggctggagaagatcaggctgccgccgctgcccaagacgacgatcccgctgaggaacctgcacaagatctcgctcgtgctctgcgagctgaacagcagtctaagagggtcgacgatggacctgtcgacgacgttcccgcgcctgtccaacctgacgatcgaccactgcatagacctcaaggagctgccgccgagcgtctgcgagatcgggtccctggagaccatctccatctccaactgccacgacctcaccgagctgccatacgagctggggcggctgcgctgcctcagcatcctccgcgtgtacgcctgcccggcgctgtggcggctgccggcgtcggtgtgcagcctgaagcggctcaagtacctggacatctcgcagtgcatcaacctgacggacctccccgaggagctcggccacctgacgagcctggagaagatcgacatgcgcgagtgctcgcgcctcaggagcctccccaggtcgtcgtcctcgctcaagtccctcggacacgtcgtgtgcgacgaggagacggcgctgctgtggcgtgaggccgagcaggtcatccctgacctccgcgtgcaggtggccgaggagtgctacaacctggactggctcgcggactgatgtctcgttcctggatggatgctgcggcgtccaaactgaccttgtacatatgtgatgttgcttccccccaaaccgagcgtagggaaactcatcaatccacctgccaattttgacgtgttcagtcagtgttcgtcatgcatccatccactctttattcttgggtggcaaagcctccccttcatccaaaatacaaatgcacacaaaacaaataaccacagaaaacacaactgtacaaaaggctaaagatacaacattccgatttttcagctgcagcaatgccagcaaagagaggccaagcagggttctcaaaatgcaggaactacataggtacacagtggatagctgtacagtaacgaactaaggatcaacggttagaatcagcaatggcgtcaaaacgatcaccatgcaacagcttgaacaccgatcacttcttaagcttgagctgttcgtccagagcatcagcgagtacttcttaaacatgacctgatctacagtttccaccccaaccgttcgtggttacgtttcacatactatcactccactgctcccgatgtcgaggactcgaggtccaggtccatgtcgtcgtcaaggacgtcgtcgatgcacagaaactgggtcgtccagcgggcgccatcggccggcactgttgtctccgccatgctctccgactcctcgtagttcactgtgccgtcgcccatgaggtcagctgggaggttcctgacgaaccaaggatgactctttatctcaggcatcgtcgtgattctctgcaaagagcatgcgttatggcacatcgatctgaaagttctgaacaatcaaagtgactgacgctgcaaaggggaataagctagtatggcatcattcacatctgctgggttggccaaaaaaaaaaccttcgcattctggagatacgcgggcgtagtcaggaaccgcgtaccgaacacccagtatattattctgcaaattggcatcggcatttagatgactagattttggatat

SEQ ID NO: 17608 - DNA, 972 bp, Zea Mays
accgcaccccggccggctcagctagtcagcatggcgggggagacggtgctggtcaccggcgccagcggcttcatcggctcgaccctcgtccgcctcctcctcggccgcggctacaacgtccacgccggcgtcctcaaccccgatgacggggcggagacggagcacctgctcgccatggccgctggcgctggcgctggcgagggccgcctccgcatcttccgtggcgacctccttgacgacgccgcgcggggctgctcgggcgtcttccacctcgcgtcgccctgcaccgtcgaccccgtcagcgacccccagaagcaactgatagtgccggcagtggaagaacgggtgacccgccggcgatctccgcgacgagcgctgctggactgacatcgactactgcaagaagaacggggtttggtaccctgtttccaagacgctggcagagaaggcagcgtggaggtttgcagaggagaacgggctggacgtggttgtggttaatccaatgtctgtcctgggccagataatcccaccgaccatcaattctagcatgtccgtccttctacgcctccttcaaggctgcacagaggagtacaaggatatctggatgggggtagtccacgtggaagacgtcgccttggcccatctcctggtgttcgagaacccatcagcttccgggaggcacatctgcgccgagtccatcagtcacctgagtgacttcgcggccaaactcgccgagctctaccccaacaacaaagtgcccaagttccccaaggacacccagcctgggctggtaagagcggaggcgggagtggcgtcgaagaagctcgtcgagctagggctgcagttcagccctctggagaagatcatcagggatgccgtggagagcctcaagaccaaaggttgtaactagtaacaaagatgtctttcatgaaccttaataattgacaatttgtaattctggaaaaagaaaat

SEQ ID NO: 17609 - DNA, 1469 bp, Zea Mays
cgccatctctccatccttctcctcctccctggttcagatctctcatcgtcccccgctgcattccatcccgaccccgtttgccactggtcacaccctctccatcgcttcctgccaccgaccacaccctctcgatcgccattcgccaccggccaaatggaggccatccggaagcaggcctcaaagttccgggagcaggtggctcggcagcagcaggcggtgatgaagcagttcgggggcgggtacggcgcagacggcgtgttcgcgaacgaggccgaggcgcaacagcactccaagctcgagaagctctacatctccacgcgcgccgccaagcacttccaaagggatatagttcggggcgtcgagggctacatcgtcacggggtcgaagcaagtcgaaatcgggaacaagttatgtgaggatggcaagaagtacggcaccgagaacacttgtagcagtggaagcacactgtcgaaggcggcgttaagttttgctaaggcacgatccatgatggaaaaggaaaggggtaacctgctgaaagcccttggcacacaggttgcagaacctctgagggctatggttatgggagctcctttggaggatgctcgccaccttgctcaaaggtacgacagaatgcgtcaagaagctgaagcgcaggctattgaagtttcgaagcgccaaatgaaactaagagaggcgtctggaaatagtgatatggtttcaaggctagaagcagctgagtcaaagctgcaagagttgaaatcgaatatgggggtattgggcaaagaagctgttgcagcaatgactgccgttgaggcccaacagcaaagattgaccttgcagcgtcttattgcattggttgaatcagagagaaactaccaccaaaaggtcctacaaattcttgatcaacttgagagagagatggtatctgagcgccaaagaatcgaaggagcacctccggtggttgagagttccatgcctccaccgcctgcatatgaagaagtcaatggtatattcatgagaaatacagttgcagaattggtcgagactgtggagtatttcttggctgagtcataccaagccgaaagcgataccgagctcaacctttcaactggtgactacatagtggtccgaaaggtgtcgaacaatggatgggccgaaggtgaatgcagggggaaagctggttggttcccctacgactacatcgagaaacgggagcgtgtgcttgcaagtaaagtcgcccaagttttctaagtcttccgctgagccatgtagtatccccggggttgtacaatgtgtgttgtttatgcttgtcatcttcagagaatcagaggagatctgtaatttttgctgaaagctgcctgttgggtggtttgtttctgcctggccgcctcaattgttcaaattcatgtggcaggaactgaatatattcattcttcagttatcctgtctatatatatatatatacatat

SEQ ID NO: 17610 - DNA, 1416 bp, Zea Mays
attgccacatctgcggatctgccgcactatgcttgcagcattagaaatgctgaaggtttctgtcaaagaagacaacggcaatgagtcttctgttactgttcggttgtatggaccaaatacggacttggtgattgataggaaaagggaattgcaggcgataccatatctctcagctgcagggttcggggctcggctacttggaatatttgagaatggagtagttcagtcattcatctatgctcgaacactgtcaccagcagacatgaaagaacctaaaatagcagctgaaattgccaaggagctacgcaaattccatcaagtagacataccagggtctaaagaaccacaattgtggaatgatatattcaagtttttgaagaaagctgcagcattgaagtttgaggataacatgaagcagaagagatatgaaaagatctcatttagagaaatacaagatgaagttcaagaacttaaggatctcttggacattctgcgcgcgcctgtggtttatgcacacaatgacttgctttcaggaaatctgatgctcaatgatttggaagggaagctatattttattgattttgagtatgggtcatacagctaccgtggctatgacattgcaaatcatttcaatgagtatgcaggatttgattgtgactataatttgtacccagataaagatgcccagtatcacttcttcaggaattatctacacactgatagacctagtgaggtggatgcacaagatatggaagtactttatgtggaaacaaacactttcagactagcatcgcacatttactgggcattatgggcccttattcaggcaaaggtatccccaattgactttgactatcttggatacttcttcttgcggtatggtgagtacaagaaacaaagggagtcctgcttctccttggcacaaagctttctctccgagctaaaaaatggctagagcctgagaatctgttcacgagtttatactggtgtacgcatgctcggagcgggtacgcgttgtgatcatcgactgctacccagaaactctattatagcggttgtagcagcccctcattgttgtatctgatgttaggttcatcattgtctaaggactagtttggatactctagtatcgagctcaattcatgtgtatgagatggattcgggtgtaacttaaactaatttacacactaatccaactcaacacatgtggattggggtcaatactaaattacccaaacaaagcctaacagggaagtcaccagtggcaaattatgtacttatatttataataataaacacaatcctgatgggttgtgccctgttgaatttgttcttcgattaattctgccctgtgcaatctgttctgcacttccgagtatatagtttttaatgactgggtagtcctttgaaggtccg

SEQ ID NO: 17611 - DNA, 2281 bp, Zea Mays
atggactccatggtgtttgaggttgctgaattggatggagcaacaatgatttgtcacactaacagtaaaatgaaagggaggttcgaagttttgttcctagccttccttgtagcgttgaagatgatgagagatcaaagaagaaaacagtcagagccattttggtcttcaatggtgatgaaaaaatggctaaacatcaggccgaaattaaatgatttcagcgaagacgagtttgatacaggcagtgaggatagtgacggtactaactctggagatgataataacttctttgagatacatggaaatctcaaatacatgattagcaaatcatcaggagagaaaacaattcctctgcgaagtcttcagagaaggaaatcagagagtttacgtgttaactacatcagtaacaaagatggtgatgataggtacatggaatgttgctggaagagtgcctagtgatgaccttcgtcttgatgagtggctttgtacacaagagccagcagacttgtatgttttaggtttccaggaagttgtcccactaagcgctggtaatgtgttgggagcagaggacagtagaccaatacggaaatgggaagctcttatccgccaaacacttaacagttctcagcaaaccaggacaatctgcaaaagctacagtgctccactctcgccattactaaggcctgttgcttcaggcgatgggaaatccaaacctgaagatagagtgacaggaagtttaactcagcttagagattggcaaactagtaagagtgagcttcattgcagctggttcgatgggaccagttcattggactggccagaatatccactcgacactccatcaaaggttttggtgtcaggtacaggcttgaggcgagtcatgagtttggggttatttagctccaactttgtgggaaaccctcgaggtcttgagctccaggatgtagatttgcatgctgggatgagaaggcagtatcatagctcgggaaatcttagcatgttatggtctgaacagcaggagaagcttgatgttttaaattcacttgatcgcttatctgatttggcgtcagaagaagactcaacttttgaagacaccgttgagggctgtgctactcttgggaaaagagaatcttccgtgcatcgtgcaaattatgtgcgaattgtcagtaaacaaatggttggtatacatgtttctgtatgggtttcccgaaaactgaggcgacatgttaacaatctggaggtatcaccggttggggttggactcttgggctacatgggcaacaagggatcgatttccatcagcatgtctcttttccaaactcgattgtgctttgtctgctctcatcttgcatctggtcataaatcaggagatcaacaaaaaaggaatgctgatgtttacgagattttacaaagaacaaggttttcttccttgtttgctgctggtcgtccacaaaagattccttctcatgatcggattttctggttcggggatcttaactaccgcattgacctgccggactctgaagtgcgatatctggtgggtatgaagaagtgggatgaccttttgaagtctgatcagctaacgaaggagctagtaagtgggaatacttttgttggttggaaggaaggcttgattaactttccaccaacttacaagtacgaaaggaatacaaccagatatgttggcgagcttcataatgaggaggagaaaaaaagatctccagcatggtgcgatcgtgtgctatggtttgggaagggtaccaaacaactatcatattggagctccggtctgaacctctcagatcaccggccagtcagcgccgtcttcttggttgaagttgaagtgttcaatcaacaaaaactcgagagggtcttgaacttcaatcctggatttgtttcaaatggggattattacatgatggcagatccttaaaacttttttttttgagccagtggcattgtgcggggtatataaattttgcagtgattcttctgtaggatttagtcctgccattgtgtgaattgccacagtttttttggggaatacaccgataattcgggtaaggatttctattatgttggggccacgggtatcatgtcactgaagtacgcctcgttacattgcacatggaaatactcttaattctcaaaaatccttgagagacgagtgttatctactctactagactactactactattatctattacttgtgtttatgtctataatgttggtttatattggacttgcacacctatttactactttaatactattatcccta

SEQ ID NO: 17612 - DNA, 177 bp, Zea Mays
cacggacgcaacgaatggtggcaaccgcagccctcctgtgatccgagcgaggaacgaggcagggagagagtgcgagaggaggaagagggagagggggcggtttctcctctcctaggtcgtgggcgcgcgcggggaggggagggggcagttgggcgcgcatgggggcggctgggccgc

SEQ ID NO: 17613 - DNA, 1169 bp, Zea Mays
ataggcctgtcatacattcactgtcattcagtgaggttatttcaaatgatcaaatccgccagatgcaaattgaatcagctggccaagtattcagggttctctatgaacccatcaagaaacgggatactttattaagggaagagatcgactactcaggcttgtcatcaaatttcctatctcctagcatgatcgcagctttaacagtgctttatatggataagcatcaaaacactgcatgccggaatttggtggtagaatcagaagctaagaaatctcttgttctaccaacgtggtcagggttccatgcatgttgttcatgcacaactggagtaacaaggcaacaagcaactggttatgtttaagcttccacttctgaagtggtatcagggtcggtcagcatcatggtatcgcaaacagatttggtcatcctgttggtgcagactcttctacggttagaatttcctagatggaacaggactcggggagtgtgactagatggtacagtggggcttcgaaagtaataatgaactacaagatttttttcttctgtgtttctgatttctttcagattctgcagtggctaggcagactgtacgctagcagtcgtctgctcctgctttttagcaaggggggatatgagagatgtcgttataatgaagcgcatatcgagatttctgttgtcctgacggatggagaggtaaatcctccaaatacccccacgaagtttggtaacgaatcctgatgtacttactagtctgcaagcctttgttattgtgtgggcagtataattttgtggtcgacctgacattgggcaatggtaaggtggaaactggtaggactgcagtttcctgtcaaaggatttttcaaaaagaaaatcaagtggatgaaacatggattcccacgtcgccagtggtacgatgacgtcactcctgaggtcacgcaggtggtgggccatgtggcgtcgaatgtattttgaattcttattttggtttaaaagttggaagagctacaggggcagtgggctcgggtaacatctctgttgttccccaccccaattggaatcccattcttggaatcttcgtaaggaaggcaaccgtttcgcatttgtttgatggattctcattctgtactcggcatttgtttaatgtctatactgagaaatctttact

SEQ ID NO: 17614 - DNA, 802 bp, Zea Mays
cacacgtctgcagctgcacgatagcgccacatatcgtccctccttgttttacagcttcaactttcacggactggtcgtcagttctagcgcttcatacacctgtcctgtggacttggaccttggaaactacgaacgatttctggacatcaagctgactcgtgacaacaacataaccacggggaagatctaccagtctgttattgacaaggaacgtagaggggattacctaggaaaaactgttcaggttgtgccgcacatcacagatgaaatacaagagtggattgaacgtgtggcaatgaatccagttgatggcacagaagagccagctgatgtttgtgtcatagaacttggtggcactataggggacattgaatcaatgcctttcattgaagcattaggtcaattttcataccgtgtagggcctggaaacttctgcttggtgcatgtcagtcttgtaccagttttaaatgtggttggtgagcagaaaacaaagcccacccaacatagtgttcgcggacttagaggacttggactcatgcctgatattttggcatgccgtagtacacagccacttgaagaacatgtgaaagtgaagctcgcacaattttgtcatgttccgatatcaaatatcattaatctccgtgatgtaacgaacatttggcacatccctttgttgctcagagaccagaaggcccatgaagctattttgaaagtgttagacattcagtgtgtgggtaaagttgctcgagaaccccagttgtctgaatggactgaaagagccagcagatgtgacagattgaaa

SEQ ID NO: 17615 - DNA, 2537 bp, Zea Mays
gaaaaaagggaccagagggccggaagcccggaaccaaaacctagacgaaccacacaggcagtcaggcacagcgcgggccggggagatagataggcagacaggcaggcaggggggcgacggcacggggcggggctagccaaccagaccaacccaaaccctagctcaccgctcgttccattccaatccatggaggtggcgctatgagccgccgccgggacggcgggacgtggagctggtgcggccggggaagacgagtcgaggatgacggccagatcggacgatcccggcgtctcgccagggacgtcggcggcggctggcggcgagatctggggcacgtgggaggagctcctcctggcgtgtgccgtacggaagcacggtaccgccagctgggactccgtggccatggagatgctgtcccgctgccctcccgccgcggccgacagcctcacgcccgctgggtgccgcctgcggtatcgcctgctccaccgccggttcaccgccgccgccgccgtaaacggtgacgaggagcccgacgcggcctccgccgactgctgcgtggaggagctccgcaagctgcgcgtcgccgagctccgccgcgaggtcgagagatacgacctctcgatcgggtcattgcaatctagagtggaaaggcttaaagaggagagagcgaggagcatctccggcgaggccaatccagtaccggcggtgaaggaggacggcgaggaggagccggcggaggggaggaaagaatctctggaggaggagggcgacgatgccggcggcggggaggaggatcgtgtctccggcggcgagtccgggcggtcgtgcaaggagtccaactcgtcagatctgaagcggccgcggccagcgcgagacgccggggacggcgacgcggcggcgaggagggaggacgagggggcaggagacgccgcccgcgagtcgtcggctgtgaagcgcgagcaggtctccggtgagtcggtggttgggtccaaggacacggtggcggcggctgacacggagaaggagagcagcgacgtgcagagctcggccagcccgtcccgtcgccgcgagcgggagatcggcgccggcgaggacgcggatgtggcctcagcgccgccgccgccagcgcccgcagcggcggtcctccccgctgcggaggccgaggcgttgcgcgcgttcctcgaggtggtgcgaaccagcaagccgggctccgtgttcgagcgccggctcgagagccaggacgacgcgaaatacaggtgcaccatcaggcgccacgtggacctggagacggtgaggtccaggctggacggtgggtccggcagctacgcctcggcgaccgagttctaccgcgacctgctcctgctgtgcgccaacgcgctggtcttctacccgcgcggctcgcccgagcgttccgccgcggcgcggacgcgcgcgctcgtcgccaagcacatgtccaaggaccagccggggccctcggggaaggctgtcgcggggccggcggcgtccaagaaggccaaggcggaggccgacgttgggtcgctgctggagaagacggcgcccatcatcgtgtgccggaagcggagctctatcgccaaggccgccgcggcggccaccgccaaagaggagagatcggagaaggcggagtccgacaaggagggcgagaagcagcaggaggcggtgggcaagaggaaggcggcggccgccgccaaggacagggcggcgtggggcccgagaacgaacaagacccgcggcgggcctgctgtccggaaggcgtcggctcagagccacaagggggcgtcggcggcggcggacaacggctcggacagcgacgcaccgcccgaggaggccaagaagcagcctgccgctgacaagaaaggtggtggtggcggcggtgtcgccaagaagcgcaacgccgtcaacttcctcaaccggatgaagcaaggtggctcggcgccgtcgacggagcgggtgtcgctactggagacgctgaagctctcggccgcggcggagcagaagaaggccgggaaaggcgagggcaaggagcccgcgggcgggtccggttccaagaaggccacgccggggaggaggaacgttggcaggccaccgaaacgcgcggctgcccctccatccccgccaccgtccaagagggcaaagggcggcggcggcggcgggaaacgcgggggcaggaagtgaagccaagtgggatggagtgggaagcattaggaagctgtaggcccagtctcagaccgtcccagctcaaccgtgtgtaaatgacgtagggttgtaggagcgttcggtccgagcttttgtaccgtatgccagtggtgtaggggtggtactgttttttgggaggaaaacaggatgagttgacctgcgctcgcgggactgcattgatgaagagatggattgtggaagacgattcgtttagaaactgtcgtcgaggaatacatttttttggctgaaatttgaaacctgtagcgatggaatagatactgtcactgaaatctcaactgtgacttttattacagctgttaagc

SEQ ID NO: 17616 - DNA, 405 bp, Zea Mays
tccacaacactgcctgaaccagaccaaccgtatcagcatcagcgtaccggccgcggaggagccatctctctctctctctctctctctctctctctctctctctctccaggcgcatcaagccatggctgctcccaagaagacgatgagagctctgcggtacgacaagtatggtggaggagctgaaggcctaaagcatgtggaagtgccggtcccatccccgagcaagggggaggtgctgctcaagctggaggcggccagcatcaaccccatcgactggaaaattcagaagggcatggtccggcccttcctgcctaggaagttccccttcataccagttggagacatgtctggcgaagtggtagagctaggcagcggtgtgaccgacttcaagccagcagcgacaaa

SEQ ID NO: 17617 - DNA, 151 bp, Zea Mays
cttaacctcacaacccgaagatgtttcacttcagagttgcgaaaatttgagagactcacgaacaactttcgttgttcagtgtttcaattttcagcttgatccagatttttaaagcgcaaaacttcgcagtgaacctttgcaggtacactct

SEQ ID NO: 17618 - DNA, 1728 bp, Zea Mays
gtgccaaataaatctgattagatatctaaacccgtgcaaaattcattcaatcctggacgaaaaaggcaggcagaatcacaagctgtcgtgaaattctcatcgccccttccttccttcctgctcctcgccaaatcgccgagacgccgactacctcgcgctcccatagatctggtagaataggtgccggtggcctcggacgtgcagtggtagaggcttctgcggtggcggcgacggaggagaagggggagcgagcagtgtccgcggggcgcggtgtctgtgtgctggggctcgggttccgaggaaccctagccgccgcgcgatggcgtcttacaggccgtacgcaccgccgcctccgcagggcagctacccgccgcagatgaatccgtacgcgccgccgcaggcgccctacaacaggatgccggcgccgccctaccacgctgggcccccgcccccgccgccacccggtccgccaccacctcaccaaccgcagttcaatttcggtcccgggcctccgcagcagcacccgcccccgccgatgtactaccagccaccgccaccaccctatggcgggaacagtaacccgcctcctcctcctccttcagcgccacccccgcctccgtccccaccccctgctgctccaccccctccgcctccggcccaggcaccgtctgctcaggccctgctgccctcaaaggagcagcagcctaaggcaacgctgccaagagaggagacggaggaggagcgtcgtgcacggaagaagcgggagttcgagaagcagcgggtggaggaacgcaagcagcagcagatgatgcggcagacgcaggccaccattctgcagaagacgcagcaggtgcgtgcttctcagcagcagccgcagagccgccaccaccaccaccagcctccgagtatcttccgggcagcagcaattggctctcgggcagtggcaactgggtctcgcccagcatcagcgccgaatgctgagaggtttgagaaccggttaaaaaagccaacaacgttcctctgcaagcacaaatttaggaatgaactcccagatccaagtgctcagttgaaatggctacccttgaataaggataaggaccgatataccaaatacaggataacttcattggagaaaaactacattcctaaaatgattgtccctgaggatcttgggatacctcttgatctacttgacatgagtgtatacaatccccgggatgttcagtcgcgcatggctcctgaagatgaagagctattgcgtgatgatgaggtcctcacccctattaaacaagaaggtacaaggaaaagggagaggcccactgacaaaggtgtttcttggctggtcaaaacacaatacatatctccactaagtactgatgcaaccaaaatgtcccttactgagaagcaagcaaaggaaaggcgagaaacaagggagggtcgcaatgctttcctagacaatcttaatgatagagagaaacagatcaaagccattgaagaatccttcagagcagccaagtcaaggcctgttcaccagactaaacgtggcatgcaagctgagtacgaggagccgtttgttatggtgaattttgatggcgatccaactgctgattctgagcagtacaacaaacttgagagacctgtacgtgatgaatgtgaatcccggtgttgcagggacttgcatgtttttcactgatttgtatcaccagacatggtgaaacttatatagtt

SEQ ID NO: 17619 - DNA, 360 bp, Zea Mays
cggcgaccgtgtgagggagagagaggaagaagggggcgagcgagaggaggccactggatcatctgctcctcgtgatgcgcgccgctcattgctgccgagcgctgccgctttcgcccgcttgaactcatcctcatccccacgccactcccccactctcgccgctcctcgccgccgtttcggccagaaaaccctagcaaatcctcgctcgcagcagccagcttctccaagtgggagcaacccgcgccgccgaccgagcgcgagccgtagcagctcccgccgccgccacccttcgcgtgccgcgccagcgccctcggccccgggtgccgccgtccggaaaagaaggggaacaccctgcctcgc

SEQ ID NO: 17620 - DNA, 161 bp, Zea Mays
acaagaacaggtaccactggacaaggcgcatgaaggatgctgtgatgagtttgtgagtggtctaggccatcgtctcctagtcaactatggttgctggattgttgtcttcgtatgctgtaattatttaactattttgtacaaaactccattatatattaatg

SEQ ID NO: 17621 - DNA, 1300 bp, Zea Mays
tttcgtgccaactgctgtaggaagatccagcagtctgcaaggtggccaaagaaaacaacacggcaggagtgaagatctctgataggatgacttcagtgtccgaattaacacttgtgctggcttcaggtgcatcaatgttaccgcatccttcgaaggtacggacaggtggtgaagatgcatattttatagcttgtgatggctggtttggtgtagcagatggagttggtcagtggtcatttgaagggatcaatgccggactttatgccagagaactaatggatggctgcaaaaagatcgtggaagagacccaaggagctccagggatgagaaccgaggaagttcttgccaaggctgcagatgaagcacggtcccctggttcttccactgttttagttgctcactttgatggaaaggttcttcacgcatcaaacatcggagattctggattcctcgtgattaggaatggagaggtccataagaaatcaaacccaatgacttacggtttcaatttcccgttgcagattgagaagggtgacgaccctctaaaacttgtacagaaatacgccatctgtctacaagaaggcgacgtcgttgtaacagcgtcagacggtcttttcgacaacgtctacgaggaagaagtggcaggcatcgtctcgaaatcattagaagctgatctgaagcccacggaaatcgccgatttactggttgcccgagcgaaggaggtggggcggtgtgggtttggaaggagcccgttctcggactccgctctcgcggctgggtacctgggctactccggcggcaagctggatgatgtaacggttgttgtatcgattgttcggaaatctgaagtttaataaactagaaacgaactagcaaagttgagcgcacttcttttttttcttttcttttcttttttctcttcttgcaacagctgcactcgctggcaaaatgcccgtgaggcgtgagcatttcgcacatccctggcctacgcgctcaggcgcattgcgaaacgtgtattgtgtacacttgatacatactataaggttgtataagtaagctgcgagcccttcgaatgaacatcgtgatgtacttactcagcggcagcggggtaagctattcgtggccggccggtagcattatttatgcgaggcagtgaaatccatgaacagccgcagtgctactaaacgaaacggaaacgctcacaagatacatctctcggtacatgatttgtggtcagactggggtaaggtacgggcggagcgcatgaactcgggtgagtgagcccagctcacaagacccg

SEQ ID NO: 17622 - DNA, 1894 bp, Zea Mays
ttcactgacaaccgctaaaaccctctatctcctgccaccgcggcggccccttctcttccctgtaataaacccccggcgagcgatgcggcggctggcgaaatccctcctcctcgcctccctctccaggaccctccgccaccgcccccagctcccgctgcttcacccttggcctccccagccccgtcgcccggagccccgcctcctccccttctccactcaaaccctagccccgggccctgctcccccgcctgcgcttgttgcggcgtcgacgggcgagcccacaggcctcgcgcttctagagtccgcggagctgcacgagtccgagggggaccaccaggaggccctcggcctcgccctcaaggcgctcgcgccgctgcaggcgtcccacggcgggtggtcgctccccgtcgcgcgcgcgctccgtctcgccggcgccgcggccacccgcgccggcagcctcagcgacgggctcgagtccctcggcgctgccgcggatatcgtcgactacctggcacccgcgcggcgcaagggggtgcctgcggaggtggcggtggtcggcgctgccgtgtacgagcagctggcgcgcgccaaaatggccatcgggcgccggtgggacgcggtgggcgacctccagcgtgcactggacctgaagactctgttcctggaggccgggagtgctgagcttgggaacgcctacagggacgtcgccgaggcctatgcgggtgtgctggacttcgacaaggcgctgccattgtgttctaaggcattggggattgcggagagacggtttggtgaggactcggcagaagtggctaagctacggcggcttctcatgtctgtctatactggtttgggtcgccatgaggaggctctggctcaaattgagcttgctaaggtggtatatgagcgattgggattgaatgttgaactttctcaggctgaaattgatggggctaatatccgtatcttgttggggagatcggaggaggcgctgaataacattaagagggtaatgcagcgggcagacaaggagagcgaggagcgtgcactagcatatgtcacaatggcaaagatattgatgtccgaggatacggttttggactcaaagcggtgcttggagatcgctcaggggatcatagatgcaaaggattccatcgaccctggtcggtttgctgaggcatatgctgagatatcaatgttgtatgagtcgttggcaaattttgaaacgtcttcgggctcgtttgaaatggcttcgaacttgatgaagaaaacactggcaattcttgagagcgccaaggagatgcatcacatcgaaggcagcatctcagcaaggctagggtggctcctcctgtatattaaaaatgttgatgagtctgtccaatatctggagagagcggttgataaattgaagaattgctttggaccacgacactttgggttaggttttgcttataggaatctggggcaggcctatcttgaaatgaaccaacatcaatcagctgtggagttcttcaaacttgcgcttgatattattgaagctacatttggaccgctacatgatgataccattgacacaaaacagtgcattgcaaatgcatacggactgatgaaaagctacaaacttgctatggagtttcaagaacaagtcatggatgcctacagtaggtgtggccatggtgccttggatgatttcaaggaagctgaaaggcttttagagcagatcaagatgaaggctcaaggattgcgtcatgcagtatttcctgcaaattcattgcctgattcagctctagctctagctcaacgcaacaaagacgattagttcttctgtatcagtgccaacttagatgagttaatggaagctcatgaatccatcctatccctatggcggtagctg

SEQ ID NO: 17623 - DNA, 7484 bp, Zea Mays
aatgtcgcagcttggattagctgcaactgcctcgaaggccttgccactactccctaatcgccagagaagtccagctgggactacatttccatcatctgcattgccgaggccctcaaaccgaaggaaaagccatactcgttcacttcgtgatggtggaaatgaggtatcagatgccaaaaagcacagccagtcagttcgtcaaggtcttgctggcattatcgacatcccaagtgacgcagtttcggaagtcgatatttcacatggacctaaggatcctagggggccaacagattcctatcaaatgaatgggattatcaatgaaacacataatggaagacatgcctcagggtccatggttgttgaattttgtgcagcactaggtggcaaaacaccaattcacagtatattagtggccaacaatggaatggcggcaacaaagttcatgaggagtgtccgtacatgggctaatgatacttttggatctgagaaggcaattcatctcatagctatggcaactccggaagacatgaggataaatgcagaacacatcagacttgctgatcaattcgtagaggtgcctggtggaacaaacaataataactatgccaacgttcaactcatagtggagatagcagaaagagtaggtgtttctgctgtttggcctggttggggtcatgcttctgagaatcctgagctgccggatgcattgaccgcaaaaggaatcgtttttcttgggccaccagcaacatcaatgaatgcattgggagataaggttggttcagctctcattgctcaagcagccggggtcccaactcttgcttggagtggatcgcatgttgaagttccattagagtgctgcttagacgcgatacctgaggagatgtatagaaaagcttgtgttactaccacagaggaggcagttgcaagttgtcaagtggttggttatcctgccatgattaaggcatcctggggaggtggtggtaaaggaataagaaaggttcataatgatgatgaggttagagcgctgtttaagcaagtacaaggtgaagtccctggctccccaatatttatcatgaggcttgcatcccagagtcggcatcttgaagttcagttgctttgtgatcaatatggcaatgtagcagcacttcacagtcgtgattgcagtgtacaacggcgacaccagaagattattgaagaaggcccagttactgttgctcctcgtgaaacagttaaagcacttgagcaggcagcaaggaggcttgctaaggctgtgggttatgttggtgcggctactgttgagtatctttacagcatggagactggagaatactattttctggagcttaatccccgactacaggttgagcatccagtcactgagtggatagctgaagtaaatctgcctgcagctcaagttgcagttggaatgggcatacctctttggcagattccagaaatcagacgtttttatggaatggactatggaggagggtatgacatttggaggaaaacagcagctcttgctgcaccatttaattttgatgaagtagattctctatggccaaagggccattgtgtagcagttagaattactagtgaggacccagatgatggtttcaaacctactggcgggaaagtgaaggagataagttttaaaagcaagcctaatgtttgggcctacttctcagtaaagtctggtggaggcattcatgaatttgctgattctcagtttggacatgtttttgcatatggactctctagaccagcagctataacaaacatgtctcttgcattaaaagagattcagattcgtggagaaattcattcaaatgttgattacacagttgacctcttaaacgcttcagacttcagagaaaacaagatccacactggttggctggatacaagaatagctatgcgtgttcaagctgagaggcccccatggtatatctcagtggttggaggtgctttatataaaacagtaaccaccaatgcagccactgtttctgaatatgttagttatctcaccaaaggccagattccaccaaagttaatttgaatatagaagggagcaaatacacaattgaaactgtcaggactgggcatggtaggtacaagttgcgaatgaatgattcaacagttgaggcgaatgtacaatctttatgtgatggtggcctcttaatgcagttggatggaaacagccatgtgatttatgcagaagaagaagctggcggtacacggcttcagattaatggaaagacatgcttgttgcagaatgaccatgatccatcaaagttattagctgagactccctgcaaacttcttcgctttttggttgctgatggtgctcatgttggtgcggatgtgccatatgcggaagttgaggttatgaagatgtgcatgcctctcttgtcacctgcttctggtgtcattcattgtatgatgtctgagggccaggcgttgcaggctggtgatcttatagcaaggctggatcttgatgacccttctgctgtgaaaagagctgaaccatttgatggaatgtttccactaatggacctccctgttgctgcctctagtcaagtacacaaaagatatgctgcaagtttgaatgctgctcgaatggtccttgcaggatatgagcacaatatcaatgaagtcgttcaagatttggtatgctgcctggacaatcctgagcttccttttctacagtgggatgaactaatgtctgttctagcaacgaggcttccaagaaatctcaagagtgagttagaggataaatacaaggaatacaagttgaatttttaccatgggaaaaacaaggacttcccatccaagttgctaagagacatcgtcgaggaaaatcttgcatatggttcagagaaggaaaaggctacaaatgagcgacttgttgagcctcttatgaacctactgaagtcatatgagggtgggagagaaagccatgcacattttgttgtcaagtctctttttgaggagtatcttaccgtggaagaacttttcagtgatggcattcagtctgacgtgattgaaaccttgcgtcatcagcacagtaaagacctgcagaaggttgtagacatcgtgctgtctcaccagggtgtgaggaacaaagctaagcttgtaacagcacttatggaaaagctggtttatccaaatcctggtgcgtacagggatctgttggttcgcttttcgtccctcaatcataaaagatattataagttggcccttaaagcaagtgaacttcttgaacaaaccaaactaagtgaactctgttccagcattgcaagaagcctttcagatctggggatgcataagggagaaatgactattaaggatagcatggaagatttagtctctgccccattgcctgttgaagatgctcttatttctttgtttgattacagtgatccaactgttcagcagaaagtgattgtgacatacatatcacgattgtaccagcctcatcttgtgaaggatagcatccaaatgaaattcaaagaatctggtgctattgttttttgggaattttctgaagggcatgttgatactagaaatggacaaggggctattcttggtgggaagagatggggtgccatggtcgttctcagatcacttgaatctgcatcaacagccattatggctgcattaaaagattctgtacagtacaacaactctgaggtcaacacaatgcacattgtgttattgaatgctgaaactgaaagtaatataagtgggacaagtgatgaccaagctcaacataggatggaaaagcttaccaagatactgaaggatagtagtgttgcaagtgatctccaagctgctggtttgaaggttataagttgcattgttcaaagagatgcaggtcgcatgccaatgcgccacacattcctctggtttgatgaaaagaactgttatgaagaagagcatattctccggcatgtggagcctcccctctctgcacttcttgaattgggtaagttgaaagtgaaaggatacaacgaaatgaagtatactccatcacgtgatcgtcaatggcatatctacacactaagaaatactgaaaaccccaaaatgttgcatagggtatttttccgaactattgtcaggcaacccaatgcaggcaacaagtttacgtcggcacaggtcagcgacactggattaggatgtcctgaagaatctctgtcatttacatcgaatagcatcttaagatcactgatgactgctatagaagaattagagcttcatgcgattaggacaggtcattctcacatgtttttgtgcatactgaaagaacaaaagcttcttgatctcgtcccattttcagggagtacaattgttgacgttggccaagatgaagctactgcttgttcacttttaagatcaatggctttgaagatacatgaacttgttggtgcaaggatgcatcatctttctgtatgccagtgggaggtgaaactcaagttggactgtgatggacctgcaagtggtacctggagagtcgtaactacaaatgtcactagtcacacctgcaccattgatatctaccgagaagtggaagatacagaatcgcagaagttactataccattcagctacttcgtcagctggtccaatgcatggtgttgcactgaataatccttatcaacctttgagtgtgattgatctaaagcgctgctctgctaggaacaacagaacaacatattgctacgattttccgctggcatttgaaactgcactgcagaagtcatggcaatccaactgttctagtgttcctgaaggcagtgaaaatagtaaatcctacgtgaaatcaactgagctggtgtttgctgaaaaacatgggtcctggggcactcctataattcccatggaacgtcctgctgggctcaatgacattggtatggtcgcttggatcttggaaatgtcaacacctgaatttcccaatggcaggcagattattgttgtagcaaatgatattactttcagagctggatcattcggcccaagggaagatgcattttttgaagctgtcaccaacctggcttgcgaaaggaagcttccccttatatacttggcagcaaactctggtgctaggattggcatagctgatgaagtgaaatcttgcttccgtgttgggtggtctgatgaacgcagccctgaacgagggtttcagtacatctatctgactgaagaagactatgctcgtattagctcttctgttatagcacataagctgcagctagataatggtgaaattaggtggattattgactctgttgtgggcaaggaggatgggcttggtgttgagaacatacatggaagtgctgctattgccagtgcttattctagggcatatgaggagacatttacacttacatttgtgactgggcggactgtaggaataggagcctatcttgctcgacttggtatacggtgcatacagcgccttgaccagcctattattttaacagggttttctgccctgaacaagctccttgggcgagaagtgtacagctcccacatgcagctgggtggtcctaagatcatggcgaccaatggtgttgtccacttgaccgtttcagatgatcttgaaggtgtttccaatatattgaggtggctcagctatgttcctgcaaacattggtggacctcttcctattaccaaacctttggaccctccagatagacctgtcgcatacatccctgagaacacatgcgatccgcgtgcagccatccgtggtgtagatgacagccaagggaaatggttgggtggtatgtttgacaaagacagctttgtggagacatttgaaggatgggcaaaaacagtggttactggcagagcaaagcttggaggaattcctgtgggtgttatagctgtggagacacagaccatgatgcagctcatccctgctgatccaggtcaacttgattcccatgagcgatctgttcctcgggctggacaagtgtggttcccagattctgcaaccaagacagctcaggcattattagacttcaaccgtgaaggattgcctctgttcatcctggctaactggagaggcttttctgggggacagagagatctctttgaaggtattcttcaggctgggtcagcaattgttgagaaccttaggacatataatcagcctgcgtttgtctacattcctatggctggagagcttcgtggaggagcttgggttgtgatcgatagcaaaataaatccagaccgcattgagtgttatgctgagaggactgccaaaggtaatgtgctcgaacctcaagggttaattgaaattaagttcaggtcagaggaactccaagactgtatgggcaggcttgacccagagttgataaatctgaaagcaaaacttcaagatgcaaagcatggaaatggaagtctaccagacatagaatcgcttcagaagagtatagaagcgcgtacaaaacagttgttacctttatatacccagattgcagtacgctttgctgaattgcatgatacttccctgagaatggcagctaaaggcgtgattaagaaagttgtagactgggaagaatcacgctctttcttctataaaaggctacggaggaggatctctgaagatcttcttgcaaaagaaataagacgaataattggtgacaacttcacgcaccaatcggcgatggagcttatcaatgaatggtacctggcttctcaggccacaacaggaagcactgctggatgggatgatgatgatgcttttgttgcctggaaggacagtcctgaaaactacaagggatatatccaagagctaagggctcaaaaagtatctcagtcgctctctgatcttgctgactccagttcagatctacaagcattctcgcagggtctttctacactattagataagatggatccttctcagagagtgaagtttgttcaggaagtcaagaaggttcttggatgatgatatgataccaacacatccaacacaatatgcgcatgctacatgttatttttcaagtacatacatagaaggatattgcttggccttgattgatcatgtctgatctaagtcgatcattattttcttgaaacttcctttcggacgtggtgctatggttgatgaatttggatgtgtgcgttctgccaggtgtaagcccaaaggtttatacagaccgagttaaggttaggaagagcacgagtgaacttgttctggttttgcagtggttaaggcagaaagttgtttcactgtagttctgagatgtattaccagcggcgctgtaattttagggtgtataatgcggatgctagtaaacaattgagtggttcattaaattttgaactcgaataatatgtttctgtaggcacatgtgacgtaccactacatgaaataaatgtcgctgaactagggcaccagagttttggtaggactaaggttttgtttggttatgggataaggtgagcatctccagcgttcccaaacttgaatttccc

SEQ ID NO: 17624 - DNA, 3076 bp, Zea Mays
cctcccgtaagctccacgaccggagagagagagagcgcgcgctatccaagccaagaaactccccccgtagtccgcggcccgggctcacgaccgatccggtccgggcccgatggagctcctgagcggcggcgcgctggcgtggcagcagtaccgcgcgctgctccgcaagaacgccacgctcacctggcgcaaccgccgctcggcggcgctgcagctcttctcctcgctcgtattcatcttcctcatcttctgcatcgaccgcgccgtccgctccaggttctccagtaccaccgcctaccgcaacgtgcccgacccggaggcgctcgtcgcgccgccgatcccgccctgcgaggacaagttcttcatcaagtccccatgctacgacttcctctggagcgacggcgggagcgcccgcatcaggggcctcgtcgacgccatccggaggaacaaccccggccgacccatagcacccgaaaaggttttaggttttaggactccagatgatgttgatgcttggttgtttcaaaacccaatgcgttgccctggggctttacattttcaagatataaatgccactcagataaagtatggtattcagacaaactctactccggtagcacggagaggaacatatgaagaccctaccttcaagttccagataccactccaagttgcagctgagagggaaatggcaaggcttctgattggaggctatgtctaccatggggctctatgaatcggcttactggttatcgtggtttacctgggaggcctttcttacaacactttcagcactttttactgtgctctttgggatgatgttccagttcgatttcttccttcataataattttggaatcctattcctcctgttcttcctattccaactgaacatgcttagttttgctttcatgatatccacgttcgtagcgaaggcagcatcagctactactgttggatttgcaatattcattattgggttcttgactcagcttgttaccacctttgggttcccttattcgtctgactacaaaaagttgtaccggacattgtggtctttatttcctcctgatttatttgccaaagccctcaacattctaggcaaggcaacagccactcctgaggataaaggttttagctggaatcagcgtggggagtgcccatcttttgagactgactgtgtcattactattgatgatatatataagtggctcatatccacatttttcttgtggtttgtccttgcgatatactttgacaacatacttccaaatgtaaacggcgttcggaagtcagttttctactttcttatgccttcatactggacgggtaaaggaggcaagatggaagagggaggcctctttagcttttttggttcaagccgtcctgcagatgatgctacccctactgacgaggatgtccttgcggagcaaaacctagtaaaggaacaagctgcaaacaatgcggtagatcctaatgttgcagttcaaatacatggtctacgtaagacatatccaggaactttcagcattggatgttgttgcaaatgctctaaatctaagccgtttcattcggttaaaggcttatgggtgaaccttgagaaggaccagctattttgtcttcttggtcccaatggagctggaaaaacaactacaatcagttgtctgactggaatcacaccaattacaggaggtgatgcattcatttatggtcactctgttcgaagcactgtgggaatgtcaaacatccgtaggatgatcggagtctgcccacagtttgatatcctgtgggatgcattaacagctaaagagcacatggaattgtttgccagcatcaagggattgcatccagcagcaatcacatcagtagcagaagagtcattagccaaagtaaagctcagccaagtaactaatgctcgagcaggcagctacagcggaggaatgaagcgccggctaagtgttgcgatcgcactgattggtgacccaaaattggtttttctcgatgaacctactactggcatggatccaataacaaggaggcatgtctgggacatcatagaggaggccaagaaaggaagagctattgtcttgaccacccattccatggaggaggctgatattcttggtgaccggatagctataatggcaaaggggaaactgcggtgcatcgggacatcaataaggctgaagtcgaaatttggaacaggatacattgctaatgttaatttctctggaaatggccacatgcagagccccaacatcaacagcaacactgaggctccggttaatccgaacatagaagctgtcaaatggttcttcaaggaacggcttgatgttaatccaaaagaggagagcaggacattcttgacatttgtcatccctcatcacaaagaaccacttctgacgagattctttggagagttgcaagacagggaaggggagtttggaatatcagacattcaactcggtctgacaacacttgaagaggtgttcctgaacattgcaaagcaggcagagctggagacctctactgctgaaggtaccctggtgactctcaacctgtcatcaggaacaacaattcagattcccaagggggctcgtttcgttggtattcctggaactgagacagaggagcatccaagaggcatcatggttgaggtgtactgggatcaggatgaaaatggatcgctctgcatttctgggcactctgacgagatgcccgtgccagttcatgctgagctgaggaggcctccgtcactttctcgtagggcctcaatggaccgtggacgtccagttgggtatatgattgacctgaaccaggtcccatgaaaaaaaggatgagtccaggtgcaacgtttagattggttttgatgcagattatctggtacatatagtatataggaatcttgtattcgtgtctttgtattagaagtcgtaaccttgtattgcagtagtaattggtaaagacatgctttgtaaaatatcctatagtgtaacacagtattttctgttgtatggcaaacaaaggctcgaaatatgacgcaatagaattacatggtaactacaccctgcgtctc

SEQ ID NO: 17625 - DNA, 749 bp, Zea Mays
ggactaaatcgtctctaattatgaggagagtggagatcatcccgatgatgatgcgaggtggaaggctcacgggtttgacctctcaggttctgaggtgcttcagcacggagatatttgtcagcagattatcattctatacgacagaggaagaattcaaagatattttttcaccatttggcaccgtagaggaagctcgacttatgagagaccaccaaactggaaggatgaagggatttggttttgtcaaatattcatcgcaagcagaggcagagaaagctgtcaaggcaatggatggcaagattctacgtggaagattgatctttgtggagatggcaaaaggacacgaaagcaagtaggacaccctccccacgagaggatttcactgaacatgaaacatgagagcgccatcagcttatgccagatggcaaatatcccaaattctcaattgatgttgcaacttatatacaaagcacaagttaattttagctagcttatctttgataacactgctaccttgccatctgaaaggttgccgtgcattggtatccgttgacctgtgtaagaaatgttggcagctctgtgccctacgaactagcctggttgattaaccaagatctgttcaaaattaaagccagtaaaacatgaatattgttaaagatttcagcaatgaatcgttgagaaaagattgataaagacgttctaattataatatactcgttagcctttaacgagtgggtctagttagcctt

SEQ ID NO: 17626 - DNA, 1142 bp, Zea Mays
aaaacaaatttagctgttttttctttcgacgttttcgtccctacctcgcggttggggctcgcggctctcgcggcccgcctgtgctactgctgcacccgcacggccgcgcgcacctccaccgcaacggtcacttctagctctcgtgcagtcgtgcgtcctccatcgtcgcctctcctcccgcggtcaggggagtgtctgttgttgcgctgctaaggcatttcgggtgcccatgctgctgggagttggcctctgttctgagggacacaaaggagagatttgattctgctggagtaaaactgattgctgttggtgttggcactccagctaaagcccgtattcttgccgagcgcttgccctttccgttggaatacctctatgctgatcctgatcggaaggcgtataatctcttgggtctatattttggtgttggtcgcacgttcttcaatccggccagtgcgaaagtgttttcacggtttgactcccttaaggaggcggtgaagaattatacaatcgaagccaccccagatgacagggcaggtgtcctacaacaggggggaatgtttgtgttcaaaggtaaagaactgttgtacgcaaggaaagacgagggcacaggcgaccatgcacctttggacgatgtgctcaatatctgctgcaaagttcctgtaacctaacccgacggcttgtcccacagctcagtagtaggtacttggaaagcactttcggcgtccttgattcctgaacttccaggatcgcctgctgcaagagtgtcttctccaccaatgtgccgatattttcttttgagatgcttggtttactttgatatctttttggtgatggatcgtgagttgttggcttgttgcattatgaattgcgtactgtaagtatccagtttgctgtttagcacttatacaattcgaaagcaaagttcgaagtcctggctgcctggctcttccttggagatggaagtttttgcacttccagaaatatcgggaacataaagtccatgtgatcttttgtgcctttaaaattttggatcgtttcctaatggaaatctgttccagttttattgacatcagaaatcctatctcctgtagtcctgttattcagcgtctgagtggagctataaaattgatcttatcatt

SEQ ID NO: 17627 - DNA, 2822 bp, Zea Mays
ttcttttccccctcccctgttaaacacgcgcagcgaagcaacgcagcagcaacaaaccttttcgctcgcagctgccaccacctcgtcgtctcgcctccccctcggcctccgcacgcgcgcgcgggatctcgccctcgcccgcctcgccgctcgcgcgcgcgcaccgaggaagggcgcacccacccgcaggcttcctggcgggccgatacggcggcgatggcgagccgggtcaaggaggacgagaggcacgagaagatccttcgcggcctgctcaagctgcccgccaacaagcgctgcatcaactgtaacaatttgggaccacaatatgcctgcacaaatttctggaccttcgtttgtaccaattgcagtggagcacatcgggagttcacgcatcgagtaaaatcggtttccatggccaaatttactgcacaagaagttactgcccttcaagaaggggggaatgagcgtgctagagaagtatttttcaaggagtgggatcctcaacgaaatggataccctgacagcagtaatgctgacaaattgagaaatttcattaagcatgtgtatgtggaacggagatacacaggagaaagaagtactgataagccaccaagggcaaaggatgacaaggatgagtatagtgaaaataggagatctgatggaaattggggtggttcaagaagtccgccagatggaagttactctgatcgtcggagttatagtggacggagtgatgacagaaattccagatattcctatggggaccgtagtcctggctatgaccaaaatgactataagaaaagtcctcgctactttgaggttgtcgatgatagatctggaaaaacaactccagttcaaaggtttgaagaccgttggtcttcggagcccagaaaaccagatagtggatctccagatttccagaaagaagctgatggttctagtcctgttgtacgaccagttagggatatattgggtgacaatactcctcaacttcgggttggtgaaccgtcaaagccagctactgaacctccaaagccaagcgtagtcagaccaattgatcctccaaagccgagtgtagtcagaccaattggtcctccaaagccaaatggaaccagggcaattgatcctccaccactgacaaagacaatatctagtgccagcagcattggttcttcagaaggcacatcagaacagacaaaggtggcaagtgctgtaagtttaattgattttagtgcagatcctgaacctgcgtccacagcaccaccacaacccacccctatgccacaacaacctccatttaacgcagcagcaccacagcctattcttgaacaagggaaaagtgatccttctgtcagtggtggtgactgggcatcttttgattcttttggccaacaacaaacaccacaaacaagcagcagtgtaaatcctcttgagtctgcacttgcacagctgtcattctctgaagcaccctctgcaccaaatgcgtcagcttatcctgtttctcttgatcccactttgaaagcaaatgatggaggacattcatctgtgctagaccagtcacattccttgtttgatgcgccctttggaatctcaggcaaccaggcctcaacagtaatgtccggccaaggatcatcagttcaacaatctcctctagctgccccaacagctggacctccatctcaagctactgcaaatccacaaggaaccagtggtattcaaggagcagcctcttctactgacagtaaattcagtagcaggaaagaacttccagtggatatctttactgcactatatccaccatcaactcaaatgatgcctggctggcagagagctccccattttggaatgggatacgccatgcaatatccacctggagtgggattgcaatcatatcttcacggagcatttcctcagcctacatatcagcaacctgtatattcacaacatgcatattcccacccccaacctgtgaaagcttcaaacccttttgatcttgggaatgagtcagctcatattcaagctcacatgcccccatctgggccacctggagcatcagcaggctcagctccccaaaccttaattggccattttatgatgcagcaagttccgaacagcatgcccatgcctgaacaacaacctaatagcatgcttgcaacgcaacaaggtttgggttccttcaacatgggttttgatcaggaagctcctctcggatacccccaggcaaacacctcaccttcctacggctccgttggtggtggtagtaatccatttggctgaaagaagtgtggaaatacctgatcgttcatcactagacgaagggtctgcagcactcagggggacagacatgcatcgaagccctggagagattgtgtttcatacaacaaggtggtgtatcttgtcggccgtagtctgttgtacaacttgtttccaaaggcttaatgatcgaatataactctgttttggagggcctaagctgatttcagcctcattccatgtacattgtgtctggcgttctgcttggattgcacagtatgtatattgtgtttcttcgttgttgtcatggacagtgtcagctcctgttttagtacaagttgtttctagtgcacttgattattcgatttaatgtggatgattagtacactatagatcagatgtagaatcgtgatcgatcaattttgtggtttctttttacttgctatcttagtaccacttaattttgtggtgatcttttgtaagggttattttcttgtggaactcattacttgttatctacattttgtaatgcaattcaaggtatgttcaacttaactaatttctccctc

SEQ ID NO: 17628 - DNA, 455 bp, Zea Mays
tccaccttccatgtccaggcacccgtgtaggcgacgagcctggggacactgacgtcgccgaaggagatggagtcgttgcagctccctgccgtgccgtagtgaacaatgccggacacgctgaagacgtcgatgagcgtctgtactgtgacggcggcgttcagcctgcgttgccctgtcagtgcgtatatcacgttcacgccccgaatgctgccgatgtgataccgccgtccgtagaggtcaacgaaagggagggcacgccaaggctggaagtagccggaggcctgcagcgcggtggcctcgtcgacgtaggacatgacgaggccgagggaagggcctcgccggttgaccctgtcgatggccgcccgctccggcaagcccgccgccgagcccacgagcagaagcgagaagagcaggcgggtcgtcgccgggtggccggaggaggacagcgccattga

SEQ ID NO: 17629 - DNA, 2565 bp, Zea Mays
caacggaccaacctacccacccgcaccctctcttgtgcacctccggctcccagtccactgcctcctgccaaaataaatccgtccgctctccagcttggtggcacaatcccatcgaaagctagggtttcaagcctcttccgacttctccttcccttcccttccccaccacaacgcggccgccatagacgcggtaccgcgcgaactcccatagatctgagcgagccaccctgcgaatcatcccctgacgcaccaaatctggtcagaaacggtgaagagttcggacacgatcttaagcgtcgttgatttaagaccacacacaaacacatctgtttgcccttcccccctatttttttcctgtttcggacgattcataagaacagacctgcaaggtttgcagatctacctgttcaagaaccagggaccttgttttggacgcccagaacgaacccttgaccctgcggatctgctcgatccgttttggatctgcttgcttttttctggatctagagagaatgttcaagtcgatggtttatttcgtgaacatctcaatcggggaggttgaggtgtggcccaagggccaggcgagcgcaggcctggccgtggcggcgtgggcgcgagatatccgcgttgaccgcctttccccgcccagcgagcggtgccctccgctggccgtcatgcacaccgtggccgtcgccgcccgatgcctcgtcatggagtccaggccgcccgtcgccgccgacgtggcgtcgctgcctctcgtcgacatgcacgccgcttgcctcagggacaacaagaccgcggttgttgcacttggagatgaagaattgcatttagttgcgatgacatccagaagaaacttgacaaatcatgcatgtttctggggctacaagttgccatttggtttgtataattcttgcttgaccatgttaaatctacggtgcctgggaatcgtgtttgaccttgatgagacattggttgtcgccaatacatcacggtctttcgaggacagaattgatgcacttcaaagaaagctgagcaatgagactgatccacagcgtagaaatggtatgctatcagagatcaagaggtaccaagatgataaatccatcttaaagcaatatatagaaggtgatcaggtctatgatgacggtaaagtgtataaagcacaacctgagattgttccaccattgtctgataaccagcaaacaatgacacgcccagttataagattacaagaaaaagacattatcctgacaagaataaatcctctgattagggataccagtgtgcttgtacgtttaaggccagcctgggaggatcttcgcagctacttaattgccagaggtcgcaaacgttttgaggtctatgtgtgtacgatggctgaaagagactatgctttagaaatgtggagattgcttgatccagattcaagattaattaattctgttcgacttcatgataggatggtgtgcgtaaaatctggtttaaagaagtccttgctaaatgtcttccatgatggttcttgtcatcctggtatggcattagtaattgatgatcgtctgaaagtttgggatgagaaggatcaattacgagtccatgtggttcctgcatttactccatattatgctccacaggcagaggcaaattgttctatcccggttctttgtgtagccagaaacgttgcatgcaatgttaggggtggtttcttcaaagacttcgatgaaggactcttaccaaggattagtaatgttcattatgaagatgaagtaaatgatatctcatctgcgccagatgttggcaattatttgataacagaggatgagaatgtcgcattagtgaatggaaatagagattcattgccttttgatggtatgtcagatgcagagattgaacggagaatgaaggaagccaatgctcaagcattccatcaaacagcgactaactttgtcatgccagtagcccctgctcagaattttgtttcgtcttcagttgcaccattagcgccacctcttagcatgatgccgcctccattcagccagccagttgttcagccaggtttttcagatccactgcaaggttctccagctagagaagagggtgaagttcctgagtctgagttggatccagacacaaggagaaggcttctcatattgcagcatggtcaagacacaagagatcctacacctccacacccagcgataccaccagtgcaagttccagttcctccagtgcaacctcatgggaattggtttcccacagaggatgggataaacccaagtaacctgagtagaggttcagcaggtttcaccgttgaatccgattctatgccctatgagaaaaaacaaccacctcatccttcattctttcatggtggggatagtcctatgtcgtctgatagatttggctatcagaaccagaggtttccctctcagctaccgcacaccgaggatcaccacatgcttcagaaccatgcacctccaaaatacagatccttttctgtgtttggaagcagaaagcaactgctcctccacgccgccgctggcggccgccccatgcagcgaggcg

SEQ ID NO: 17630 - DNA, 128 bp, Zea Mays
ggagcttagcataagtgacgcgcatctaggagatagatcgtcaggatcgactcaaatcgcgcaagcagattcatcactcagggctctcgttgaacacgagatgcgcaagccgcgacatcggtagcgag

SEQ ID NO: 17631 - DNA, 120 bp, Zea Mays
gggtttcaaccttgaggcgaaagagaccaatgcataagaggacagggacaagcaatgacacacataacacacggagagggtgtctagcaacaaaaattccatgcttcctgcaatgtactt

SEQ ID NO: 17632 - DNA, 849 bp, Zea Mays
ggattatgatcagatccacgggatgctgaacgcgattgcgtggggcgtcctgatccccacgggcgccatcatcgcgcgctacctgcgcgtgttcgagtccgcggacccggcatggttctacctccacatcgcctgccagtgctccggctacgtcctcggcgtggccggctggggcctggggctgaagctgggcagcgagtccgccggcgtcacctaccagccccaccgcagcatcggcatcgccatcttctgcctggccaccctccaggtgctggcgctgctgctcaggcccgacaagaagaacaagtacaggctctactggaacatctaccaccactccgtcggctacgccgtcatcgtcctcagcgccgtcaacatcttcaaggggctccacatcctcgagccggccagcggctacaagaccgcctacattgtcatcctggccacgctcgccggcatcgcgctctgcctcgaggccatcacgtggcccatcgccatccggaagcgcaggcggaacgccgacaaggcgtccggcggcaacggctggcagcagggtgcgtagtagggaccagatcgcccggcttgtgcttagttttgaatgcgagagagggatgtgatatcgatgtgctcatgtcgttgttcagagggatcgttgctgcctgtgctttctttctcttcctgttattactacctctctagtctgtacttgtttatttattttatttatgtttcttctgttttgtttatttattttattattagggttccatattgccatttgtacacagtttttctctcttcttattattgactacgattactctgattagtgtatatattgtttccatc

SEQ ID NO: 17633 - DNA, 88 bp, Zea Mays
ttgctaataatcaacaccgctcctacgcacaaccccaacactgacgtgaacaaccactgctccctaccacccgccaacagcagcagcg

SEQ ID NO: 17634 - DNA, 2092 bp, Zea Mays
gaaagcttaccccgccttttctgctgctttttttctactccggggaggtttccgatgcttggagaaaagatgaggaaagcgacggatgggcgtgaagagccgtcagattccgggcccacaacacctttaccgaacaaaaagttgttgctcttcatcctcgacaggctacagaagaaggatacgtatggtgtattttcagagcctgttgatcctgaagagctacctgactatcatgacattataaagcatccaatggatttttcgacaataagaaagaagctcgataaggaggcctatttcaacttggagcaatttgaggatgatgtgttcctgataacctccaacgcgatgtgttacaattcaccagatacaatatactatcgacaggcacgaggtattcaagagattgctaaaaaggattttgagaatcttaggcaagatagtgatgccagtgaaccagaaccggaaccagaacgagaacccaagccggagcccgaaccagaagaaccaaagccacagcctcgccggggcaggcctccaaacaagaataatgccaaacagaaagttgggaagccaccagcagaacgtgccactgcagacttttctggtgcaacacttgctactgcggcaaatattggacggcatgcacaggcagatgttgatctgtcacgaagagtaatggataaagcgatgattgcggatgtgttgagagcttcttttgccaacctaaggaatgagcacaactggtctggtgagcggaagtttgaaagacttgaagcttactcaggttatgggggtacatggtctgcaaaaacggggaagaggccgattctgatggaagatagtcgccggagcacatattatgagactcaaccatccagttcaatatatgagctgccggtatcgtcctcctacaatgggaccgagaagctgctagtaccagttggggttcagttaccgcagtcctattcccacagcctggcacgttttgctgcacaacttggccctgttggctgggaaattgcgtcaagacgacttgaacggagccttgctcctggaacaaagtttggtcgtggctgggtaggagatggtgaaacgccgccgaacccatttcagacacctgtactcgctgcattttcagaaacaatggcaccaccgagcagtatagcagcatcaggtgagcagccatctatgaacgcgccccccgccacagaggcctgtgctggcagcataagccatcgggtgggatctcagccatgtgcttctatcagcacagtgcagacgataaattccgaagcattagcaagccagcaatgcggatccgtaccacaggtttctataaaccgaggcgaacgtgctgttgagatgaagggcagcactaataatcttcacgggcacccggccatgccgcaaactatgaatggtttcaatgccgttccaggacgggtgctgttcccacctgcggctcaactggtggtgagtcagatgcagacacatacggctgattgagtaacaagtagccattggatcaacattgtcaacatggcaattgaacattgcccgcttccattcatcagtcgcggtcaccaagcgacgacggccttaagccgcaccctgccagtggcttggcgcccaccacattgggggtgtctggtcgctgttgaatcgtcgcgcctcaacctggcgctgcaactgtgaatctgttgtgtaattgcgtaagtaggaattaggatgataacgtgcatagatgtgttgggcggatggtgtaacagcggtgagttgcagtttggagatttagcgattctgaatgtgtagtagaaaaaccacaggggaaacgaaacaacatctgtatagactattcaggatcaggaggtttttttagcgtttcggcgactagcaacaggtgcgatcgagcatgaaatcgtgcgaaccagattgtctgttgccggtattgtttctatatacatcaatctgacggtgttctgggttgcaggtaccacagtccacagtgtaggtaagaagtagaatcatgcggcaacaacatgaatgccctgttccaatctcgcgagataaactttagcagcttttttag

SEQ ID NO: 17635 - DNA, 669 bp, Zea Mays
ccagattcttagaaaagctggtcagaacacagctgaaccaaacatggcccacgtcatatcgggagattcaacacgctatttgtgacttgtgagagcaaaccacaccagtcaccagcctcattgcctcaaccccaaaccaatccgtcgcagacactcaaggtcgcaggatgccgccgccgcgtgagcaccaccagccccaggacgaagaggacgacgataccgcaggcgttgtcaagctcatcagcgccgagggcttcgaattcgttgttgacaggaaggccgccatggtctccaacaccctccgcaacatgctcacatccccaggcggcttctctgagacgcgccagggcgaggtccgcttcccagagatccccaccaacatcctcgagaagatctgccagtatttctattggtcgctccattactccagtgggaaggagacagcggagtttccaatcgaaccggagataaccctggagcttatgatggccgcaaactatctggacacttgatgaggagcctgagggatttgatctgatctgatccgatccagtgtggtctggcacaatgtaatgtaaaggtgggagggaagcagaaaccaaggaatacattttgcaatctacagtgtgtgctactatcaactcttggtagtgttttgttgtcaaaaca

SEQ ID NO: 17636 - DNA, 1533 bp, Zea Mays
ttgagataagacagcacaagacaaatgagtatacatctgagaaggagagagttattatctgtcacaatggcctccagagatcacactggcttgacccgacaacttcttgattttcaacatgatacaatagatgaggtaggcgcaggacatgacccattcattgatttgaaagcgagattcatggactttaaacagagaaactatgtggaaaaattttcaaattaccaaacccttgctgagcagcaaacaccaaagttcatggtggttgcttgtgctgactccagggtctgccctaccgctgttttggggtttcagcctggggaagcatttacagttcgtaatgtggcaaatttggtaccaccatatgagcatggggggacagagactagtgcagcactagagtttgctgtcaataccctccaggtagaaaatgtactggtgataggccacagtaggtgtgggggcatccaggcactaatgagcatgaaagatgattcgacctccggaagcttcattaaaaactgggtttcaattgggaagagcgcaaggttaagcacgaaagctgcagctggaaatatgagttttgacatacagtgcaaacattgtgaaaaggaatcaataaatagttctctgttgaacttgttaacatacccatggattgagaagagggtgaatgaaggcactttgaatcttcatggaggctactacaacttcgtcgattgcacatttgagaaatggacattgttgtaccgtgaagggttggaaggtggaagcaagtatgccataaagaaccggtccacctggtgttgaccaacgaaggtcgtgtttacttggaagcacaataccacaatggagtgaggtgcaacgcgcgatggacaatatggttgcaaggtgaaagtctgtggaactgccgggggcaaagtgaattttatccaactatctgtaatatgtgtgctgttttccggttgaaactattaagaaaaaaataggaataagctgcaggatcggtcgtaatgcgtgtaattgtcgccacatttggcattaccttgctattgtaacatttgtaccatttgttgtatcattataactgagatatatacggtctcgtcaaatttgcttggtgacaatgttgtttgtttggaatggaagggtcggcaatggaaattccgtgatattctcacatgtaaaaaggtatgagtagcaccgtagcacacatgccagagtccttccctttcccttctgtctccaatcagtcacccgcttcgacagcgccactgcccactgtcctactaaaccctggcgaggtgcgccgagaagcgctgcctcttgtagcagcactcggcgccgagcatgtcctcccggctgagcagcacggcccggagcgccgcctgcagcgctgggcgcgacgacgtgcccgcgtcgtcgccgttgtgctgcccgccgacgtccagctccaggacgctccgcgtccgcccaccgacggtggctatctcggcgcgcacggccctggcgctgacggagcgcacggcgcgg

SEQ ID NO: 17637 - DNA, 893 bp, Zea Mays
gtgagctgcagaacgcggggaaagctggccttgtgaccatccaagggaagatttctgtagtccttgggactgtattgattagtgcctacctgtttataacattcttcccagaccaggctgagaagctttttgacttggctggcatcagcttgtgatcagagctgatgttcttcggtactccacttcataatcaggatggttgatcaagtcagattcactcagatgtttccagactgaaaaggaatttttgctctgtgtactattagggaattcttgagagattagcacttaaattctttgaaacatcccttttctcgatgtacctcctatatatatcgtatgcttgattcatctacatgtttgtgttgctttttgaagtatctagacctgcagttatgattcaggatttcaaatagaagctttttatccatctaatcatgctcatccacttgagaacattgaccctgaaagattatgtagaccttgataccaattgcagttgcagatgaaatgattgtcttgtgtaatggtgtaataatagatcttgcactttttggggtgtgttagcgtcaatctgggtgccagtcactgggagttgttccgctcggtgggctctctgtggcggcgcggacggtccgcgacttggacagtaggagcagggttccctgtgccgagccagacggtctgcgctgcgctgggctggcggcgttcagcaacgacacctggaatctcgccctccgagagggaccttgtcaggaaggagagatcctagggtttatcttgggatcgataggccacccaatatgtctctagatgatgtagagtcacataggtgaagattgggataaagaagactatgttactggactcctagggcaagaatgtaaagaaat

SEQ ID NO: 17638 - DNA, 2187 bp, Zea Mays
gtccatttcctactgacgagtcttgaagccgtgtgccgtgaagcgaccggccagccgatctgatatctgactgacccgcgccgcctgtcgccgtctgcccccacccttcccctccaaatccaacagcgggagcaaagccaaaccaaaccagcttactgctccgctccgctttgttgccaatttccgctccaagcgtcgcggtcgtgaagtctcgttgcgatggattcgaggccccgcgagactgacgcccccggcgacccggccaacggcgccgcccctccgctggccgcggcggtgacggccgcgaccggggacgtcgagatcatcaggccccgcaacgacaagcgtgggtaccgccgcgtcgtgctccctaactcgctcgagtgcctgctcatcagcgaccccgacaccgataaggcggcggcgtcaatgaatgtttcggtggggtacttctgcgaccccgatgggctggaagggctcgcacacttcctcgagcatatgcttttctatgccagtgaaaaatatccagaagaagacagttactcaaagtacattgcagagcatggtggttcaacgaatgctttcacatcttctgaacacacaaacttctattttgatgtgaacagtgatagcctgcacgatgctttagataggtttgcccaattttttatcaagccattgatgtccccagatgctacacttagggaaataaaagctgttgactctgaaaatcagaaaaacctcttgtcagatccttggcgaatgagtcagcttcagaagcatctttgtgcagagaatcatccttatcataagtttagcactggaaattggaacacacttgaagttaaagcaaaggagaaaggattggacacaaggcttgagcttattaaattttatgattcacactactcagctaacttgatgcaactcgttgtgtatggaaaagatagccttgataacctgcagaaccttgttgaaaataagttttgcgatattagagatgttgggaggaagccattttcatttcctggtcatccatgtacacctgaacatctccaggtccttgtcaaagcagttcccattaaacaagggcacactttgagaatcttatttccaatcactcccaatatccgttgttacaaagaaggcccttgcaagtacattagccatctgattggtcatgaaggagaaggatctcttttttacgtacttaagaagttgggatgggctatgagtttggaagctggtgaaggggattggagtcatgatttttcattcttctgcgttgttattcagctcacagatgtaggccaggaacacatggaggatactctcggactattgttcagatatataaagttgctgcagaactctggaactcctaagtggatatttgatgagcttcaagctatctgtgagacaggattccactaccgagacaagagcccccctatcaattatgttgtaaatatttcttctaacatgcagatttttccaccaaaagattggttgattgcgtcatctgtgccatcaaagttttcaccagatgctattcagaatgttttaaatgaactgactcctgagactgtaagaatattctgggaatcgaaaaagtttgaagggaaaacaaaattagcagagccatggtatggtacatcatattctgtcgaagttgtccctccatcaatcatacagaaatgggtagggaaagcccctgaggaagatctacacctgccaaagcgtaacatcttcattccaagtgatctttcactgagaagtgtagaggaaaaggtaagttttcctgccatgctgaggaagacacaattttcgagactctggtacaagcccgatacaatgtttttcacacccaaggcttatatcaagatggattttcactgtccactatctcaaagctcacctgagtcggcagttcttactgatgtattcacaaggttgcttatggattatttgaatgattatgcttatgacgcccaagttgctggcctctattatgttgttaagccaaatgacactggttttcaggtaactatggttggcttcaatgacaaaatgagaacccttttggagactgttattggaaaaattgcagaatttgaagttaaggctgaccgtttttctgtgataaagggttagggtttctgcttctatcagagaggcccatggcgg

SEQ ID NO: 17639 - DNA, 135 bp, Zea Mays
actcgcaccacgacgacgatgatccgagcggcaaggattggcaccttgggaggaggggattgaggggggcggctagggtttggtggctgcaagaatggagagaggaggagatgggcaggggggcgacggccaagg

SEQ ID NO: 17640 - DNA, 1855 bp, Zea Mays
tgggccgacacatccacttctcatataaataacctcgaacccatactccggcgaaaacctatagcttgcagcgccacctacaccgagcagccaagcgaggaagcgaagacccatttccccgagcgcaagagtaccatggcggcggcggcagtttatggcggcctcaaggggaagcttggcgtcgaggatgcccccgagctgcagctgaatcgcatccgcatcaccctctcatccaagaacgtcaagaacctggagaaagtttgtgcggatttggtaaagggagccaaggataagcatctgagggttaaggggcctgtcaggatccctactaaggttctccacatcaccacccgcaaatccccttgcggtgaaggaacaaacacatgggaccggtttgagttccgcatccataagagggtgatcgacctgatcagctccccagacgtggtgaagcagatcacctctatcaccattgagccgggtgttgaggtcgagaagaaggtgcgggcgtcggcgcgcgtcaggcgctcccggggccactccgtccttgtcacgggcgccgcgggcttcgtcggctgccacgcggccgccgcgcttcgacgccgaggggacggcgtgctgggcctcgacaacttcaacaactactacgacacggccctcaagcgcggccgcgccgcactcctcgcccgctcgggggtttacgtcgttgacggcgacatcgccgacgccgagctcctcgccaagctgttcgacgtcgtgcccttcacacatgtcctccacctcgccgcgcaagccggcgtgcggcacgcactcgtggaccccatgtcttatgtgcgcgccaatgttgccggtctcgtggcgctgctcgaggcggcgcgctcagccaaccctcagcccgccatcgtctgggcgtcgtcgtcttcagtgtacgggctcaactcccatgtgcctttctccgagcatgacaggacggatcgaccagcctctctctatgcagccaccaagaaggccggcgaggagattgctcatgtctacaaccacatctatggtctgtcactcaccgccctcagattcttcactgtctatgggccatgggggcgtccggacatggcgtacttcttcttcaccagggacatccttgctggtcggccaattaccgtctatgagagtgccggtggaggttcacaccagactaccatttcccgggatttcacctacattgatgacattgtgaagggctgcgtagcggccttggatacagctggtcggagcacaggcagtggaggcaagaagcgaggtacggcaccgttcaggacttacaatttgggcaacacttcacctgtgcctgttacacagctagtggatttgcttgagaaactgctcaaagtgaaggctgtgaggaaagttgttaagatgccaaggaatggagatgtgccatacacgcatgctaatgtaagccttgcacaacgggagctcggttaccatccatccacagatctgcaaacaggcctcaagaagtttgtgcggtggtaccttgagtactaccatcctgagctggctgagaagcagaagctgcgtaccagtagcaatggcaagggttcacgtggtcgcaatggcagctcaattagcgcaagatgactgtgtatttagtgcctttatggcctctcctgacggcgtgtatcagaattctacctccattccttaattcatcatattgagaggctcattttgctcagcaaattgtgaaagtggaacagaagttaagaaatactcactagttattactttattggtgtgaatgatgtcacatgaaattttgaggcaaatcaaatggtttagtttaagtactacaatt

SEQ ID NO: 17641 - DNA, 417 bp, Zea Mays
gggcccatctacctaacctagcagccgccgctccctggcttctctccccgccacagccgtcgccgcctcccttccctcttctctctcccctcaactctcctcattctccacaggctgagcagcagccgccccattctgcggttcaatcaccgcccacgcagaacccctccgccctccgctccttccagctcgctctctacctgcaccagcctcgctcgccctttgctcgccgccgccatggggaggggaaagttcaagggaaagcccaccggccgccgcaacttctccacactagaggagatcgctgctggtacttcaggtcgccctcgcacctttatgaagacaggcaaggctaagagaattgatctttttatgggcgaagtgtgaagatggcttgggacgaattctctagatcgc

SEQ ID NO: 17642 - DNA, 2265 bp, Zea Mays
gatccacctaccaattgttttatttatagctttatccaggaggccggctgggatgaagacctggtgaacaaatcatacccttgggtagaggacaagattgtccagtggcctaagatcgcgccttggcaggcggcgctacgggatgggctgctacaagcaggtgtagcccccttcaatgggtacacctacgatcatgtctctggaacaaaggtgggtggcaccatctttgacgagactgggtaccgccacacagctgccgacttactagcagctggagatgctagcaacctgaaggtgctgctccacgctagtgtgcacaagatagtgtttggctcgcgacaaggacgactgaaggcaagagccatcggagtcgaattcactgatgaggatgggagacaccaccaggcattcttgaacagcaacagagacagtgaagtaattgtatctgctggtgcgatcggcaccccccagctgctgctgctcagtgggatcgggcccaagaacgacctcaagaatcataacattccagtggttctccataacagatatgtgggtaaagggatggctgacaaccccatgaactccatattcataccaacaagaagccctcctcggcagtctctcattgaaactgttggaataactgaagaaggcgtgttcattgaggccagcagcgggtttggtcagtcgtcggagagtgtccactgccaccatggaatcatgtctgctgagattggacagctgtctaccattcctccgaagcaaagaaccctggaagcagcccagaaatacgcccataacaaacttaatctgcccaaagaggtattccacggcggttttatacttgaaaagattgatggtccgatgtccacaggccatctggtcctcacagacactgatgtccggaacaatccagcagttaccttcaactacttcagtcatccacaggatctcaatcgctgtatctatggtatcaagaccattgaaaggatactcaagacaaaccgtttctctgaactctctgctgatggtgctgggttatcgatggaaagggtgctcaatatgagcgtgcaggctaatgtgaacctgataccgaagcatacaaatgacacagaatccctggagcagttttgcaaggacactgtgatcaccatctggcattatcatggtgggtgccatgtagggaaggtggttgaccagcattaccgggtgcttggagtttcaggtctccgggtggttgacggctcaatattttctaaatcgccagggaccaaccctcaagctacagttatgatgatgggcagatatatgggagtgaagatcctaagggaaaggctgggacgagcagctggagtgtagtcgattcctggacattagctttttattatgtgtggcctaggaaagaaattactaattttttgtgggatccagaatgaatcgctgaagaaaaacaagccatgtgtttcatctgtacccagtaatcatttgtctaatatgatatcgcagactaaatggttgactgagcccctctttcttctttttttcttgtttattaagtggatttcaagaaacaaactcccatgaactgctccctcattaaaggaagattgagattgtttaacaatatcacaccaaagtaccagacgaaataaaatccatggaagagtgttgtatatcaacaaaagagaagaaaatccattcacaaaatcaaataatctgactttattacgtcagaaagtatttggtataactctgctacataagtttcctctctgagggggaaagaatgaaaagtaaaatcgcactgcatcgagagctcatcagattacatttacatctggtcatcattttactcagttcgaactaaagagactctgaaatcatcaattagcagcacccaatacataaatattttttccaaaaaataataataattctagagccttacaggtatcctgagaccgtcatagctaagctggatgtcaagaccgtctgttccaatcagcctggcaagatcactgtttactttctcatggtccatcaaatgcatcattcctgaagataccattcaatacaactcaatcattggcaagaccagacaaactgtataaacaatgaaatatgggacattagcctagtaatgaaatcgggtcaaataattataagcatcaatgtctataaacaagaaaagatatcgcttgatcttcgaatgctttaatgatggggaaaaggggggaatcattgaatgctaacaacagtaagctc

SEQ ID NO: 17643 - DNA, 525 bp, Zea Mays
acaacaaatgaagacatggaagcttgagcaatttgcttttttgtttgcttggtttttgtcccagaacttggttatgcaaccgaaacatacaaattggcagatttgaacgcggaggctcaagaatctggagatgatgaagatgataatgtgtgggaagagggttaatgctgaaaagataactggcgacccctgctccctctcgaattttgaactggtatcccgtcacacgggtcaaaattatttcactgatgagcctgattatgttgaacgcatgatcacaagaaatttttagttgaagatgtacaaaatatacttatatttgagtagcgggttaacatttttctctgttacttaaatatttgagtagcgggttaatatttgatgtgtgggggcaacttacacgcctctgtttatctgaaaggaatcagagtgaaaaatgacagatccaaacttctatacgtacatgcacgtttatgtcctgaaagtgaaattgcaatctttcgatacccacgtttgacatatagt

SEQ ID NO: 17644 - DNA, 670 bp, Zea Mays
tgactagagctaaataaatcctgaaaatatagattgggtcgaagaaatcggtgggcatgaacagctaaatgagaagcttcttaagcgaaagaaaggcgaggagcttccaacgtttatacccccaaagccaacactggaagcattgattgagtcagggtactcgctggtgaaggagcaggaactaataatgagctccaagctttcaaaagagtatatgaagaacttagaatagtttgatacacgagaaggggtaacttcttgttttcagtttatttggagcaataatacaccatccaatttgttccaacatccaaccaccggagtcgaatcgatgcttcgattgtcccagaaatcgtggtgggttcagatatgaactgctgaaaggaacgcatatcgtcattgtccttaattactctcatcgtgcattgccaaaaagtctttgggttgactcgaaagacttgtgagctgtgccacggagtggcccatgtatgtatgtatgtggagcgagcggaagcgtccaaagagcctcatcagtcctccttctgacacacagtttatacctgcaagatcgctgattatttctcgacatgccatgctgccacggccttgcgcttgtgcaggttcacatcgcgatagtcaatagtactggaacaagaaatctgcagaaatc

SEQ ID NO: 17645 - DNA, 1568 bp, Zea Mays
atctgccaatttatgttgcaactgggatactacaatgtgcatctacctgaaagaattgtgagctaggggaagcaaaaagtgagatatgggaaagttggtttcccagacaatgaaatcactgctagaaacatcataattgccactggatctgttccttttgtccccaagggcattgaaatagatggtaaaactgtatttactagtgatcatgcactaaaacttgagtcagtccctgaatggattgctattgttggaagtggttacattggacttgaattcagtgatgtatacacagctctaggaagtgaggttacttttgttgaagctcttgatcaattaatgcctgggtttgatcccgagattgcaaaattggcgcagaggattcttattagtcctcgtaaaattgactatcacactggtgtttttgcaagcaagattaccccagcaaaggatggtaagcctgttttgattgagctgattgatgctaaaacaaaagaacacaaggagacacttgaggtggatgcagcactcatagctactggaagggcacccttcaccaaaggacttggcttggaaaatatcaatgtcgttacacaacaaggttttgttcctgttgatgagcggatgcaagttatggatgcaactggcaatgtggttcctaatttatattgtatcggagatgccaatggtaagctcatgcttgctcatgcagccagcgcacaaggaatctcagttgtggagcaaatcagtgggagggacaacattttaaatcacctaagcatcccagctgcttgtttcactcaccctgagatcagtatggttggcttgacagagccacaggctagggagaaggctgacaaggaaggatttgaaataagtgttgtaaagaccagttttaaggctaacacaaaggccctggcagagaatgaaggagatggacttgctaagatgatttatcgccctgacaccggagaaattcttggagttcatattttgggcttgcatgctgctgatctcatccatgaggcatcaaatgccattgcccttggaacccatgtgcaggacatcaagtttgctgttcatgcacacccaacgttgtctgaagttctggatgaactcttcaaggctgccaaggttaacacagctggttcgcattctatgaatgagccagttgcggtgtagagaggagccatagttgaaacaatctatctgctgcagccccacaccccagttatattgcctttagtacttaactagcctgctactcagaaaactgattttgtagccatttgcggacattttcgttatgagattcaggattagtgccagcactatctatttcatgagaaaatagaaatccaatgatctgtcccatgtatggaaaaatgtaaattttgtagtccttgtagagtaaatgtagtgcctttacgtggcaaaactcgctcttatgaatctatgattacttcaattcataagatgggcttgtttggtcagcattatgaatttttacagcttaggtcagcagctaccgtatctcattctttatttcattcttatttcaatcttca

SEQ ID NO: 17646 - DNA, 2016 bp, Zea Mays
ccacagcagcccagcagcactgactcctctatttatgatggctgcctgcaccaagagaagagggagatcgaatcagatatcgcccactactcaggactaaagcagtagtgtactcgtacaattgagccgcaagaaaagcatcgcatccatcgtcttctccatcagtccatcccgattcccgagtaccattcgattctatattccgccattgttgatcggctcgctcgccttccttggttcatcactagtaacggcaggaaaggagccgagccattccaatccaagattgattcagtgctggccatggagaaggagactccgccgccgctgcatacggaccaggagactagtgtttcatccgagcaacaacgtccacggccgcatctctccatcgacatcccggcagcatcaagcctgccggcagatcacctgctcccgatggctacggcgacgcaggccggcaccagcatcaccccgccttccaccaggagggggcaacagacaagcagcaacatcctcagcacgcccgctccttcctccagctctagcaagccaagcagcaggccgcctctgcgctcgccgtccttcatgctgaggcagacggtgaagagcctgctgccgttggggagcttcaagtcgtcggccgtcaagagctacgaggcctccatctccaagctgttcggcgccagcgccaccaaggtgatggccaggacgccgtcgctgccgctggaccatgctctgtcgtcgtcgccacatccaccaccagttcagcagaaatcagccgcgctccaccacatgtgccgctcgcagtcgctccccacgaccaccaacatgaagaaggcgaagctgctgaacgcggccaacgccaagagctttaagcggatggactcgctcggcggcacgttccgcgtcgtgccttccacgcccagaacccccgccaccgccgtccccgacgacatagcccctgctccaccaggcggcccaggggtcgacggcggcgaggacataccggaggaggaggccgtgtgccggatctgcatggcggagctgtcggagggcagcgacaccctcatcaagctggagtgcgcgtgcaagggcgagctggcgctggcgcacacggactgcgccgtcaagtggttcagcatcaagggcacccggacctgcgaggtgtgcaagcaggacgtgcagaacctcccggtgaccctgctgcgggttcagagcgtgcagcggcgggacctcctgaatcgcggcggcgccagcaacacgcccagatacgaccggtacagaatgtggcacgggacgcctatccttgtgatcataagcatcctggcctacttctgcttcttggaagaactactggtggcccatgacggcattgttgcgctggctatatcgctgcccttctcatgtatcctgggcctcttctcgtccttgaccaccacaagcatggtggcaagaagatacgtatggatctacgccgcggctcagttcctcttggtcgtcttcttcacccatctcttctacagatacctccatttgcaggccgtgatctccatcatcctggcgaccttcgccggcttcggcgtgggcatgaccggcaactccatcgccatcgagatactgcggtggagggcgaggcgggtggcgcctcctacccagcaggcccgccgtcgtcgtcaccgcaggccgcgtgcacctcaacatcaggctcctgatctgccggcgtctggttctgctgatcagacttccagccagccttcagctgcagacatgggaatgggaattggagcgggacagcaccacgtcatggccaccgccgccggcgatgttgagaacccacccgtccctcaggcatagaacgtcgttactgtggagcaggagcagtttgtagtttgtagtttacctgagagggaccttgttacactagtatatatacatgatagtacagatggagtctgaatcttgtttctctacgcatgccttgtgaaagagatcatcatttggcgctgtaaaaat

SEQ ID NO: 17647 - DNA, 200 bp, Zea Mays
tataaatactaaataccaaagaagtatatataaatactaaataccaaagaagtatatataaatactaaataccgacaaattttatttaggtattttcttgccgggcactaggtgttctttaaaaaatataggtctttttttctagaggaagacttccatgatggaacacagcggtcggaacaaagaggggaaaatgtttt

SEQ ID NO: 17648 - DNA, 8580 bp, Zea Mays
  misc_feature (8579)..(8580): n is a, c, g, or t
atttggaagagggaatggttcgagaccggtccttgtataaccagaggcccatcgccctcgtcttcctccaagtccgtccccgtctctacccccaccccaaaccctcggctcgcgagcgcgagggagaccccttcctccgagtccataacacggggttgccattcgcgtcgggggaaacgagcccgcgcctcctgcccctgcactcttacggtcctacctccagccatccgctcctccgcccagctcgcggagtcttcccagcgccgatcttcaaaaccctaagctctggcgcggtaaggttggagccggacgcgcacgggcggggcgcccgccatggcgcccatcaacagcggcaacatggagcagcactcgcagcggctcctcgagcccgacctccctgtgcaagtccgactgcagcttgccatggaagttcgggacagcctggagatgacgcacactccagactacctcaactttcttcgctgctatttcagagccttctcagcaattctcaccgcttacaccaagccacaggccacagagaatgctgagcacaagctacggaatgttgtgatcgagatactcaaccgccttccacacagcgaggtgctcagaccatttgtgcaggatctgctcaagctttctctccgtgtgttgacacaggacaacgaggacaatgctctccttgccatccgaattgtgtttgacctcctccgtaacttccgccctactgtcgaggcggaggtgcagccatttcttgactttgtggttaacatataccataaatttcccacaaccgttagctacttcttcgataatcccaacacaagtgccagtatggctgcctccatgcccatgcagcatttggaccccactgccgatgcctcagtcatgatgcaagtgcctggtggtggtcaactcaacccaagcgcacgttccttcaagatagtcacagagagccctcttgttgtgatgtttctcttccagttgtatgcaaagcttgtgcagacaaatatcccgcacttgttgccactcatggtggcggccatctctatcaagggtcccgacaaggtgccgccacaccttaagacacccttcaacgatttaaagggtgcacaggtcaagaccttgtcatttctgacgtacctcctgaagagcaatgcagattacataaagtcatatgaggaaagcatatgcaagagcattgtgaacttgcttgttacgtgtcctcctgattctgtctccatcagaaaggagctattggttggtctgaaacaagttctcaacaccgagtacaagcgagggctgttccccttgattgacacacttcttgatgaaagggttctgattggcacaggtcgagtttgcatcgaaactttaagacctcttgcttacacccttcttgctgaattggtgcattatgttcgagaagatatttctcttccacagttgtcacggatcatctatttgttctctcggaatatgcatgattcttctttgacccttataattcatacaacatctgcccgcttgatgctgaacctggttgagcccatatatcaaaaaggtgttgaccagcaaagcatggacgaagcacgagttttattggggcgcatattggatgcattcgttgggaagtttaggaccctgaagcgaacaatccctcagttgcttgaagaaggtgaggaagggaaggaacaaccgaatctgagaatgaagcttgaagtcccattacagactgtgctgaatttgcagcaacctttggagtatactaaggaaatcaacgattacaaaagtctgataaagactcttgctgtcggaatgaagacaataatatggagcataacccatgctcactggccacgcccccagcaacaaaatcaacagtcttccaatttgtcacttcaacacttcagggggctgagggaggatgaggtgcggaagacatctggtgttctgaagtctggcgttcactgtctggctctttttaaggaaaaagacgatgatagggaaattctgcaatcattttcgcagatgctggctataatggaagctcgtgatattatggatatgttctccttttgcatgtctgacctctttgattctatgataaccaacaaccagctattgcacatattttcaacccttttgcaagctcccaaggttctgcggcctttcacagatgtattaattaatttccttgttagctcaaagcttgaagccctgaagcagccagattcacctgctgcaaagcttgttttgcaacttttccggttcttgttcattgctgcagctaaagctccagaaagctgtgaacgcacacttcagccacacgtgccggttataatggaagtctgcatgaggagtgccactgaagttgagaaacccctaggttacatgcaccttcttcgaaacatgtttcgtgcattgaacagtgctaaatttgattcattgatgcgtgatcttataccatctctgcaaccctgcctcaatatgttactctccatgcttgatggtccgataagtgaagatatgcgggacttgattttggagctttgcctgattttacctgcccgcttgagttctttattgccccacatacctcgtctaatgaaacctcttgttcttgctctaaaaggtagtgatgaccttgtgagcttagctctacgtacacttgagttctggattgatagtctgaatcctgactttttggaacctagcatggcaaatttaatgtcagaagtcattcttgctttatggtctcatttaaggcctcctccatacacatggggcacaaagtctttggaacttttagggaagctggggggacgaaataggcgatttttgcgggagcctcttgcacttgaatccaaggaaaatccggagcatggattacgtttagttctgacttttgagcctgcgacaccttttttggttcctctggacagatgcatacaccaagctgttggtgcagttatgcaaggcaatggcttggaagcattctacaggaagaaggctcttcaattcattcgggtgtgcctcgattctttgttaaatctgagggaaaatgtacctggcgagggtgtgagccctggtgttctcggtacattgctaatctctaacctggatccctcaagacgtcggaatgatgcttcagatatgaagggagatttaggtgtgaagacaaaaacacaactactggctgaaaaatctgttttcaagactcttcttgtagctatcattgcagctaatgctgacaccagtcttcatgatgagaaggatgattatgttgtcgatatatgccggcattttgctatgcttttccatgttgactcaccatcctccagccaatctggatttatgcatcctattggttcttcactcccatctatcatcatgggatcaagatcaagatgcaacacttcatctaatctccgggagctggaccctttaatatttttggatgctttagttgaagtgctatccagcgaaaatcgtcaacatgcaaaagctgccctatctgctttgaatatttttgccgagacattaatctttcttgcacggatgaaacacactggtatgctaaggggaggtcctagcacccccatgctagtctctagtccatctttaaatccagtatattcacctcccccaagtgtgcgggttgctgtatttgaggaattgttacctcggttattgcattgttgctacagtagcacatggcaagctcagatgggtggtgtaatgggtctcggggcattggtcggtaaagtgtctgtggataccctatgcatttttcaggtcagagtcgtgcgtggtcttctttttgttcttaagaggttaccagtgcatgcaaacaaagagcaggaggagacaaatcatgtcctaacacaagtacttagagtagtaaacaacgcagatgaagcaaacagtgaacctcgacggcaaagttttcagggagttgttgaattccttgcacaggagttgtttaacccaaacgcttcaatggttgtgagaaagaacgtgcaggcttgcttatcactgcttgcaagcagaactggcagtgaggtttctgaattgcttgagcctctctatttgccattgcttcagcctctgatttcacgacctcttcgttcgaagaatattgagcaacaggtgggcaccgttactgctttgaacttctgtcttgcactcagaccaccccttctaaaactatctcctgaacttgtcaattttttgcaagaagcactacaaattgccgaggctgatgaaactatatgggtcactaggatgatgaatgcgaaagtagttctcacatggaacaaactcagaaccgcatgcattgaactactctgtactgcaatggcatggggagatctaaaagctcaaaatcatactgaattgcgagcaaagattatttcaatgtttttcaaatctctaacatgcagaacaacagagattgtcaatgttgctaaggagggacttcgtcaggtggttcaacagcaaaggatgccaaaggatcttctacagagcagcttaaggcccattctagtaaacttagcaaacacaaagagccttagcatgccattgctacaaggattggctcgcctgcttgaattactgtcaaattggtttaatgtcactttgggtgccaagctattggatcacttgaaaaaatggctggagccagaaaagcttgtccagactcaaaaatcttggaaggctggagatgaaccaaaaatagcagcagctatgatcgagctgtttcaccttcttcccccggcagcaagcaaattcttggatgaccttgttaccttggtaattgatctggaaagggcacttcctgaagatcagttttacagtgagatcaacagtccataccgtgctccactggcaaaatttttgaatcgttatgttctggaggctgttgactattttcttgctcgattaagccatccaaagtatttcaggaggtttatgtacataatctgctcggatactggggacctaagggatgcacttgcaaggtcacctcagaaaatacttgcaagtgccttttctcagttttactctcaaagtgaagcatctgctgctcaattatcttctgtaaaggatgaagcccttactggggctgtatctgagagtattactgtacaatcttcatcaaacatggttactacttctgagagttactttaatggattagagcttgtctcagcccttgtgaaattgatgccagagtggctccgtaacaaccgggttgtctttgacaccttgctacttgcttggaaatcacctgcaagacttgcgaggttgcagaacgagcaggatttgagtttaccccaggtgatggaaagcaagaggctgatcaaatgcttcctgaattacttaagacacgatcgaactgaagttggtgcactctttgatatgttatcagtattcttgtaccgcagtcgtatagattatagctttcttaaggaattttatgtcatagaggttgctgaaggatactccccgaatttgaagaaaactatccttaatcattttctgaacattttccagtcaaaacaatatggacaagatcatttagttgttaccatgcagattcttatacttccaatgctagctcattcatttcaaaatggacaaagttgggaagttgttgatcctactataattaaaactattgttgagaagcttcttgatcctccagaagaggtcagcgctgaatacgacgaaccattgaggatagaacttcttcagctagctacattacttttgaagtatctacagactgatcttgttcaccatcgaaaggaactcataaagtttggttggaatcatctcaagcgtgaagataactcgagcaaacagtgggcctttgtgaatgtttgtcatttcttagaggcctatcaagctcctgaaaagattattttacaggtcttcattgctctgctacggacatgccaaccagaaaacaagctgttggtgaagcaagctctcgatatcctcatgcctgccctacctaggagacttcctcctgaaaaaaatgatagccgcatgccgatatggatcagatacaccaagaaagttctcgtagaggaagggcattcaattccaaatatgattcacatattccagcttattgttcgccatgcggacctcttctatagttgcagagcccactttgttcctcagatggtcaactctcttagtcgccttggattaccatacaacacaacagcggaaaatagaaggcttgcaattgaacttgctgggttggtagtggcatgggaaagacagagacaaagtgagatgaaagtggcgcaggaaagtgagagccagaatcaattaggtgacatgcttaatccttctgttattggtggtgatccaaaacgctcctctgatgttccgtcgtttgctgatgatttgagtctacctgatgaggagtataaacctaatgcagcaatggaggagatgatcattaccttcctaattagggtatcacttgtgattgagcctaaggataaggaatctagctcaatgtacaagcaagctcttgatctactgactcaagctctggaagtctggccaaatgccaatgttaaattcaattatctggagaaattacttgggaatctgtcacccactcctcagtccaaggaccctgcatcagccctcgcacaaggacttgatgttatgaacaaagtcttggagaaacaaccccgtctcttcatccgaaataacatcaatcatatttctcaaatactggaaccttgctttggcaacaaaatgctggatgctggaaagtcactttgttccttgctcaagatggtgttcagtgcttttcctcttgaagcagcaacaacgccacaagatataaagttgttgcatcaaagggttcaagaactcattcacaagaatcttgctgctgttacaactcagcagatagcacttgagctcaacaatgctcactcaatcattagcttttcattgtttgtcctcaatgcacttgcagaagtacagaagaatttcattgacccgttcattggcttgcttttccgtgttctgcaacgtcttgcacgtgacatggggtcttctgctggcagccatatccgacaaggacagaggcctgaactggattcatcagttaactcacggtctaccatagattctactgtcatatctaacatgaagactgtcttaaaacttataagtgagagggtgatgtcctcttctgaccacagaaaatctatgggccaaatacttcaagctcttctttcagagaaaggcactgattccagcattcttctgtgcatgctagacatgataaaaacttggattgaggaagattgtaggcttgcttcatcaactggttctgttagttcacttaacccaaaggaaataataacttatcttcataagttatcattagttgacagaaaaagctttcctccagctgcacaagaagaatgggatgcaaaatacttgcagcttctttattcactgtgtgcagattcaaccaagtatccgttgtcttttcggcaagaatttttccataagattgagagacagtatatgcttggacttagagctaaagatccagaaatgaggaagcgattcttcaagctttaccatgatacagtgggaaaaacattattttctagattgcaatttataatacagttacaggactgggaagctgtgagtgatgttttctggttgaagcaaggtcttgatctcgttttggcaatattagtagaaaatgaaccaattacacttgcagcaaattctgctcgagtaccaacgcttatgatagctgggcctgttccagatcgcatcaccatgccacagcaggttcctgatgctcaggaaagcatggatggtacaacactatcgtttgactctcttgctgcaaggcatgctcagttcttaaatgacgcgaacaagcttgtggtggcagatatcatggctccattgaaggaacttgcatttgctgatcccaatgttgcatatcatttgtgggtgcttgttttcccaattgtttgggtcaccttacataaagaggaacaagttgccctagctaagccaataatcgcgcttctatcgaaagattaccacaagaggcagcagggctgcagacctaacgttgctcaggcacttcttgagggtcttcatttgagccatccccaaccacgcatgcctagtgagcttatcaaatatattggaaaaacttgcaatgtgtggtatattgcaattgcattactcgagagtcatatagtgcatatgaatgaggccaagtgctccgagtcattggctgagttatacagacttcttaatgaagacgacatgaggtgtggattatggaagagaaaatcaatcactgcagaaacaagggctggtctttcacttgcccagcatggttactggcaacaagcacaaaatctattttaccaggctatgattaaagctactcagggaacatacaataataccgtcccaaaggctgaaatgtgcctttgggaggaacagtggttgtcctgtgcgtctcatttaggtcagtgggaagtcttagctgnn

SEQ ID NO: 17649 - DNA, 1038 bp, Zea Mays
tatattggagaaaattgtgctgttgattgtctacttctggaatggtaaagagggaaacatctttcacgtctcaatgcacagcacaggagatcatgacaaaaatagaggatgcatgtgggccactcggtttcaacgtgcggaaacaaaattacaagatgaaattgaaaggtgacaaatctggaagaaaaggtcacttatctgttgcaactgaggtttttgaggttgccccatcacttcacatggttgagcttcgtaaaaccggaggagacacattggagttccacagcttctacaagaacttctcatcggagctgaaagatatcgtgtggaaagctgaatctgacgcaaataataaacagacgaataagtgatacccagagaatctgtgtagccctcatgaggccacattcagatagatcacctcttcgggtgataccacctgcttggtactgtatgcttttttttttactggtaccacattagcagccaaaatctcttgtaaacgggaactccttctgaatgagcgcaattgtacaaaacacatatgaagaggccctccgtgagatgctccgaacactgcaatgggatgtcaaatagttctgaatggtgagtgctgtttttgcatctataggggcatatatgtttccattccatgtgcatgtaccgttgttgtatgcgcatgggggtacgtgtgcagcaggagagagagaacatctgaacgtgtcctgagaggaaaaaaaaagtctatgtccgtttctaaaatgctttggttgtcaccagggttgagtgcctttgttttatgaaaatggacaatggagaatgatgtatgaagcttaactctagtatttgggagtaaaagtatgtttggttggatgtataatgaggaatggaagggggtcgtcacactttctatagtgtttggatgaaagttaagcggtgaagaggtaaatgccggagtaattttttggtggtgtagggaatgttgagatccacatagttgtacttggttggatacgctattatttttagcacatatta

SEQ ID NO: 17650 - DNA, 1536 bp, Zea Mays
caataaacgagtgtcaaataaataaatccaaatcaagagaatacaaagtgcggcatataaggaaaagaaaaaaaagctaataaaggccttccatttccactccccgtcgtgtcgcttcctccctcttcctccggagctgcgaaattttgagacccagccgggaaagcggaggcggagactacccaccccaccaccagccccccggaattcgcgcaaatcacagaagctccctagccgccggcgagcactcgtgcgctcccctggaagcggcggaggcggcggcggagcccgcctctctgccggcgccggcgatgggcaactcactggggtgctcggcttccggcgagcggctcgtctcggcggcgcgcgacggggacgccatcgaggcgcggatgctgctggagctcagccccgcgctcgcgcgctactccaccttcggcggcctcaacactccgctacacttcgccgccgccaagggccatctcgacattgtcacgatgctgctggagaaaggcgctgacgttaacgcgcgcaactactgcggccagactgcgctgatgcatgcttgtcggcatgggcactgggaggtggtgcagatgcttcttctatttagatgcaatgttactagggcagattacttgagtggtcgaacagcactgcattttgctgcacatgatggatttgttcggtgtattaggcttttagttgcagactttgtcccgagtgtggccttggaggatattgcttcttctgtggtggatggtggtgattgccagacaaacagtgggagcagtcctaattcatcgtcggggcagaagtttaatgaatcggcccgtgtgaggtacatcaacaaacctgcagatggtggtgttacagcacttcacatggcagcattgaacggtcacttagattgcatgcagttgttgattgacttgggcgctaatgtctcagctgtctcattcccctatggcactactgcaaatttgataggagctggcagtacaccgttgcattatgcagcaggtggggggaaacaagaatgctgtgagctactaatatcaaaaggcgctagcaggttgacactcaattgcaatgggttgcagtcatgaattctgcatcaaatgtgctctctacctctgctcaaccagcaacatccgtgtcgagttcacaggcccacctgggtccatcccgtgccctctttgtcggaacggcataatgtctttcaccaagttaccaagcacaccaacagaagggcttaaatcagctgtctcttcggagctggtctgtccaatcacctgcagcccattcccgtcgtccgccctcccaacctgcaggtgcagcgacgacgatccatgcggcgatacagacgtgcaggatggtcccgagttccagtctccccggccctcgcacagcgcaagcatggagctggacaagaggggggagggggatctagaccgggccagttgctcaggcatgttctggagccgaagaagctgtcacagggagcagcagtgtgatgcggagatcaacgcttga

SEQ ID NO: 17651 - DNA, 770 bp, Zea Mays
ggggaggcttacctcggtttatcctttctggtatcccactcgtgggaatctccggcattgggtcttcccgaccagttgcaatcttgttaggcagtggcggagcacctgttatggccaactatggcttgagccatacctaaaagtcatgtttggtgtagtgagatgtacaccagaaatggattgagggcgggaactacgagctttgcatcgaagatgtgagggatgaaatctgggacatggtgaagcccgcagatcctctcaggatctcgctatcagatcttctttcttgcaagcaaggcgggactatcgccagcatgcttgtagatgtgcgtggcttctgggcccatgacaacagggagaaccttctccaggaagaggaagagcaagtggaagagacatgagttctgttctccagctgccaagtaactgtatccagatccagtgcatcaaaaccgcaacatcctcgggaactgcatgcaccgcggtatcattcactgtaacttagctagtgtattagattcgtcgccacctgtttcccctgaagcttattgtaaagtgtgccatattggtcttttgaggctagcgtggcttggccatgttgacatctgaacactatcccgagggcctgattgaatgctcacagcctctgctgcctgtatgtacatgtaaattgtgccaagcgcgcaatcctgactactctatatgtaaatacattgtgttcagctcgtacatgattgttacgtggtcttgaaagtccgcctcaatttcca

SEQ ID NO: 17652 - DNA, 749 bp, Zea Mays
cctcggtgtttcataatgacaaatttctcgcccgcgaggggccggccgagtacctgagctgatcacgagtctctcagcgagtgctggagagcccactatgtccgccgccggcggcgacctgccggagactgtggaggtgacgctgcgcgccgtcggcccgtcccgtccaaccaccctccgcctccctccgcttctctcggtcgccgagctgcgcggctgcatcgcgcgcgaacgccgtctagcaggcacggaagaagttcgactccgcttgatcctgcgggggaagacgctcccgcaccaagacgacagccatgtcactctccgcgatggggatactcttatagtcgccgtggcacctaagcctcctgttaatcatcttcttgatgatgacgttgaggacgaagaagaggatgaactgaagttcagaataccacaaacgacaaccttgtggaagaggaaattttttatgtttcttcgagacaaattgagattgcctgatatcattttgatggcgctgttttctctcagtatgaaagcatggattatcattgcaatgtggttcctattggcaccgattgctcagaagtacgacattggacctttatatataattggtactggtttcttgatcatacttattaatctcggaagacgacagcaaggtgatgttagttctagtttgtctgggcctgtcaccagtggcggagctaaagggtggtccgtgtgtcctagcccaaaaccaagtaaac

SEQ ID NO: 17653 - DNA, 1274 bp, Zea Mays
gccgttaccctattccctccccgtcgctatccaccccatcgcgttgccggatcgagcttggctctctcgaaccttgcttcgccgcacggcaccaaaagcacggccgcgctctcatccccctccacacgtttccgcctcccgatccatagccgccgtgagccgccgccgacatagctcctccctctcgcagctctccagctctcggaggcccgcggctcatcaacccgcgcttcttcattctcgacatctcacccggcggcgcggacgcgcagtgcacatcacgagccgcacggcacagccgctcttgttttccttcggttgcggttcgacgcggccacgggatggcggcgagcgctcgggacagcgctgatgcggcggagcgagtcgtggatgaccacgacggctgggcgtcggacggcgagatgggcatggagatggatgtggaaggcgagttccacgaccgcgatgccgaccggagggatggcggcatggatggtgatgatgagtacttgctgctcactaggataagggacacatcagcagctgaagcaagggcaggaaaggatatacaaggtataccatgggagaggatacacatagccaggcaagactaccgaaaagctaggttggaacagtataagaactatgaaaatttccctcaatcaggagagctcatggataagttgtgcaagcaagtggagaagagcagcaagtattatgagtttcagcataacactagatcagtgaagccatcaattctccattttcagaggttcttgacttctctgggcacattgctccggtggagaagcatcctggcagtttgctagaaggtttctctggggttcaagttagcacacttgctgtgaatgagggtttgttggtagctggtggttttcaaggagaactgattggcaaggatttggaaggatgtaatataaaattctgtgcaaggacaactttgagtgacaatgctataacaaatgccatagatatacacagatcgacaagtggaagcttgcgcattacggtatctaataacgattgcggtgttcgtgaatacgatatggagagatttcagctcttgaaccactaccgatataactggccagttaatgcctgatggagcctccacgtgagggggagtattggagtataaatgagttgcccacctttccataatcagcttaagaatttgggttgaaatgatcagtgcatgcaacttaataatatatttaatgctttgacattcattatttgcttctataacaaca

SEQ ID NO: 17654 - DNA, 857 bp, Zea Mays
cgagcgccgagggggggagggcaaaccgggagagagagagacacctcctccttttcccccctttgcattgggttgccgcaacactacagacacaaacacagtctaggaggcttcttccgctcgctcaggttgagggcaagatcatcaaggcgcagatctgggacacggcaggccaggagcggtaccgggcgatcaccagcgcctactatcgcggggcgctgggcgcggtcctggtctatgacgtgagcaagcccaccaccttcgagaacatcagccggtggctcaaggagctacgcgaccacgccgactccaacaccaggatcatgctcgtcggcaacaagaccgacctgaggcacctccgggccgtcgccaccgacgacgctcggagcttcgctgaggcagaaggcctgtcctacatcgagacgtccgcgctggaggccaccaacgtggaggaggcgttccagctcatcctgggcgacatttaccgggccgtcagcaagaagcctgtggcgtccgacgaggttggcgccggccagggaggcgtcaaggaaggtaagaccatcgatgtggcgactggtgctgatgccgccgctcacaagaagcagtgctgctcggcttagaagttagaagaacccatgctggtggtctctcgttcagtggcgtatgtgttgttgtgatggttgtcgttgttgttttttttctcttcttccagtccaaaagtttgttgattcgttttgccagatagtacctttgttggagggataatcatgctcacatatatattctctaaagcaagcagttatatatgattataccatcaccaagtcaattgtcttgtagcatcaagtagtgtcagc

SEQ ID NO: 17655 - DNA, 1009 bp, Zea Mays
cctgttcaaaattttatgcccccaatctccaaataccccggttattgggtggcctccagttcgtgccttcagaagaaatctggccacctctagcagagcatcccttgaacatcagaatgggaagaaggaagacaaacctgaacagaccacaaaaagagctccatttgtaaagatcaacatggacggcatccctattggtagaaaaatcgatctgagtgccctcggtagttacgatgagctgtctctgtctgtcgacaagctattccgggggcttcttgcagcacaacaagaccctctggctgccggcgcaaaggagtgttcacaggaagaggtggcgatatcgggtttactagatggaactggggagtacactctggtttatgaggattatgaaggcgatagggtgctggttggcgatgtcccctgggggatgtttgtttcttcggtgaagaggctgcgcgttctgaagacatctgacctctcttcatctctaacagcacctcctggccagaagaggacggtaactgagtgtccagtgtttacctcttagacacttccttgcagtgatgttggtgtgctgtgaagaagaaaacgtcttctgagcttgtatcatctttcttcgtggtttcttcctcttcttttccctactttctcttggaagggatcatcaaagaaccgaaccgaccttttgggttttcctgctcttgtttattttgtttctctttccgggaagcgatgtgaccttttgggttgtatgtaaatgttcagacgaaccagctctatgtttatgcagcctatcctgtctgttgccttttacacaccgaggacatgtactgtttgttgtggtcatgatggctgaaatcgacgatttttttcccgtcaacatgcatgaacaattctggtcatgttatccgtttggtgggggtttgcagcggggatcttgaagttctggagcagagtagtatgccatatttcatatttgttagaactgtttcatatatactttgga

SEQ ID NO: 17656 - DNA, 396 bp, Zea Mays
attcagcaaatcgccaaactcctggggttgccccctcccgtgcccctagctacctaataattgtgcgctcctattcctgtggcctcctaacgcaatcgctcgctcgctcgctcgatatttagccgtggagaggggccgagggagggagcctgctccgctctgcagcacgaacatgatgaagccatcgtgtgtactgcttctttccagccttcttgtagccactcttgcagctacttcttcgtcctctcctccgtattccgtcggcaagcacccagggtggctgctggttctaggtcgcaaaggcagagaactcggccagtcgtcagggtaccattattaccagcatcagagcaagcagcccgagacagagaacctgacacagctatccgtccatgg

SEQ ID NO: 17657 - DNA, 1063 bp, Zea Mays
attggtgtgggttgcgacttgcgagtgtatgagatctgactcctgtgcatcatcagaactatgactgatcattgccttgatgtaattctgatgctcttcacaagttccatatggtcatgatcttgtctcaagtagaggatcgtacagcgatgaatggcatgcagatttacttggctgctgttcagaaccggctttgtgtttgaagaccttgttcttcccctgtggaaccttctcgagaattgcttcaatcgccaaggacaggccaatgtcttctggggaggcttgcaatgatattatggcgtactccctaatattgtcctgctgctgttatacatgctgtgtaaggagaaagcttcgtcaaaagttggacattgcgggaggctgctgtgacgacttcctttcacatctgctgtgttgttgctgcgcgcttgttcaagaatggcgggaagttgagattcgcggagcttatagcgaaaagacgaaggtcacaccaccagcatgccagtatatggagcactgaacagctgtatgcccgtacgggtagacccgaacttctgtaaagatattaacagaatatctgatatcgtactgcaagagcagtggtactacactgctcctgtgtagtgtttattcttactgtctattgttcgtcctggtcctggaacttgcatgtatatgttggggcatagcaccagagtatgtactctgtaaaaacacatcagttacaggctggtagagcctaacatcgcttaacaccgtcagttattggcaaaaaagttctttgtgcgtgtgcgtgtttaccttaatagcagttaaaaaaaagaagagctttagtcacagattggaaagatcgatggagcccagaattttagaacatatgaacattgcagaaatgggaccgtataagggtgatgtagatgaatcaaacactgatcataccttccctctgacctatgggacatcaggccttcatcctgtgcttctgtccatcgcgaagaactcgtataatgtcattgatgaaatgtacgcgttcttgggagtatgaacagaatttgtcctagag

SEQ ID NO: 17658 - DNA, 1418 bp, Zea Mays
acacgcctctacagatccaggcgctcttctgctgcagcgccgcctctcgtcctcccggcgtcatcgtcgccgccctgatctccgcaggccggcgtgtggcggagatccatccgtgcttgaactgactccttccttagctagtggtagctcaagaggacgcagacaaaagcgtggtgaagatgtggtgcatactatgaaggtttccttagacgatctgtacaatgggacaaccaagaaactatctttatcgcggagtgctttgtgctccaagtgcaaggggaaaggatccaagagtggggcatcaggaacatgccatggttgtcgtggtgctggaatgagaacaatcacaagacagataggccttggcatgatccaacagatgaacactgtttgccctgaatgcaaaggatcaggtgagatcataagtgacaaggacaaatgcccaagctgtaaaggaaacaaggtagtccaggagaagaaggtgttagaggttcatgtggagaaaggaatgcaacataaccaaaagattgtattccagggtcaagctgatgaagctcctgatacggttacaggagacattgtttttgtcttgcaacttaaagaccatccaaaatttaagaggatgtacgatgacttatatgttgagcacacaatctctctcaccgaagcattgtgtggcttccagtttgttcttactcatcttgatgggcgacagcttctgatcaaatctgaccccggggaggttattaaaccaggtcaacacaaggccattaacgatgaaggtatgcctcagcatggccgtcctttcatgaagggccgtctgtttgttgaattcaacgtggtgtttcccgagcctggtgcgctctcccctgcccagtgccgatcgttggagaagatccttccgccgaaaccagggagccaactgtcggacatggagctggaccagtgcgaggagaccacccttcacgatgtcaacattgaagaggagatgaggcgcaggcagcagcagaagaagcaggaagcctacgatgaagacgaggaggaggatgctcaaccaagggtgcaatgtgcccagcagtaaaatccgtgttcgttggaactgttctccaaaagtttcagcaggattttttatccatctgatcatctcgattctttttggcaaaaatataatcgttttataaactttaaactgttagttccatcctagtgtcagggaaaaaatgagagcccggaatggcatgttccttgtttgaactgcaatgcgtgattggtgttagttaagctctgctccatgttattttgttgtacccgtgaaaaaggtatcatgttcatggtgtgctactatttttgatgtgtaagaaacattgagcttgctggtagtgatgatttgtgatgcaccctggggtgctggctcaaaa

SEQ ID NO: 17659 - DNA, 1880 bp, Zea Mays
ttttttaataaatgataaaacaattgtgtttctcattgtcaataaatagttatttggaatactccatcattctaattttgtattattccatggaatagatggttggctgtaaatcaaggggttattcgttcacacgtgcacttctgggactttgttcagatgaacttcatgtctgcggtgacccagctgctgttccccttatccagcgaattcttgaagctactggtgatgtagttacggttcaatattatgagagactatctcctttggttcctctgaaatctccacttgggtctttctctaacatcaaggcaggagattgtttagtatcattctcaagacgtggaatttataaactcaagaaaagaattgaaagggagggaaaacatctttgctctgtggtctatggttcattgccaccagaaactcgaacaaagcaggcgacaatgttcaatgatgataccagtgaccttaatgtgctagtagctagtgatgctattggaatgggtcttaacctgaacatttccagaattattttctctactatgatgaagtttgatggtttctgcaacagggaactaactgtggccgaaatcaaacagattgctggtagggctggaagatatggatctaagttccctgttggagaagtgacctgtctaaatcctcaagatctcccattgctgcactcgtctctgaaatcagcttcctccattatagagcgtgctggactttttcccacatttgatttattatctttgtattcacgattacatggaactgacttttttcaccctatactggaacgtttcttggagaaggctaaactatcaccagactatttcattactgattgtgaagatatgttgaaggttgctgctattgttgatgatttacctcttgggttgtatgataaatacctcttctgtatgagtccggtggacgtaagtgatgatatatctgcccaaggactagttcagtttgcagaaaattatgcaaggaaaggaattgttcgacttaaagaaatattcacacctggaacattacaggttcctaaaacagacaatcaactcaaggagcttgaatctgttcacaaggtcctagagttatatgtgtggttaagcttcagaatggatgattcctttccagaccgtgaagtagctgcctctcaaaagtcaatctgtagcatgttgatcgaagaatatctggagaggtttggatggcagccacaagaccgaagaaaggttttgggtggagcacaaaagctgctccaagaatacgatgtatcacaaatgaacaaatattttcaagaagtcaacccaggaccgaagtagaaggactatacaggaaatgagcctcaccacttccagtccagatttgaggaaccaataccatccagagcatttgcgttctgcctcactggttatggatcaccggcacaaagtggaactacacttcggacgaccgaagatatacgtggacgcatctcaaaccgtgatcatctagattgatttggcagcacgcatttccatcagccagatcgtgatcgactagtaggacttttttccccaaaaatgaaactacactccagtcttaagtcataatgaatacagagccatgagcccatgatagggccgcttctgagacggagattgtgtattaacgggtacacagacggtacttgcattctagtctgagttcgatgagttgcagcaatagcggctgtaatcctgtatataaagagggaaaataatgttgcttgtgctgttatttattgcaagatctgaatgtttgtgtccaatgacaatttagtagacattttacatgcactaactaatagctaatggcccgtgtgtacctttgtatatatcctttcagat

SEQ ID NO: 17660 - DNA, 507 bp, Zea Mays
atatttggtttgctgcttagtcatttgaaggttaggaaactggaggcgtacatcatcagttattggtacaagaaagggcacaaaccaatagagcatcctttgctcccagatgcaagaagaatagtgaagtttgacccatatgacgactcagtttcaaccagaatataatgtaatgatgtatcttgcacctgctcatcagagagtgagatctactgtttgtagcttagggtgtgtttgtttccttctaaattatataaactggattatggtggaagggtaagaccgtaagagagtaaaatattacattgtgacaacaaataagctgaaataaactaatattggatagcttattttagcttatttgtaatcccaaagtggtaccataatccaatttatataaacatacagggcctcagcagaagattacaagggataaacatatggtgtgtagatttgctgtctctctctttcactctcgcagaatgcaatttttcagggaaatgtctg

SEQ ID NO: 17661 - DNA, 1672 bp, Zea Mays
cctgccgctcgctcgctcgctctcctccgctcgattccagtggccctgctgccctcgtcgtccctctcccgagcgagagcagcaccggcagttcggacagagctgaagccttggaggagtaaaggtgtggtcttgccatggagcagccgcagcagcacaagggaggagcggttccggcgcctgcagcggcggccgcggagctgatcgggtacgtcgacgtgcacgtgcgtagcgcgcgggacatccagaacatctgcatctaccacaagcaggacgtgtacgcgcggctctcgctgccgggggacggcgcgccggcggcgtccacgcaggtggtcaacggcgggggccgcaacccggtgttcgaccagtcgctgcgcctcggcgtgcgcgcgggggacgtcgacgccgcgctccgctgcgaggtgtggatgctcagccgggtcaagaactacctgcaggaccagctgctgggcttcgcgctcgtgccgctcccggatgtcgtcgccgccgacggcggcacgctcgcccgcgacttcccgctcaccaccagcgacctcttccagaccccctcgggcttcctgcagctcgagctctcctacatcggggtcgtgccggaggtcgtgcccatctcgccgacgcccaagccggcgctggccgacccggaggaggaggaggagccggggaacaacgccgccgacggcgtcgggaacgggaaggagtacgagaagatcgagttcccggacctgaatctcgtggaggagaaccagatcatggtctccgagtacaccaggctgccgtgcgcggccgtggaaacgcagagctgcgacagcctcctgacctcggagcacgatgacggcgccacggccctgagccgggacgccgccgtgcgcctcgtagatagcttctcgacggacaacagcaccgccgactcggtgggcgccttccagagcgacacgccggtcagcagcgtgtctaccacggagttcccggccacccctcagtctaactccagctcggagccgtccgggaacgcccactcgtcggctgaccacaaggcgaaggcagcgtcggagaccgccgacgcggaggtcgactcgtcccgcaccgtccaggaggtcccgccggcgaactcgccctgcgccgcgtcggaggctgccgtgcacaagccggtgatcagcgtcaacatcgagcaggaggtgaaggtggacgggaaccaaatcatggacatgtacatgaagagtatgcagcaattcacggattccctggccaaaatgaagcttccagccttggacatagacaacggtagcagcgggaagagcagtcccgcagcagccacacccagcgcagactccactggtgccgactcgaccgcggtgaagaagccgaccgccgccgggcagcaggagaagccctctcccaaggtgttctacggcagccgggcgttcttctgatctccggttcgctgatcagcggtagcacaccgctccagccgccgagtaacgaagcaaagagacggcatttgcagtcgtctcagctgaatcttactagcgcagaggaataacaccttctcaggctcttgttctaggtttgtcagatcggggatgagttactgtctttaatgtatccgtcagtacttatgaaaaatggtttggtttctctgttttaaaaaaca

SEQ ID NO: 17662 - DNA, 2397 bp, Zea Mays
tagaggtggcatgctgcagttgattgcagcagatataattggccacatatacttttctgggtgcggatggaatgctatttggagcgctgggtccttgcccagtctgtgctaatggcatgtactattataatggtcagtaccaatgcagtggtaatgtgtcagagtggtccaagtgtacatactctgccacagaacctgtccgcgttaagaagaagtggcaaattccacatggaacaaagaatgattaccttatgaagtggttcaaatctcaaaaggttaagaaaccagagagggttcttccaccaatgtcacctgagaaatctggaagtaaagcaactcagagaacatcattgctgtcttctaaagggttggataaattaaggttttctgttgtaggacaatcaaaagaagcagcaaatgagtggattgagaagctcaaacttgctggtgccaacttctatgccagggttgtcaaagatattgattgtttaattgcatgtggtgagctcgacaatgaaaatgctgaagtcaggaaagcaaggaggctgaagataccaattgtaagggagggttacattggagaatgtgttaaaaagaacaaaatgctgccatttgatttgtataaactagagaatgccttagagtcctcaaaaggcagtactgtcactgttaaagttaagggccgaagtgctgttcatgagtcctctggtttgcaagatactgctcacattcttgaagatgggaaaagcatatacaatgcaaccttaaacatgtctgacctggcactaggtgtgaacagctactatgtactccagatcattgaacaggatgatgggtctgagtgctacgtatttcgtaagtggggacgggttgggagtgagaaaattggagggcaaaaactggaggagatgtcaaaaactgaggcaatcaaggaattcaaaagattatttcttgagaagactggaaactcatgggaagcttgggaatgtaaaaccaattttcggaagcagcctgggagattttacccacttgatgttgattatggtgttaagaaagcaccaaaacggaaagatatcagtgaaatgaaaagttctcttgctcctcaattgctagaactcatgaagatgcttttcaatgtggagacatatagagctgctatgatggaatttgaaattaatatgtcagaaatgcctcttgggaagctaagcaaggaaaatattgagaaaggatttgaagcattaactgagatacagaatttattgaaggacaccgctgatcaagcactggctgttagagaaagcttaattgttgctgcgagcaatcgctttttcactcttatcccttctattcatcctcatattatacgggatgaggatgatttgatgatcaaagcgaaaatgcttgaagctctgcaggatattgaaattgcttcaaagatagttggcttcgatagcgacagtgatgaatctcttgatgataaatatatgaaacttcactgtgacatcaccccgctggctcacgatagtgaagattacaagttaattgagcagtatctcctcaacacacatgctcctactcacaaggactggtcgctggaactggaggaagttttttcacttgatcgagatggagaacttaataagtactcaagatataaaaataatctgcataacaagatgctattatggcacggttcaaggttgacgaattttgtgggaattcttagtcaagggctaagaattgcacctcctgaggcacctgttactggctatatgttcggcaaaggcctctactttgcagatctagtaagcaagagcgcacaatactgttatgtggataggaataatcctgtaggtttgatgcttctttctgaggttgctttaggagacatgtatgaactaaagaaagccacgtccatggacaaacctccaagagggaagcattcgaccaagggattaggcaaaaccgtgccactggagtcagagtttgtgaagtggagggatgatgtcgtagttccctgcggcaagccggtgccatcatcaattaggagctctgaactcatgtacaatgagtacatcgtctacaacacatcccaggtgaagatgcagttcttgctgaaggtgcgtttccatcacaagaggtagctgggagactaggcaagtagagttggaaggtagagaagcagagttaggcgatgcctcttttggtattattagtaagcctggcatgtatttatgggtgctcgcgcttgatccattttggtaagtgttgcttgggcatcagcgcgaatagcaccaatcacacacttttacctaatgacgttttactgtataaatctaccaggagtgagtaatttatatattagcgggactggacctcttggtcgcgtgctatttt

SEQ ID NO: 17663 - DNA, 3592 bp, Zea Mays
  misc_feature (3591)..(3592): n is a, c, g, or t
gttttctagggttttggtacgaaaccccccttcgtcccgtcgcatttcgttcaaaatcgcgcggtcaaatccgagctcggggccatcgccgtcgccgcgcctcccatcccgcgaagatgagctacgcggcgtacaagatgatgcatttgcccaccggaatcgaccattgcgctgccggcttcatcacccactcccccgccgacgctgccgccttctccacgcccgcgcccgcgcccaccgccgccgctggacccgacggcgatattgactccactgcggctagggcaccccggcgagtgggtcctacccccaacctggttgtgtcggcggctaacgtgctcgaggtgtatgccgtgagggccgaggtcgcgactggggccgaggatgcgggtaattcttcgtctaccggcaccatcctggatggtatctccggggctcgactggaacttgtgtgccattacaggcttcacggtaacattgaatcgatggctgtgttgtccgatggcacagagaataggcgagactccattgcagttacgtttaacgatgcaaaaataacatgtctggagtttgatgacagcatcaatggcctgcggacaagctcaatgcattgttttgaaggccctgaatggttccatctgaaaaggggcagggaatcatttgcctggggtcctatcataaaaggggatcctcaaggcagatgtggtgctgtacttgtttatggattacagataataattttgaaagcagctcaggttgggcagagcttagtaggagaggatgaacctacacgcgtgttgagttccactgctgttcggattgaatcttcgtatgtgattgatttacgtgatctagaaatgaatcacatcaaagactttacatttgtgcatggttatattgagcctgtgttggtcatacttcatgagcgagagcctacatgggctgggcgtatctcatcgaagagccaaacatgcatgctatctgcgtttagtataagcatgggtttaaagcaacatccgatgatatggtctgctgctaaacttccacatgatgcatatcaacttcttgcagtgccccctcctataagtggcattcttgtgatctgtgcaaattcaatccattatcatagtcagtccacttcttgttcacttgccttgaacagtttctcatcacagcctgacggaagcccagagattcttaaaacaagttttcatgttgagcttgatgtagctaaagcaacatggttatcccatgacattgtgatgttttcatcaaagaatggagaaatactattactaacagtggtttatgatgggcgagctgtgcaaagattagatcttatgaaatccaaagcatctgttcttagttcgggtgctacaactcttggaagttcgttcatatttcttggcagtcgtcttgcagatagccttcttgtgcaattttcatgtggcatgccaacatcggttctgcctgatctaacagatgagcctgctgatattgaaagtgatctgcctttctcaaagcgcctaaagaggattccctctgatgttctacaagatgttactagtgttgaggaactttcttttcataataaggcagtgccaaatattgtagattcagcagagaagatctcatttgttgtgagagatgctctgatcaatgttggtcctctgaaagattttgcatatggtttaagaactaattctgatcccaacgcagcaggcattgcgaagcaaagcaattatgagctggtgtgttgttctgggcatggaaaaaatggaacgctctcggcccttcaacaatctatccgtccagatttaattaccgaggtggaactaccaagttgcacaggtatttggacagtttactacaagagttctcgtggaaatacaactgacaataatgaatatcatgcttatttgataataagcctagaaagccgcacaatggtgcttcagacaggtgatgatcttggagaggtcactgaaacagttgactataatgttcaagggagcacaattgctgctggtaacttgtttgggaggtgtcgcgtcatacaggtatatgccaagggtgctcgtgtgcttgatggttccttcatgacacaagagctaaacttttctatgcatacttccgaatcgtcattgaattctgagcctcttgcagctgcatctgcttcaattgcagatccatatgttctcttgaaaatgagtgatggatccattcgacttctcataggagatccttcaacctgtactatttctataaatgctcctgccatattcgcaagctcaagtgagcggatatcagcatgtacactatactgtgacagaggacctgagccatggcttagaaagacccatactgatgcatggttatccactgatgttggagaggctattgatgataatgacaattcttctcacgacctgtctgatatatattgcataatttgttatgaaagcggtaaactggaaatttttgaagtacccagttttaaacgtgtgttctctgtggataattttgtttctggaccagctatcttgtttgatgtgttttctcgtaattctactaaggattctggaataggggatcgagatgcttctaaagtttctgtgaagaaagaggaagcagcaaacattaagatagttgagcttgcaatgcatagatggtctgggcagttcagccggccattcctctttggattattgaatgatgggacattgttgtgttatcacgcatattattttgaaggctcagaaagcaatgtgcaatgtgctcctttctcacctcatggtggttcaccggatattggcaatgccactgattcaagactcagaaatttgagattttgtcgagtttcaatagatatctcatcacgagatgacatatcatgtcttgtacgaccaagaataacaattttcaacaatgttggaggttacgagggattatttcttggtggcccaaggccaacctgggtttttgtttgtcgacagcgatttcgggtgcatccacagttatgcgacggtccaattgtagcctttactgttctccacaatgtcaattgttgccgtggccttatttatgtgacatctcagggttttctgaagatatgtcagttgccatctgcatataactatgacaactactggcctgttcaaaaggtccccttgcatggcactccacatcaggtcacatattatggagagcagtcactttatccgcttattgtgtcagttcctcaggttcgccccttaaatcaagttctttcttctatggctgatcaagaattgggtctgcacatggagaacgatgttacaagtggtggtgacctccaagaggtctatactgttgatgaatttgaagttcgtattatggagttgggaaaatccaatggacgttgggagacaaggtccaccattccgatgcaatcatttgaaaacgctttaacagtgcgcatcgttaccttgcaaaacacatctacgaaggaaaatgaaaccctgatggccattggaactgcttatgttcaaggggaggatgttgctgctagaggacgggtgcttctgttctctttcagtaaaagtgaaaatnn

SEQ ID NO: 17664 - DNA, 226 bp, Zea Mays
gacccacggaataagtaaaataacgttaaaagtagtggtattttcacttgcgcccggaggctcccacttatcctacacctctaaagtcatttcacaaagtcggactagagtcaagctcaacagggtcttctttccccgctgattccgccaagcccgttcccttggctgtggtttcgctggatagtagacagggacagtgggaatctcgttaatccattcatgcgcg

SEQ ID NO: 17665 - DNA, 1819 bp, Zea Mays
tttaacttggatagaagtctatgatctttagaaggaaatggatatgggtccatggatgagctgaaggaacttgtgaagattttccatgaagctggtatcaaggttcttggcgacgctgttctaaatcataggtgtgctcagtttcagaacaacaatggtgtctggaatatatttggtggtcgtatgaactgggatgatcgagcagttgttgctgatgatccacatttccagggaagaggaaacaagagcagtggagataatttccatgcagcaccaaacattgatcactcccaagagtttgtgaggaatgatcttaaagaatggctttgctggatgagaaaggaagtcggctacgatggatggagacttgactttgttcgtggtttctggggtggatatgtcaaggactatttggaagcaagtgaaccatactttgcagtaggagagtactgggactccctcagttatacttatggtgaaatggactacaatcaggatgcccacaggcagagaattgttgattggataaatgctacaaatggaactgctggcgcatttgatgttaccactaaaggaatacttcatgcggcgcttgaaagatcagagtattggcgcctgtccgatgaaaaagggaaaccccctggagtattgggttggtggccttcaagagcagtcacatttatagagaatcatgatactggttctactcagggccattggaggttcccctatggtatggaactgcaaggatacgcctacatcctgacacaccctggcactcccgcagtcttctatgaccacatattttcacacttacaaccagagatcgctaaatttatttccattcgacaccgtcaaaagattcattgccgcagcaagatcaagatactaaaggcagagaggagtttatatgcggctgaaattgatgagaaggtaacaatgaaaatcggatcagaacattttgagccaagcggtccccagaactggattgttgctgctgagggtcaagattacaaaatctgggaagcgtcttcatagacttggcgggctgcgagtgccatataactgctcaaagactaaaaagctacaagaaagcataatgctaggagatggcgcctcagaatggtcagctggcgggagctgctgccgctgccgccatggagcagcaaaattcaacaacataagctatggaagcacttgccacggcgataggattatctaataggactactgttgaacattcgatatatccagaaccacccatcatttgcaggcacattggccattaaaatttagcttcgtcctctattttggagctatgtaaaagcatgcacaactctatttatgtgtgaaataaaatttgaatcttcatcatgggtcaagagatgtattttgccacccacaacatgacttcggtgattctacattcatagcatgcaaccgtaggcagaaatgatatattggacgaaccaaacttgaaaacatcgaaaagataacagtgaaggtgaagattccgagctttagacaatgtgtcaacggagtaatgtacttgatcacattgtcgtttgcagattcagttctcaacatctaaaaccagctagggagaccgcgaactttcaggatgacaccaagttcagagagagctgaggttcagaattatttcactcgacctcaagtattgatacggagacttgactgtgctaggactaggggggatcggcatcatcatcagggcttgaggaccagtgatagcccaaacttgggggtctgcaagaaatcaaacctgttgacgtcgacctcggtggatagggtgcagaat

SEQ ID NO: 17666 - DNA, 3846 bp, Zea Mays
ggtccttctcagtctccctcgtctccctcagatctaagccaccgtcccttcccccagctccggcgatcaccggagtgcctccgccttggggcatgatggacctcctcatcgcgcagatcaccactgacctccgctcctcggacgcgctccggcagtcgtcggcgctgctgcaggccctgcagcagtgcgccgcggggcgggacgtctccgcgctcgcccgcaccgcggccaccgagatcctgtcggcgccctcctccgccgtctgcaagcgcctggcgctcgacctcctccgcgcgctcccgctgccgccggacctcctcgacccgctccttctctcctccctccgctccgatctctcctttccagaccccgacgtcgccgcctcctccatcgcctcgttcccatccctgccctcccaccttctcccctcgcttctctcctccgcccacgctgaaatcgctaatgcactctcctcgcccgctgagtcgctgcgcctcgcagctgtcacatctctgtcctcgctcctcccgcgcgatgacctaacgctcatgtgctccacaaacccctccctcatggcgcatgctaccacgtggtggggccgcctggccgagcttgcgctggactctgcagacgctgtttccgccggtgcgtttgaggctcttgcacggctgttccaggagctagaggggcgccgcatgagccggctagctggagacaagcttgttgatggagaaggtgcgcttgcagtgcgtgcccagtgggcggctgatgccattgatttcatttggtcaaggcgcaacatgctgattgcgcgctctatggtgatgcctgtggagagcttccgagttactgtgtaccctctagtgcatgcagcaaaaatggttgcttctggtgtggtaaacactctgcggcgagttgctaagccaggagacactacaattgctgatagcgtggagtcgagtgcggagaaattggtaggagtgtcagacatcgtctcacacttgctgccatttcttagttcacttgacccaccactggtgttcgaggttgggatcaatatgctggcgcttgcagatgtccctggaggcaagccagagtgggcatcagctgcaattattgcaatcctgacactatgggaccggcaagagttctcttcgatgagggagacaattgtaagggctgttgtaaccaatcttcatttgctggatcttggaatgcaggtctctctattcaaaagactgcttcagatggtgagaaacttgagagcagaatcagatcgaatgcatgctttggcatgtatttgtcggactgctctttgtgttgatctttttgcaaaggagagtgtccgaagaggtcagaagcctgttcctggaacagatgtgatatcgctctttgaagatgtgagggtgaaggaagatctaaacagcgtaacaagcaaaaacttgttcagagaagagctagtggcttccctagtcgaaagttgtttccagctatctcttccactaccagagttgaagaattctgggacagagagcagagttataggagcgttagcctatggaactggttatggtgcccttaactggacagaacctgctttggatgtggtggaagtttgcaggccatgtgttctttgggactgtgatggtcgtacctatgcaattgattgctatctaaagttacttgtgaggctttgtcatatatatgataccagaggcggtgtgaagacaattaaagctggtgcatctcaagatcagattctgaatgagacacgacttagaaatttgcagctgcagcttatcagggaccttcgcgaggttcacactccacgtatatcttcacgcttgatatgggcaatttctgaacactttgatcttgaaggtctggatccccttttagctgatgacccagaggacccactgaatattgtcatatctaacatgcacaagatattattcaacaccgattcatctgctactacatcaaataggatacaagatgtgcaggctgttctaatttgcgctcagcggttgggagcaagaaatgcaagagcaggccaacttctcactaaagaactggaagagtttagggcaagtacttcagctgattctatgaccaagcatcaatcacgttatgtgttgcaagtaataaaatacgtaacaaaccatcctgacaacaggtgggttggtgtaggtgatgctacaggggattatccatttagtcaccacaagcttaccgttcaattttcagaggcgtctgctgcccaagataggaaattggagggattagtccataaggccatccgggagctttggaggccgaatcccagtcaattaattctcctacaaacaaggggaattggtgctttgcataaagagcttccaaaagcgtgtgctttgactggcagcagtgatccgtgctacatcgaagcatatcatttggcagatccaactgatggcagaattaccctacatctaaagattttaaatttgactgagctggaactcaacagggtggacatccgtgttggcctgtctggagcactgtattatatggatggtttctctcgcactgttcgtcaccttcggaatcttgtttcccaggatccagtccaaagtagtgtgactgttggagtttcacattttgagagatgctcgctctgggttcaagttttgtattacccgttttatggaagtagtggatcaacagactatgaaggagattatgcagaagaggattcacagatgatgaggcagaagcgctcacatcggcctgaacttggggaaccggttgttttgcggtgccaaccatacaagtttcctctcgctgagctcctcctaccattagagtgttctccagttgagtatttccggctatggcctagcctaccagccatggtggagtgcactggcacatacacatatgaaggcagtggtttcaaggccaccgctgctcagcagtatgacagctctcccttcctcagtggattgaagtcgatttcttctaagcccttccatcaagtctgctcacatttcatccggacagtagctggattccagcaaagacatggtttggtggatttgtgggcatgatgatatttggggcaagtgaagtcagccggaatgttgatttgggtgatgagaccaccacaatgatctgcaaattcgtcatgcgcgcatccgatgaatccatcacgagagagatcaaatccgacctccagggctggctggatgatatcaccgacggcgctgtggaatacatgcctgaggatgaggtgaagagtgtggccgccgagcagctgaagatctccatggagaggattgccctgctcaaggcagccaggccaaaggtcccacccgcaaagaccgatcaagaggaggaagaggagcgaaagcagagcgaggaactagatgggtttggaaaccccaagggcccctcgacgctctccaagctcaccgcggaggaggctgagcaccgcgctctccaggctgccgtgcttcaggagtggcaccagctatgcaaagagagagccatgaaagcgcagtgaggtcgatttggaccgtgtggatcttacgcgcatgtataattttgtatttttccttcgtctcccattctttgcgtgtctatactgctggtttcactcactgtataccgtcgccgatttgttcattgtattctcaaatacttgtgcacgaaaaaacctgttttgtaacatactactgttagggcgtttttaagcttcggtgtgaagatcgattgtacaagagaatccaaatgtcattgttgccttcccagttttatgaaaatgcattctgtaattgaagaattctccccaaaatgccacga

SEQ ID NO: 17667 - DNA, 1145 bp, Zea Mays
tcgtaataagcaagtcttaaaagctggattactgaaagatggcatttgtgctgtgcaagatgagagtgcaggtcttgtagtgtctgtggttgatccacaacccggggaaacgattgttgattgctgtgctgcacctggtggaaagactcttttcatggcatcacggttgtcaggagaagggaagatatgggctctggacataaacaaaggtcgtttgagaatactcatggacgcagcaaagttacacggtctagatgatatgatcactgacatccatgctgatcttcgactatatgctaaggaaaccacagttaaatatgacaaagtattgttggacgctccatgctctggtctgggagtgctttccaagagggcggacttacgctggaatagacaatttgaaaatttggaagagttgatgtgtttacaagacgagcttcttgattcggcatcaatgttggtaaagccaggtggtatactaatttacagtacgtgttcgattgaccctgaagaaaatgaagagaggattactgcttttgttcagaggcatccggaatttgctcttcagagtgtatgtggatatgttcctagagaatttatcacagatgaaggtttctattcctcaaatccaactaagcactctatggatggggcatttgctgcacgtcttgtccggtcaacgcactaagattataggagttgccacaaggccacaactaggtgtgaagttgaacaaggaatcacatgtattgccctaagtgcacccagtcattgcttcaatatctttatcttatatattcttgaactttgctgcgttttcctcttacgcttcacaaaaaaaaagcatatccaaacccataccatattgcttcttgtacggcacgcagattttttgaagcgttttcgctttgtattaaagtcatctgtttagactgctcagttgtaatatatatagaaaaaacactgtaaaaacagtagaagctatgtcggattaaagccaaatcagctgcctatttcaacgagagaaaccgtgatgagagagaaatcgctgtttcctgaagccttcaaccgttagcagccggtggccggggcgtaaaagacgaactactcgtcttcacggaaaacgacggtgaagaagatggcgt

SEQ ID NO: 17668 - DNA, 841 bp, Zea Mays
tctagtatctgtgtcaactaactccctcaacctacattctgatgaagatgctgcaaagaacgtgtccagtgctgtgtctctgctgaagggtgaaagtaagaccatgcgtagaaaagagaagcgtgctcggatagaacagatcagggtcatccttggcctttctgattctcaaaggactccagtgcctggagaatcactgagagatttctacaagaggacaaatatgtactggcaaatggctgcctatgagcacactcaacacactggaaaggagctccgcaaagacggttttgatcttgccgaaactcgattcaaggaactgaaaccgatacttgacgagctggctgtgctggaggccgagcagaaagctgaggaagaggccagtgcgtcgactagttccaagagggacaccaagaaacccaagcagaagagcgcacgaaggtagctttggttctgaacgagtgtgtaagcggaagccagctttagatgaagttgctccaggaagaggccagtgcgtcagctagtcccaactcccaaggtgtgaagaggggacaccaagaaaatccaagcagaagagtgcagggagatagttttggttctgaacgagtgtttaagcgtaagacggttttaaacgattgctcaaatgctcaagttcctttgaggggatttccattttctttttgaacccaagtagacaaaattgatatttgttgttttataatagtgtatgtatatactcgtacgttgaaatttgattcatgtgcaatcttgaccgtatattctcccactattcgactaaacgaacgatcttcctccacacagcatagaccatagagctcca

SEQ ID NO: 17669 - DNA, 1014 bp, Zea Mays
tcatggggctcccgtagcgtcgactgcttcgagaagctcgagcagatcggcgagggcacttacgggcaagtgtacatggcgaaggagacgggcaccaacgagatcgtcgcgctcaagaagatccgcatggacaacgagcgggaagggttcctaatcaccgccatacgcgagatcaagatcctgaagaagcttcaccaccagaacgttatcaagctcaaggagatcgtcacttccccaggcccagagcgggacgagcaagggaggtcaattgacgacaacaagtacaaggggagcatttacatggttttcgagtatatggatcatgacctcactgggcttgctgatagaccaggaatgcggttcattgtgccacagattaagtgttacatgaagcagctgcttacaggcctacactattgtcacgtcaaccaagtcctgcatcgagacatcaagggatctaacctcttgatagataacgagggtaacttaaagcttgctgattttggccttgcaagatcattctccagcgatcacaatggaaaccttaccaaccgtgtgatcactttgtggtatagacctccagagttgctacttggaagcacaaagtataatctagccgttgacatgtggtcagtgggctgtatttttgcagaactgctcaatgggaagccaatattgcctggaaagaatgagccagagcagctgactaagatcttcgagctttgtggtacccctgacgacacaatctggcctggtgtcacaaaaatgccatggtacaacaacttcaagcctcaccggccattaaagatacgagttaaagacttctttaaacattttgatcggcatgcactggatctgttagagaagatgttgactttagatccatcacaaaggatatcagcaaaagatgcacttgatgcagaatatttctggacttcacgagcgatgagcgcggccgtgaacaccatgaggatacgggcccccagatggcgtcggctgtgcaggcggccatga

SEQ ID NO: 17670 - DNA, 2485 bp, Zea Mays
taaacgaatagacccaccgcatctcaacatcctctcctcgtcttctcccaacgccgccgcagcgttcttgtcgggctccggtcaggtgaagtatgctgatgaacttcagggactggatctcgtaccggctcggttcctcgctgctgtccgccaggccgttcgcgctttcccccggtgctgatgacggcgcctccgagggtgatgctcatggtacagcacacaatgactttgtagatactgttactgccaatacattttcttctaatgatatgcgggcgtcagaggtcacagccaactctggtagtggtgcaatttattctggtattgttcaacaagatgatgataataagaagtcagatccactgatgaaagtcgaggcgcttcaaatcaagtttctgcggttagtatacaggactggagtgtctcccagtgctgatgtagttgcacaggttctgtacagattgcagcttgcaaatttgattaaagccagtgaatcagatgcaaggagaacaaacctagctatcaacaaagctagggttatagcagcacagcaggaagcaccgggtgggcctgatctggatgtctcaatgcaaatccttcttctggggaagtctggtgtgggaaagagtgccacaataaattcaatttttgatgagaggaaggttgctactgatgctctggttcctgctactcataggataaagaaaattgaaggaacaattaaaggaataagagtcacagtcatcgacacacctggcctggtgtctcattaccatggccaaaggaggaacatgaagattctgaattctgtcaagcacttcattaagcgatccccacctgatatcatcttatactttgagcgtttggaccatattaacagcagatacagtgattacccactgctgaagcttatgactgacatattggggtctccaatgtggttcaatactgtccttgtaatgactcactgttcctcatctcctcctgaaggaccagatggttacccattggaatatgatacttatacgcgttactgcaagaatgtggtgcagcgtcacatccaggctgcagtttccaacacgcagttggataatccatttgtgctcatagacaatcatccaatgtgcagacgaaacaccaagggtgaaagggttttaccaaatgggcaggtatgggtatcagaactgctgctgctgtgtggggcaaccaagttgctgacagaagcaaattccttgcttaagtttcaagatagcttcctactgtcacaagcaaacaccaggctgccttcgctgcctcatcttctttcttcacttcttaagcctcactcttcatccagttcagatgccattgacagtcaattgacagaaatgtcagatgaggaggatgaatatgatcaactaccacccttccgcattctaaagaaatctgaatatgaaaatttgaccaatgaacagaagtctgcatatcttgacgaactggactaccgtgagactttgtacctaaagaaacagtggaaagaaggaatcagaaggaaaaagcttactgaagctcagagtgatgaagttggtgatgattatgatgagagtgcatccccagagattgtgcacatgtcagatatggacattccactaagttttgactctgattatcctgtgcatcgttaccgtcacattataactgatgatcagttgtttagaccagttttggatccacaaggatgggaccatgatattgggttcgatgccatcaattttgaagcatctcaagagttgaaaaagaatgtctctgcggcaattacaggacagatgagaaaggacaaggaagacatgtatatccattcagaatgttcagtaagttacaatgctcagagaggctgctccttgatggggggtatggatatgcagacggcaagcaaagatttggtctgtactgttcatggggatgccaagttccacaatctgccttggaacagtattggaggtggcatttctgttactaagtttggcaacaagtactttgctggggctaagttagaagactctgttaccattgggagacgagttaaactggtagccaacgccggtaggatgtctggctgtgggcaggtggcacatggaggtggtgtggagattacagcaagggggaaagattaccctgtgagggaagggagtgtcactgccgcggtctctgctttgtcatttgaaaaggaaaccgtaattggggccaaccttcagtcagacttccgagtgggccgtggatcaaaaatatcagtcagcgctaacctaaatagtagaaatttgggcaatctcagcgtcagaactagcacatcagaccacgctgagatagctttgataacagttgtctccttgatccagttcattcttaggagaagatcagcagcagataataaagatgagcaacagattggcaccaatttggatgactaaataacagtgttcttatggtggtaaggcgagcaagcaaa

SEQ ID NO: 17671 - DNA, 3787 bp, Zea Mays
cctcacacatctggctgcacccttgctgtgatggcccatgtatgcgctctttccatgcaaaagaaggaagtggtgaagactcctgttgtgttacccttggatacactgaggcagaagttgaggcaatgaaattatttctttgcaagaattgtgagtataagcaacaccagtgtttcatctgcggagtgttggaaccttcagatggagaagcagccaaggtgtttttatgtaacaatgctacatgtgggcacttttaccacccgaaatgtgttgcccaacaacttcaccccatcaacattgatgaagcctcagaattggagaagaagataacagaagggttttcatttacatgcccaattcactggtgctttcattgcaaaggtttggaggatagaacacaagaacctttgcaatttgctgtttgcagacgctgtccaaagtcatatcacagaaagtgtttaccaagcgaaatttcctttgacgaaaatgaagaggacgatatcatcatacgggcttgggaattatcaaaaagaattttgatatactgcctggaccatgagattgatagtgaacttgagacacctgtcagagatcatatcaagtttccaaagattgaaaaaccacttcaatttgtaaagaagggatctagcttgttgcctaagaagaaaaagaggacttacagtgagacagttcttgagcaatctcccaaagatactgtgaaaaggaaaagcaaggttcacatgctagaaagggaacaaaacaaacaagacaccagagaagtttctgcaaagagtttcactcaaaaccttgttgacacacctgtaaagaaaaaagccaagttgaaagagaaaatacagttgccgtatgtggccaaggatcattttataagcagtccaaaatctgtgaaagagcaagaacaagagttggtacctttgcccttatctgccatcaggaagagttcatttcctaaagtggacagtgaaactgaaaagagggtgattaccatattgggaaataaagtgtcttcattgacaataaaagatgtaacgaggaattgcagtttgccatcaactcatgtatactctggcagattgactgacaagataccactgggaaagattgaacgttctgttcaggctgtagaagcagctttaaaaaagctggaaaatggaggtagtgtcaatgatgctaaagcagtatgtgaacctgaagttttaaggcagcttgcaaggtggcatagtaaactcagagtgtatatatcaccttttattcatggcacaaggtacagttcctttggtagacattttacaaaggtggagaaacttgttgagattgttgatagacttcactggtatgtggaaactggtgacatgatagtagatttctgctgtggggcaaatgattttagccgtcttatgaaagaaaaactcgacaaagttcagaagaagtgccatttcaagaattatgatcttatccaaccacagaatcgcttctgctttgaaaagagggattggatgactgtgcagccaaacgagctgcctcatggatcccaactaattatgggtcttaatcctccttttggagtcaaagcaagtcttgcgaacaaatttattgacaaagcattgacattcaagcctaagctcattgtactaattgtccctaaagaaactaaaaggttagatcagaggagaacaccttatgatttgatttgggaggacagtgagtgtctttctggcaagtccttctatttgcctggttctgtggatcttaatgataaaatagttgaagggtggaatgcatctgcgccacccctctatttgtggagtcatcctggttggacaaagaagcacatgcaagtggctgaagagcatggtcatacttgtatggggaagatagcttgccatgttgaagagagtaatctatcagatgacctgtccgtgaggaaacaatctgatgctacaaacaaactgaactcgagatcagggaaagagactccattcaatgacagaatgtccaatctacttgatgatggttctgctaggaagcaagcaagatctgaagaagagaagagaactctagggaagatagaacaccatgtgaaaaaggctaatataccagataacctcccagtgaagaaagaacctgaagcttccagcaaagtcatgtcgcattctggaaaagatagaaagattggcagatacaacaggaggagacatgacaacaggagcagcaaggggacacctgatcacacagagagcctcccccctgaaaagcaagtggaagttgcatatgaggaaacaagagttattcctagcaaaaagattgctcataatgaaaaaaagagcgcgcagtacaactacgagcaaactgcagcagggatgccaaacatgaggtctagaggaggggattctgacatgagtatctcacccccagtcagttgcaatgctcgaagcaaacccatgagctattccctgacgagaccaattgaacacttggatacgaatgctcaccttttggcagaagaacctagtgactctgtgctcaatagggttccaaatcatgacagttatttggcaatcaaagaggaatactgtgatggatttaagaggaaaaatgatcctatcttcagtcacattgatgatagctcaaggatgaggggctccagcatcgaagaagtgaccaagccgtatattactgctccaaacagtgatccgtggtctaaaggagatggcagcttttacaggcatccgagctcagaagatttaaacgctaatgctgatgtgcttatgccaggatacagtgcaagatatggacaaattggtggtgacagtaacccacaagctagtatggtcccactagcaacagattcaagactgcatggtggaacggttgctgataattacctctcggcaagatactcccttggatcttcaggtgctcgcgttagccaaccagctccaactgttcccccttttgggctctcaggtgcaagttcacaacgaggctcagtaatggacaggtattcgtatgggctttcgggtccgactggaacacagcgctcagttattgacaggtatgcgccgtccctcgatggaacgaacacaacaagatcgaggagctccttgcctgagcagtacccgttcggacaacctggctcttccggtggcgggtggcctcatcactgatcgctggaacttggtcctcagatttgaccagcaaaagtgcaaccgatttcttgagtccggtggagcctacaacctatctacggcctaactttttggatcctactagtcgtttcttcctggcgccttcgacgaagacatcacctgtgtctaccaatacagaagtgtagacttcaattcctacaaatacagaagtgtaggcttcaatcctattgtttgctctggatttctgtttatgagcgtatttacaagagtatgtttggtctatgttagtatattaggaatacaattccaaaaccgttgtaccgtgccaaagtttaatactatacgtttgggtctgtcgatgagaaaaaaggacgagtgggtgagaagatgctgccctccgcagaactcgatcaggccggttcctctgcgcgtcctgctatgagaggctaacctgagcccgacagaaccggcttggtcgatttgggacctggtaggccggtatttttttattgaagtgtaactttctaaattaggtcttgttggtttgcgttggattgcgtccggaatcgtttcaagtttatataaattagagaagcaatccggttagaaatcgtttcgat

SEQ ID NO: 17672 - DNA, 2393 bp, Zea Mays
agcccaccccaggtcgccacgcccgccacaagaagcagcagccttacccgaaccgaagacgaaccctaccgcgccttgatatcatatcgtctccgtgtcgttctcgcagcgcagcgagcgagccacgcgctcctgcgcagtagcgtaatggcggtgcaaggcggcgaggagagggtggtgctttgggcgctgagcacgcgggcgggcacgctgctgctgtgcggccggctcagcctcggcgccggcttcccctacgtgcgcaggttcgccgacatggcgccggagcggcgggaggcggccctgcggcgctggaaccgggtgcgctggctcttcccgctccgcatcgccttcgccatcgtcaagatcctctgccactacgtcttctacgccatggtgaacgagaactccgagaatccatactggaaagcgataggatacagcgtggacgagccacgggaggatcgggctcggacggcgacaccgtcgccgtcccggcccctcgacgtcggcgtcgtggagaccaggctgctggacgacaacaagctgctcagatcgctcgtggggaggggcctcacggtgaagccggcgtcgtcggacgcgaaccaccacacagtgcaatgcgacgccgtcatcgtggggtccggctgcggcggtggcgtggccgcggccgtgctcgcgtccgcggggtacaaggtggtggtcgtcgagaaaggcgactacttcaccgccgaggactacagctcgatcgagggcccgtccatggagcgcctcttcgagcgaggcggcatcttctgcacgtccaacgtgaccaccatgatcttcacgggcgccacggtcggcggcggctcggcggtgaactggtcggcgagtatccggacgccggaggaggtgacgcaggagtgggcgcgcgagcacgggctcccggtgttcgcgagccccgggtatgcgcaggccatggacgcggtgtgcgcccggctcggcgtcaccgacgggtgccaggaggaggggttccagaacaaggtggtccgccgcgggtgcgaggctctcgggctgtgcgccgacgctgtgccgcgcaactcgtcggatgctcacttctgcgggagctgcaacttcggttgcccgaccggggacaagcgcggcaccgacacgacgtggctcgtggacgccgtcgcgcgcggcgcggtcatcctgaccggctgcaaggctgagtacttcgtcctcgagaagaaccacagcagcggcagcggaagcgggcggggcaagaagtgcgtgggcctggtggcgacctgcgcgagcaacggcgtcaccaagaaactgcgcatcgaggccaaggtttcgatcgcggcttgtggggcgctgatgacgccgccgctgctgcggcgtagcgggctcaagaaccggcacatcggcagcaacctccacctccacccggtgtccatggcgtggggttacttcccggagaacaagcaggaccccccgctctctggcaagtgctacgagggcggcatcatcaccagcatgcaccgcgtcacggaccgcaccatcatcgagacgccggcgctggggcccggcgccttcgccgcgatggtgccgtgggagtccggccgcgacatgaaggagcgcatgcgccggtactcccgcacggcgcacgcctttgcgctggtccgcgaccgcggcgtcgggttcgtggacggcgaaggacgcgtgcgcttcaccccgagccgcgaggacgtcgacgagctccgcaacggcctacgccgcgtgctgcgcatcttggtggcggcgggggccgcggaggtcgggacccaccgcagtgacggtctccggctgcggtgcaagggcctccgcgacgaggacctcgaggggttcctggacgaggtgaccatcgagaaggggcccatgcactcgagggttgacaagtgggctctccactgctcagcgcaccagatgggcagctgtcgtatggggtccagccctaaggacggcgccgtggatggccgcggcgagagctgggaggcagagggcctgtacgtgtgcgacggcagcctgctgcccacggcggtgggcgtcaaccccatgatcaccatccagtctatcgccttctgcctctccaagggcatcgccgagaccatggcccaggggcagggcaagggacagtagcctatgattgagacgcgcctggcgatggtttaattcatgcgtgcaacactgcaacatgtgtgcgttcttgttaatcgagtgtggtgaaagcgtcgaaaaatgtgtttgtgcattgtgtttgtgcaaatggtacgcgaatcacaatacatcctgtttcctgccccggtcaatatttttctattatgatgcataagattgctcattgtaaaatgtatggctgccgccgcttgccc

SEQ ID NO: 17673 - DNA, 1693 bp, Zea Mays
tttagaacgatcgtacatggggatctggtggacgacagcggctgcatgtagctttcgacggcaaaacatttcactcgcttctatcacgttcacgcgctcatgtgacggcaatcatggccacggatgccttggccttgatcgatcatttggggtggaagaaggctcacgtcttcggccactccatgggtgccatgattgcttgcaagctagctgccatggcacctcacaggctatgttcgctggcattgcttaatgtcaccggaggtggctttcagtgcttcccaaaggtagacgcgcagatgctatctcttgcattccgtttcttaagggcaaaaactccagaggaaagagcccttgtggacctggaaacacattatacgaaggaataccttgaggagactgtcgggtcatgtactagaagaatggtcctctatcaagaatatgtgaagggcatatcgtcaacagggatgcaatccaattgtggttttgaagggcaagttaatgcatgctggactcacaaaatgactactaaggaactagatacaatacggtctgccggttttctagtttcagttattcatggaaggtacgatatcattgcacaattgtgccatgcaaaacgtctagcagaaaggcttcttcctgttgcaagaatggtagtgcctcatggtgcacatctagtgagccatgaaagaccagacgaggtgaacaatgcacttatggatttgataaaggccaccaaatctgagataaaacctgaagagtggtcagcccagcccgagaacacgtcggaaaccggggcgctcatttctgcgagacccatcaccgtcatggtgcgaacagatgcaggcgtagacgctaccgcagcggtctataacttgcttgggaagctgcaactgagcttcctttatctcataggcatgatactcatggggtttgaactcatgaggaacattgtaagggtgatgaagccagtaagggttgcagcaattgagtcgtaagtcataagaaccaaatacatgtacactgttcttgagaccttgtggtagtcgagatgggagatgatgattttagagtagcatctgctaacacatgtgaaactcggcctgctcctagtagcagaataatacgaaacactgagaaaacagtgcgcgcctggacagaaatgtctatggcaaggttgcccgttggcgtatgtacctataagagtatctgtaccataccgagatttggaatcgaagctttgctgcttatttcgtgtcgcgtcgctgggcatcttctttcctacatggcgctttacaacgctgcaaggtgacaaatagtagcgtaaaactgaagagagaacgaaagtggcagccacaactgggtttgttttgggtgtgacgtgtgcggtacctaataaaagtttagccacgtcaattctcttgccgtgctttcgggggaaaaaagaactgggtttcactggtgcaaatggcacgaaatatttttcctggtctgaatttgtttgtagtcgatcgtatctgagtgtaaattcgtttatttgagtttagatcggttaggataggagcctgaatatttaacatttgataccgtacctgaacttagatatttgtatttatatattcatgtatatggatagttggatactgatacccatcttatatatttacatttatggatatctcaaattaca

SEQ ID NO: 17674 - DNA, 1516 bp, Zea Mays
aaatacctaaatgtgtccttcctagatggagaatggaagtggtgcggttgtaccttctaattcttcagataggtccgacaggtctgataaacctttggaccaaaagacaatgcgacggcttgcccaaaatcgtgaggcagcaagaaaaagtcggctgaggaaaaaggcatatgtgcagcagctggagagcagtaagctgaaacttgcacaactggaacaggaactccagaaagctcgccagcagggaatcttcatttctagctctggagaccaaacccatgccatgagtggaaatggagctttgacttttgacatagaatatgctagatggctagaggaccaaaataagcagataaatgagttgaggactgcagtgaatgctcatgcaagtgatagtgatctacgacttattgtagatggcataatggcacactatgatgaaatattcaaggtcaaaggtgttgctgcaaaggctgatgtgtttcatatactttcaggcatgtggaagacacctgctgaaaggtgcttcctatggcttgggggttttcgtccatctgagcttttaaagctcctagcgaatcacctcgagcctctaactgagcagcaaatgctgggtttgaccaacctccagcaatcttcccaacaagcagaggatgcgttgtcacagggcatggaagcactgcagcaatctttggcagagactttggctggatctctcggtccagcaggttcttcaggaaatgtggcaaactacatgggtcagatggccatggccatgggcaaactcgggacgctagagaattttcttcgccaagccgacaacctgcgacagcagacgttgcatcaaatgcaacgtatcctaacgatccgacaggcttctcgtgctcttcttgcaatccacgactatttttcacgattgcgcgctttaagttctctgtggcttgctaggccacgtgaataacgaagggccgtcagtattttgagttccctctgccttacggtgctgctgcgtcgttcgcagcgatgcatcacagatctttggtggtactgtttttgttgtacaattacttttggccgctgcttggtccaaattgtactcaggtgggtgtacaagtaggtcaatataatcctgtaagttatggtgatttatgggtgtgttagcaatgcaataataattagagagggcaggatcagggtttctgttgtttgtactggttagagatttagtcctaatgtaacttcctgggacatggggggcggaatgggaagagagtaacaagaatcttcctttggttactgtagtatatgttggtattgttgcatcccattttctcattttgctgttaggagaatgattattctgtccatttgtgtactttttgattaatgttgtttgtagccccaacatgattatggatatgactgctagttcattcccattcataccactgcagtagctggccttattattaatatcatcatccatacaagagcagtggttgaagttgaaggcggc

SEQ ID NO: 17675 - DNA, 1210 bp, Zea Mays
gttgtactgcacacgggggggcggtgtgtacttccccgtcttccggtactagcgtactacacgccgcgagcgaagggcgtaagcaagcaaggccggcgcggcgcatgcaggtcaggtcaggtcaggtcatgtcaggccaggcatcttgggcaacagcaactggcaacagccgggccttttgagcgtgcgccctctctctctctctctctctctctctctcccctatccgtgctttgtgcctgtttggtgcgcgtccacctttcggggtcaccggcttctgctttcttgctacgccaccgcgcctctcgtctatttatggagtcccccgatccatgaagccggggcaggccgagagttgtcaacgacgacgtctgccggcagtgctcctgctcctcctcctcctccttcccggccgccgcgcgagcttggtgggttagtgtctcttcttcgcggagacctgtgagaggagccatcatcatggccgccgttgagactgttgtcctcaaggttgctatgtcatgcgagggttgcgcgggggcggtcagaagagtgctctccaagatggaaggtgacagtcaaaggcaatgtcaagcctgaggacgtcttccagacggtttccaagtcggggaagaggacctcctactgggagggcgaagccacggccccggacgctgcggcggcttctggagccgaagcagctcccggcaccgcggcagaagcgcctcctgctgctgctccggcggcgccagagatcaccccagccaaagctgacgcctgatcgtcacgctattattcactcacatgtgatgctgcggctgcgactcctaaaccttaaatctagaaatagctggggattgggtttgcattgcatcgtgttcttgccggtctagcaagtgactataagaataatggaataaacgatgacccagtgtgtgtatgatttccgttctgaagaacaacacatcccttgcaggattgttgttcagtagattctacttgtaccgcggctttggagttccgcaaaggactttacttgttcaagaacttcttctctgacaggaaataacatgtgagtgcagtccgtgcttttatcttctggtgttccctcttaattaatgggaaaatgtgcttagtttgggtcgtgaaattcttaccagcttgagattttatattgaaaatttgaaatacaaacattagattaagggtttcc

SEQ ID NO: 17676 - DNA, 1049 bp, Zea Mays
cagggaggcggctttgggcagtggttatgcgatacaggagcacgagtgtatactacgaactagggttgggacgtatcccgcaggtatcagagaggttggggatgagaaggtgcaaggcttgtatgttgcaaagcttgtgcgatcattctgtaggtcatccagtgattctgaagaggaagacatttttgagtacgttgcctccacacttgtcaatatatctaaggttgaagctggaaggagaatattgttggagcctaagagaggtcttctgaagcagattattcgacaatttgattcaacaaatcaacttagaaagaaaggggttgctggtacaattcgtaactgttgctttgaggctgatactcagcttctgagtttgctttctttagcagaatatctttggccagctctacttttgcctgtagccggaaagaagatatatagtgaagaagacagatcaaaaatgccacttgagctatcgagtgcactctctcatgaacgggaagttgttgaggattctgaaattcggcagcaggcattagaggctatttatatgatcgtattgcaggatggtggccgaaggtccttttggtcagttaatggcccacgaattctgcaggttggttatgaagatgaaaaggacccgaaagtgatggaagcatatgaacttattggttccctgcttgttgggaagggtgaagatgtacaagataacaagaaggaacaaggagagaagcctcaatgagccccgccgctgataaaaacggtgctgtatttttgtttgtctagaaaacatccctcgccgtgtgcaatagcaatagtatgatatcccaacttgtcaactgttgcaactgcaagagctctgcagtgttgcttttgtaattgacgaatgtatctggaaaatttgcaggtattggccgtcttttccttggttttgagctctctgacaattcttcgttttttttggaatgcatctcttgacgagtctttcacaccgtcgcttcagaacatggatatgcattaaacgggctaccctgtagctttcgctg

SEQ ID NO: 17677 - DNA, 1740 bp, Zea Mays
ccaaaacctgtaaagaatgagtctcgcagtctttgagctcacaaggttctaacagtgggagcgtgtttgggagcaagcgatcgattaaaggaatgtatagtcccatgcacaagagttctttagatagggagatccctggcagcacaaaattctccttgccgcagatccagaaagcaacaaagaacttctcgccgaacttcaagattgggcagggtggttctgggactgtatacaagggtcagcttgctgatggtactcttgtcgctgtcaaacgtgccaagaagaatgtttatgacaagcatatgggtcgtgagttctggaacgagattgagacattgcaacgcattgagcacctgaatttggttaggtttcatgggtacctggagtttggtggcgagcagttgattattgtggagtatgttcccaatgggaatcttcgagagcacctcgactgtataaatggtaaaatattggaattctcactgagattggaaattgcaattgatgtggctcatgctattacatatcttcatacctattcagatcatccagtcatccacagagacatcaaatcctcaaacattcttctaatgaacaattgtcgagccaaggttgctgactttggattcgccaaactggctccaactgattctagtcatatatctactcaagtcaaaggaacagcaggctatctcgatccagaatatctcagaacataccagctcaatgagaagagtgatgtctactcctttggagtccttctggtggagttggttactgggaggcgccctatagagccaaaaaaggcaatcattgagcgtgttaccacaaaatgggcaatggaaaaatttgtggagggcaatgctatccaaacactagatccgaatctggaagcgaccgatgcgatcaatctagcggtcgagaagctgtatgagctggctctgcaatgcttagccccaactaagaggaaccgaccgagcatgaagcggtgcgcagagattctgtggagcatccgtaaagattacagggagttggttgtacccacctctgccatgaactgaagcaggtcgtctggagcagtcaagtgaacaaaaagatgtatcattccagtttgcctctcttgattcgcttcaaagattggtggttgaaatcatccgattgctgggattctttcagttaccgcaagtggtcgtgaacaggactgatggccttcctagatgctgtgtttgtgctagaaaccagaaaagtccctgtgtgaaagtgttgctgagtaaacatgtacgagtatatatcagatatctaatggtgtgtatatcttgtaggttctcttatacaggtaagtgcatcacgcatgaagaaatctagttgtttccattgcatctttttttttgttgttgttgtctatgatgaacaatattcagcgtatgattagcaagcaacactcaggagctgtacttgtgctcttcctttcctggcgtccaatctgtgccttatcccggcacgggggtgcagaggtcactgctgtagtaatctggacggagagccagactggagctgccttcttggcaggcagctccgtcacctctttatcctgtagcaaaatcgtccgtgcattgacgtgactattttatgtccaaatatggttcttttaaattgtcactcgatgtttttatgcttcggtgtcacgtttttgacaactaaagaaggaatatactcggccgaaaaaggtccgacttcctg

SEQ ID NO: 17678 - DNA, 1037 bp, Zea Mays
tacggagattgtagtctcgatccgtcttctccggcaagttatggcttttatggagaagttatcagggagagcgaaaagtaccggtggatgggtcctgcacgttatgacttttctggaacaatggtctttctgaagcacaggtcatatggggcaaaggttgcttttctcgatactccatacactcattcgcttacagcatcagcacaggatgatataactggagcacaaccactacaatctcgttggaagaaacctcgcaaaataatctgcagaacaaattgctttgtatgcaaagaggcttcaacatctggacaaaatccagaagatgttgcagacaactccagaacaatatgcgagaaccagaagtgggtctggtccgaaggacatttcctcagcgtcggtgcagctgtcatttcatgtcgtaacgaaagagcccctgatggcctggtagctgacgcacacctttcggatggttttcttcatctcttgctcataagagactgccctcttcccctttacttgtggcatctaacacaatttaccaagaagggttcagatcccctgtccttcaagttcgttgagcatcacaagacacaagcgtttacctttatctcatcacatgacgaaagtgtttggaacttggatggagagatgtttcaggcatgtgaggtatctgtccaagcgtgccgggggcttgtcaacttctttgcttcggggccagagctgtagtaatgatactcgtaagttcctctttgcatgaacgaaggatgccaggagttcatattttttatttagagagtcccttatttcgacatgttgacatgttgacatgttgtgatgttgtacactcttatttgtattttagtggagacctagaacactttgttgatagatatactgttaatatttgttgatagctatgtggcatggaaactacaacccatttgtgctatagaatagaggaacaaaaggttttgattgaattaatgaagtaaaagtttactttctgttttgcgagaaaaaataatgaattgaag

SEQ ID NO: 17679 - DNA, 1969 bp, Zea Mays
gggcgggcaggctgcgcacctcctctctctctctcgtccggccaggtgcttcgtcaggcatacttcttggcgccactactctgcccagcgtcatgctttctcggttaattcaactgtcaaggctcctaccagctgatcctaatggacctaaagaatttgcatacctggaaatgcagtactgggcagcatcaatcagctgtctcagtgtgctagctttattcctttggcatctacagaagtctcccagcaatgggatctctaaacatttggagtacggctcattgtttatagttttatatctcatgacattctttttgtcctttctactgaagactgatgaaggcttgatggtaacgaccaatatggcgtatatgctctgtcatggagtggctgctgtgatcttaatcaagcatatcctagagaagtttccctcatgcgcatcttttggggaggcgcttttggtgtcaggtggtcttgttctctactttggtgatatgttggcacatacactttcaaagatggagttctccatgtcatcaaaagcattcattcacacacctcaaactagaagcgatatgaccgcaattattcaggggattttacttgtcctttttctacttccgttactatacaagagttctcttaaagtttggtattgctggacaaaggagagaaagcaacaaacacaaacacctgaggaacataagcgaataagaattgattctgccatattctatatctcgttggcggtggtgttaatatttttactgccatcatggacacaccttgtccaaggcctcaaagtgcatccttttgtttggattgttaactatatgttcactgattcacatgagcgacttgttttatgtgcatactggatatgtgtaatatatgtatcagttagaaggttctacagtatatcaaagcaaagcaagacagagaggattcttttgcgcaagtattatcatcttgtcgctgttctcattttctctcctgcagttatatttcagcctgctttcttggacttggcatttggtgcagcatttgcagttttcttgatattggagatgttacgaatttgggaaatataccctcttggacgtgttgtgcatcagtttatgaacgcctttactgatcatcgtgattctgagattcttattgtcagccatttttcactcttactgggctgtgcacttccgaaatggatgtcatctggattaaatgaccgaccacttgccccttttgccggaattctcagcttggggataggtgataccatggcatcaatgatagggtacaagtatggcgtgttaagatggagcaagacaggaaagaaaacaatcgagggcacggcagcgggcataacatcggtgctagcagcctgctcgatcctggtgtcactcttggcttccagtgggtacattctttcgcagaattggctatcgctcctgatagctgtcacattgagcgggttattggaggcatacactgcacagctggacaatgccttcatccccctcgtgttctatagtcttctgtgtctataagggtagcatcctgtacatctaactgaccttgatatcctctttttgtttacacgctattagtatatacgtagtgcaatatgttatttcgacattactcacttggtctcctcggcgcatcaactgcctggtgattcagttcaacagatcacattctgtgtaaccctgcctttcggaagttgagaggacgtgctcatggttgagacagtcggtacaggcatatgaccagaagtagaaaaataaaatgttctccagtcgttcagtagagggtgtttttggcggagctgggcagttggatgctgtacataaagttttttttatatgaacctgttgactgttgttgggacgaacagtattgaaacatgctgtgatgctgatcaatttgatcactctatttgctctttctatccatttttaaatacctc

SEQ ID NO: 17680 - DNA, 1457 bp, Zea Mays
gattacctcctaccgtccgacccggctccctcggtccctccctcggtccctcccggtctcgcagttcctccccgtcgtcttccaccgcaaatcgccgaagcaagcaggcgagctcgggaccagatccactgcgggcagctggagcggaagggccatggggacgccgccgcctttccaggagtccggccactgcgacgtctgccgctgcaccttcaacaccttccgccgccgtgctctcccgcagtatgggatatatacagacgtcagagtctgctacggttgcttcaacaaatcctccagccaaggacacgctgataatccggtgtcagctggtagcatttctggagcagctgactctttttcagggctgagtttgggtaaggaggatgattcgtcgcctatgaagaattcaacggttcagagcacggcagcccttattgagtgcaaatgtgggatgcctttgtgtatatgtgaagcaccaaaaccagaaccttctcctacacctgtaaagaatatcaacaccgttcccccaaccacacagtcaaatccaaggccaaagaagcctgctaacactcaacagaaggcttcagctacttccagtagcaactcaagcccattcttaaatattggattaatgaacaacgatagcaatgataagggcattgttgactatgaagttagtggggagggactgagagaagcaattaaaggcggggatgttaagggtgtaaagaaacttcttacacagggagtggattctaactactgcgacaaacaaggatttactttgctgcatttggctgctttgtttaaccaaactgaaattgctcttattctcatggaccatggggcaaatgttgaaagcaaaaatgggcaaggggaaactcctttggactgtgctccggcaatgctgcaatacaaaatgcgccaacgggtggaagaactcgcggcttcggcttcgaagggaccactagggtgaactgtgctcgtgctagtttctgctgagttcctcctattccagtttgtgtcaaatgtggtgtcaagaataaaatagttaagtcagctgaaagcttcttgctggtgggacagtgtttggtccgccagtgtataccatctagaaacgttgaatgccagtcacggctcacgcgtgtgaaataatatatattcagcttcatcctacattcctactcatgtactctgtagccggtgaatacttccaaacatttaccacgtacaatatgtttttcttttactgaaacagcattcctctaggagatgcatgacagcagaaagcttcctgccggtggcctggtgccggtgggatagtgctcgtgctcccagtaccacctgcaaactttggaatcccagccataatttgccagtgcgaaatactgtaattcattcagcttcacctgcaaactttggattctgccgttaccaagtctgccgtttagtat

SEQ ID NO: 17681 - DNA, 3333 bp, Zea Mays
gccttctgggatgacgaccactgcaagtatcccctggtaggagggcccaaatcaaccactagtgtcacagtttgagaaagaggaagccaatcgcttgtccaaacgccgtctagaggctgagaagccacaaaatgatgctactgcagacatgtctgaagatctttttgaaggtgtgaagggagaagacgttggtgatccatctgttgcctacggtgacagcacagctgggaacacacctaggatcagttcatttgacaagctatacatagtgttaatcagtcttcatggcctgatacgtggagagaatatggagcttggccgtgattcagatactggtggccaggtcaaatatgttgtggaacttgctaaagcattaagttcatgtcctggagtttaccgggttgatctattgacaagacaaatcatagccccaaattttgatcgtggctatggtgaaccagacgagatgctggctttgacaagtttcaagaactttaaatgcgaacgaggagagaacagtggtgcacatatcatcagaataccatttggccccaaagaaaagcatctagctaaagaaaatatctggcctttcattcaagaatttgttgatggtgcactaggtcatattgtgcggatgtcaaaaactttaggcgaagaaactggcagtgtgtgtccagtgtggcctgctgtgattcatggtcattatgccagtgcaggagttgctgctgctctactatctggagcacttaatgtcccgatggtgtttaccgggcattttcttgggaaagataagcttgaagggcttctcaagcaagggagacagacaagagaacaaataaacgtgacatacaaaataatgcgccgaattgaggcagaggagttgtctcttgatgcgtctgaaatagttatcgctagcacaaggcaagaaatagaagaacaatggaacttgtatgatggttttgaagtcatgcttgcgaggaagctccgtgcgttagtcaagcgtggtgctaactgttatggtcgttatatgcctcgtatggttataattcctccaggagttgaattcggccaattgattcatgattttgatatctatggagatgaagataacccatctccagcctctgaggatccatctatttggtttgagataatgcggttcttcacaaatcctaggaaacctatgattctggctattgcccgtccatatgctgagaagaatatcgcaacacttgtgaaggcatttggtgaatgccatccgttgagggaacttgctaaccttacattgataatgggtaaccgtgaggctatttccaagatgaacaaaatcagtgcagctgttttgacatcagtgcttacattgattgatgaatacgatttatatggtcaagtggcatacccaaagcatcacaagcactctgaagttcctgatatttatcgtttagcagcaagaacaaagggcgcttttataaatgttgcttactttgaacaatttggtgttaccttgatagaggctgccatgcacgggctgcctgttattgcaacaaaaaatggggctcctgttgaaattcatcaggttctggaaaatggtctccttgttgatccccatgatcagcatgcaatcgcagatgccctctataagatgctgtctgaaaagcaattttggtcaagatgtcgagagaatggattaaaaaatatacaccagttttcttggcctgaacattgcaagaattacttgtcaaggatattaactctaggtccaagacatcctgctttcgcatgcaaagaagaccataaagtgcctgtgaagtgcaggaagcatatattcgttattgctgtagactccgttaacaaggaagatttaattcagattatcagaaattctgttgaggctacacgctctggaactatgtcagatttgacaggttttgtgctgtcgacttcactgacaatagcagagttacagtctgtaatagtacgcacaggcatgctccctactgactttgatgcctttatatgcaatagtgggagtgacatatattatccatcacagtctagtgatgtgccaagcaattcccgtgttacatttgcatcggaccataactaccgatcacatattgagtatcgttggggtggagaaggtttaaggaagtacttagttaagtgggcctcttcagtagtagaaagaagggggagaaccgaaaagcaagtcatctttgaagattcggaacactcttcaacatattgtcttgcatttaaagtgattaatccaagtcatttgcctcctttgaaggagctgcaaaaattgatgagaatccagtcactgcgttgtcatgcactgtataaccatggcgccaccaggttatctgtaattccaattcatgcatcgcgatctcaggctctaaggtatttgtctatttgctggggcatagagttgccagatgctgtggtcattgttggtgaaactggtgattctgattacgaggaactgtttggaggtcttcacaagacagtcatccttaagggtggattcaacactcctgccaataggatccatacggttagaaggtaccctttacaggatgttgttgctcttgatagctcaaatatcattgcaattgagggatttagcactggtgacatcaggtctgctatgcaacaaaagcttggtatacccacacgatgacaccaagtgcgatctattttgttattaatagaaagaaacaaagaaaaaaatggccaatacaaatatacgatacaaacacttcgtttccattctattggaaatgcccgattttgcctgccagtcgtttaatgtatgtgtgccagtgtgtggtccctgcatgggttatgaatgacattcccttggatccctgcactggaaatttttggagcgaagagcatgtcaatggatacatccagctgtacagaagaaacaaatttgttcaaatgttgatagtgaaaacattttatggaagcattttcagcaacaaagcttccaatatacaaagctcacactttcacatcacttcaaagtggagcttatgattacagagcaaccctctaaaccttttttttccctttctaagaggggtgtcttatatttgtgtaaatactgtgtagcaccaatgcaccatcttgttttcttgtttcctgaattaatatgcgtaagcgtttactctctttctatatgtttttccaacagcctgtcttgtggttacatcatgaatacctttattcatctgctgctgtattggttatgaaattatagtagcaagcgtggtgctcccaactatgacttcatcatgcgtgtatagctttacattatctgcg

SEQ ID NO: 17682 - DNA, 1070 bp, Zea Mays
tgacgtttccggcccccaattcgaaagcctcgcgctccccgttgctcccttccttgcctaggcggcaacgccctcgtgctttataacccagcggcccctcccgcgtgaggcaaccgagacgggaggagaccagaccagcagcagcccatccgaaccccgcctcctcctcctcctcccgggttcgcgtgaggctgtgtgctgctgggaggcggcgccggcgccggcgccatggaggcggagaagaagccgccggcggtgtccgacgtgggcgcgtgggcgatgaacgtcgtcagctccgtcagcctcatcatggccaacaagcagctcatgtcctcctccggctacgccttcgccttcgccaccacgctcaccgggttccacttcaccgtcacggcgctcgtcgggtggatctccaacgccaccggctactccgtctccaagcacgtcccgctctgggagctcgtctggttctcgctcgtcgccaacacctccatcaccgggatgaacctcagcctcatgctcaactccgtcggattctaccagatctccaaactgagcatgattccggtggtctgcctcatggaatgggtgctcaacagcaagcactacaccactaaggtcatatccgcagtcatcgtcgtggccgccggtgtcgggatttgtactgtcacggatgtcgagggcggcatgctcgacggcgaggacgtgcccctcaaggccagggtgagcggcgtgcccgcggtcgacctcgaggacggcgacgtgaagggctagccgctgatccgttcattcttctcgttcttttgtaactgtgcgcgcgcggtcgctcgatgcaaagttgcttgttcgtcggttctcagctatcgacactacactgttaattttgttggccccttgttggggggagtctgctcgtaggtgaccccccctcccccgggttcgacgtagatgaaacacacgcgggcaaattgttaggatttttcaggcggggaggtggcgacatgctgttatagatggtgacaagactttatataatggaaatgcaggtgtttttgaggtttcgctgttca

SEQ ID NO: 17683 - DNA, 961 bp, Zea Mays
cggccggccgcgctgtcctttgtacaagaggagatgggatggtcgccacggcccccgcccatcacccgcagcaccgcatcactccgcctcgtcccccacttctcgcacttccgcttcagcttccaccgtgcccaagagtcacgaggcggcggcgggtcacgccgacgtactctcaggtgctgcggtgggactgcccctgctgctgccgcgggggcggcggaggggaggatggccgcggcgacggcggcggacatggtgtgggtgagggtgcttgaggatggcgtgttccggttcgacgcgtcggaggcggcgcgcgccgccgcggggcccagcctctcgttcgcggacccgcggcggcgggaggcgccgcatgacggggccgacatgcccgccgttgtcccggtatgcgaggtcgcggcggggggatcccagaaggtcgtgataaagcttcctcctgggacatctttctatggtactggagaagcgagtggcccacttgaacggactgggaaacgagttttcacatggaatacagatgcatggggttttgggccaggaaccacttcgttgtaccagtcacacccttgggttttggctgtcctccctgatggaaaagcattgggtgtccttgctgataccactcggcgttgtgagattgatttgcgacaagaatcaactataaagttctctgccttatctgcctaccctgtcatcacttttgggccatttaatactccagctgatgtcatgacatctttgtcgcatgcaattggtactgtgtccatgccgccaaaatggtcacttggctatcatcaatgtcgttggagctatgattcttctgagaaagtactcaaggttgttaggacatttagggagaaagacattccttgtgatgttgtctggatggatattgactatatggatggttttaggtgcttcacgtttgatagttgattgatct

SEQ ID NO: 17684 - DNA, 646 bp, Zea Mays
gtcaagcagcagctgctagagcaaacctaagagccaagcggcagcagccagctaataattaagcagccaaattaagtgcgacgatggcgtcgtccatcgccagaaccgcatgtctcctcgtgctcacactgttcgtcgtctccgcggcgatcatcttgcccagctccctgtgccatggagcccgcggcgtcggtatcggcggcggcgctttggaccctgaccgtccagcgtgcgtcggggtcggggcatgcccagttcgtgggcgcccctttcctatcgtcaaaccgtcccccccatccaacggaggggacccacatcactgatgcctgcctcggatcacgcgccctccgtcgtatcggtctgtctacgatggaacgatgcaccgtgcacgagcacgactgcatgctactagctactagctatctcgtgtacctgtacagtcgtcgtgcttatgtacgtacgtatggtcaattaataaaactggagtgggatgatgatggtgagaatttcttgtactggatgatgacatgcatatgtcgttggttcatatagacgaccacttgcaaaataaatgaatatatggtgatatgggaacgctgccatgtgagcccaccatcagcgtcgtttgaaataacagcaatttgcg

SEQ ID NO: 17685 - DNA, 2705 bp, Zea Mays
gtttgatacaccaattgagtcttcaatgaattcatttacattttcaaaaagtgctatagaggcattaacatgcaaaagggatgctatgtacaagttgatgatggagaagctccaacattttttctctaatgttgaggtgattgcttttgatactgcatcaaatttcctacataaaaggaccgaccttgtagatgcatctgtttcagatgctgagttattctatggggacagcgacgctgtactaccttgcaatatggctgcagatgaaaaagatgattcttcttcgaattcccaagaatcttcagataaagaagatcccttggaatcttcagaatgttcttcttatacttctatggatgacacagaagttgagagttctacagcatgtgaaaacttgtctagttccatgttctcattatactgtacaagcacaggtgaagcaaaaggctccttggtaaccagtaagctgctttcttcccaatccagttcagttgaccatggaataaattgtgcaatccctattgagtgtgagaaagatgacaggttgagttgcaaacatgtccttgtgcacccacagaatactaagcatactgcggtgcctgatggttcagaactggattatcagtatagccagttttcaccatttgacaggtttatgaagagagccagttgctcatttgaaagcatgaattcagttggggagtttttgtattctgatcataaaaggtcagtaggtaatgcagtttatccattacattctgaatcagggagtactaaactatcaaacagtaaaaactatgaaaagtttgttactataaatcagccatggaataccagtattccttacaatctcagtttgaaccccatactgaaaaatgcagcttgttaccatacagagagtgacatgcaacagaaaagcaagaaccaatcacttgccagttttgattttgagtcagtcatggatccatgtgaagtatattgtgcaaggagcccatcccttcttgttgagtctgtaaatggagcagcaacagctggacagcccagtactcagccttatgaacagcctgattgttctaccaagcttcttcaagctcagacaagaagtcagtcatcccttacttcctcaggagaaatgtcaacaggagatagtcttcagaaaaatgcttctggtggggcattctgggagatatcattactatataatgataaatcaaaagaaaaaccagctatggactttagttcacaatttgatatgccccttgatatagttatcgataagtgcattattcaagaaattttgcttcagtataaatatgttagcagcttcacgatgaagttgcttgaggagggttttgatctttgtgcacatctactggctctgcggcggtaccatttcatggaaatagctgactgggcagactcctttattgcttcaatttatcagaagaaatggtcatttgttaaatctgagcagaaaagatcggagatccaaggacttatggacttggcattgcagagatcttcatgcgattctgatccttataaggaaagattatttatatacatgagggagtcacctgtggattctgttgatgcctctccatgtggtcttgatttgctggatgatatcttgttgggttataaagctgaatggccaatgaatattgtcattacagtagatgcactgaaaatatatgctgaaatattctgttatcttcttcaagtcaggtttgcagtgttttccctgactgaagtttggagatttttaaaggagttgacacagttcatcggtcgttccagccatagcagatctgatgtgttgaagaaattgaattttgtaatgaaattgaggcataaactttatcactttctatcaacactacagcagtatctccactgccatttatctgatatatcgtggcgccgttttcaacattcccttaaaaatcaggtgagggatatactggatctggagtatgtgcatatatgttatattactgatgcacttgacatatgtttcttatctgatgagtcaaaacaagttgctacgataatcaagagcatgctgcagctggctttggagttacgatcatgctttcagagtggtgacacttgtgatttatcagtaaatcaactcagtaatttgcaataccttataaacttctctcaggtggatgtaattagaacaaagttcgaggataacatcaaagatctctatattttgcattcgaaatcttcaaaatatacggagcttggcctttcccgtttctgggggtatctgaactacaatgagtatcattctacgaaagtcagcaaagatatggacaacttctatttttgataggacattgcaagactgaagtaaggtttgcctttatatttgggcaatagctcactggccaccgggactagcttaccttttgaggtacacactgctgagtggtgagagttcttgtagatatacgctggtttgatcaaattggcccttgtattggtttttggcgaacttaagagaactattgttcagacatgccatatacttggagatgcatgtatgtcctaatggtgtatcccagttttacgatcaaaatgggaaatcatgtgtagttctggaaaggtgggaactttgtatagccaatgttgatattgattgttgacacgttacaattggtaaatggaaggtgaatgattgctctctggcctca

SEQ ID NO: 17686 - DNA, 871 bp, Zea Mays
ttttcttccttgaagcacccacacacggcaaactagtcagctgcaggtgctaagctctcatcaccaatctggaggggagcgatctgtatcgaccatcttgtatcttgtgtcacttcaagatcttaccaactgcccttttcgggttgttgatgagataaatcaaggaatggaccccataaacgagaggaaaatgtttcagcagcttgtcagagctgccagccaaattaacacgccgcagtgcttccttctgacgcccaagctcctacctgatctggagtacagcgatgcctgcagcattctcaacattatgaacggcccatggattgaggagccagcaaaagcttggagctccggtgattgttggaggacagtggtcagcgcagctggacactgagcgccgagtattttgccttggaccgtaggaggcttgtaaagtttagcgtgtagagctggatgcagcttttgggtggttaatttaagtttgtagttgtactacatgtaagtttaggaaagttaaggtagctggtggcattatcaatgtggaaccagatgttgagctgctcaaatcacttggcagcccttttgacacgggagggtaaggtactgtggaatgatccctaccctgtaccggccagtattcctggaagtgaccagtttacttaagtaattgttttgcagcggaaaagcagcaggcatgcaatgtctgtctacttgctgtgacaagtctgactcctttagggctttagtacttttgttaggagtagagatggaaggggattaaattaattggtagtaaaaaatgaataggaacggatttaatctcaatctccttcgattcaatgcaagggtgctgtttggttcaagaaatgta

SEQ ID NO: 17687 - DNA, 344 bp, Zea Mays
agcagagccagaagttaaatcacgtcttgatacgtacaagcaaaattctgaagctattcttcctacatactctgatttgcttaataaggcgatagatttcctgttacagaagatctgtgagaacacttcagcgagcaagttgaccaaaacaaatggaaaacgaccagattctgcggatacaggttcaaaaaatgagtggcgtggaattccaacgaggttgaataacattccacattctagggaaattagggaatacttctacaacgacgtgttaaaagctacaaaacttgctattgaagataaaaagactcggttgcagatagtcgagtactggaatatgtgag

SEQ ID NO: 17688 - DNA, 1634 bp, Zea Mays
ttcctatttagcaatttccttttgatggattaaaacaccgattagttataacaaggtgaaggaaaaatattatgatcagtctaatgtgtagaatggtgtaggcacagaagggaaaaacttgatggttcatggagactactttatatttgatgacatgagactgctggattgtaattttatatctgtagagcatggttttggcatagatcataattcacgagtgaattttggcaatggtcccccccctgttaacatggtatatcctgttgcattttttacacagaacttctagcctgtccagtatggtcatgcagtctgctcttgtttcaaatccatttgggatgcttccagcaatgcctcagatgtccatcgggaatggtggatcttcaccttcagttcaatatggaatatcaagtttgccggttgcggagaagcctcttccaagtagatcattgtccatggcggttcctaggcatttgtcacagagaaggataaaactgctgccaagaaaatataatccaatatctgatggcaaggttccattctttgctgatgatgaagaatctccagcaacaccaaaggcagatgcttttttcatccctagagagaacccaaggaacctggtaattcgtccaattgagcagtggtcttcacggagagaaactggccggcaatatactgcaaagaatgttactgattcgaacaaatatgaagatgcttccattgaaagtgagcgtggtaagtctgccatgtcaccaagcagcaggccacctgcagtggaaaatgacaaacagcatgaggccagggccatggctcaacatgcgaatggaaatggtacttcagttgagaggctgttgcctaagcttccacgtgcagattacttcacagagcctagtatagaggagcttgcggccaaagaacgtgcggagccaggctactgcggtcgagtgagggacttcgttgtgggtcgacatgactacggcagcatcaaatttttcggggagacggacgtgaggtgcctcgatctggagtcaattgtggagtttaacgaccgggaggttattgtgtacaaggacgatagcaagaagccccctgtgggcgaggggctgaacaaggctgcagaggtgactctactgaacatcaagtgcgtaaacaagaagaccggggagccgtgccagggggcaagagtggagaggtacagggagatgctggtgaagaaggcggaggagcagggcgcagagtttgtgtccttcgacgctgtcaagggagagtggaagttcagggtgaagcacttcagcgcctacgggctttggtgaaatcctggggagttaagtagtttgtttgttctgatggaacaacgctttacgctcttgtcaattaccatgcttggatctgttgtgctgcttctgtacaatgttgctgctgttaaaatgcttgcaaattgcactgctctgctgctgaaaacaggagcagcagtagaaactaccgcaacaggagggcgtgctacctgctactgttatgtattattattattatactatattctaagtataataagacttagttttttaaatacatgaatattactttatgcacttagatatatgctatgtatggagagaaaataattatat

SEQ ID NO: 17689 - DNA, 2030 bp, Zea Mays
ccggaacaaaaatatcccacccaaacaactccaccctaccgcaccccaaattcgcaatccctctccacctctcctcccaccgcagcagcaggcaagcgcgaggcggaggcggagagatggagtcggaccagggcaagctcttcatcggcggcatctcctgggaaacaacggaggagaagctgagcgagcacttctccgcctacggagaggttacgcaggccgccgtcatgcgcgacaagacgacgggccgcccccgaggcttcgggtttgtcgtcttcgccgaccccgccgtcgtcgaccgagcgctgcaggacccccacaccctcgacggccgcacggtcgatgtgaagcgggcactctcgcgggaggagcagcaggcctccaaggccgcaaaccctagcggtgggaggaacactggcggaggaaatggcggcggcgatgcaaatggtgctcggacgaagaaaatattcgtgggcgggctgccctctactctgactgaggatgggtttcggcagtatttccagaccttcggcatcgtcactgatgttgttgtcatgtatgaccagaacacgcagcgcccccgtggcttcggattcatcacctttgactcggaggacgcggttgaccacgtgctgcagaagaccttccatgatcttggtgggaagctggttgaggtgaagcgtgcattgccccgtgaggcgaaccctggtggctctggtagtgggcgttctggggtgagtgggggttaccagagcaacaatggccataacaccagctctggtagctatgatggtagaagtgatggtggcaggtacgggcaggcacagcagggtagtggtgtctatcctggctatggtgctggggcagctggatatggatatggtgctaaccctgcaattggatatggaaattatggggctggaggatatggaggtgctcctgctgcttatggtggacattatggaaacccaggtgcagctggttctggttaccaaggtggacccccaggctcaaatagaggaccttggggcagtcaagctccatctgcatatggaactggagggtatggtggcagtgctggctatagtgcttggaacaactcttctggtggtggcaatgctcccactagtcaagcccctggcggacctgcgggctatggaagccagggttttgggtatggtggatatggaggtgatccatcgtatggtagtcatgggggatatggagcttatggagcgcgaagtgatggtgctggcaatcctgctactggtggagcatctggatatggtgcagggtatggaagtgggggtgccaactctggctattcaagtgcttggagtgatccttcacaaggtggtggatttggtggttcagtcaatggaggttctgaagggcaatcaaactatggcactggctatggcagtgtgcagcccagggttgctcagtaaagaaggcattttgagtgtctgaaatgaaccagcacatctgggcagtctatgtattgatttgtcattccagttctgatttgttctcagcattctgaagattgcccatttgctggttaaatcagtatttctccgggttgaatgggatgacattccttttcagagatgatacccaagcaaggttatgaaatcaggcatctgaaaaaaaatgtggcagtgattttacatgacgagctggtaaaaagttgcaatattggggtgcagacagaatgcaagataccagcttgagcgtttcattgtctgaagggtcttgtgctgtgctacaagatagtgggctttaatcgagatggacggcaagcatctaactttggctccagttctgcagtatttctagtctgctaatagaatgtgggttgtgtcccttctctagtatcttgtttccagtaaagcatcaagcaatccgaaatccatggcctgcaaatgacgaaacacatgtaatagctcaaaaggagagatttgatatattactttgttctatataggcaagagaagctaatacctctgaagaagacatgaaccgatccc

SEQ ID NO: 17690 - DNA, 936 bp, Zea Mays
cccaactgcccgcgttcccgtgcccgtactaaaaataaataacggactgccatctcctcgtgcactccgccaaccgccgccgccactcgccactctcacgtctcgcccatcccgccactgctgctctccagagtccaggcgacccaggctgcgcggtcgctcggtgttgttagtcccgaccgccgccggccatggcatccaacggcatcgccccaagagatgtatgtgttgttggcgttgcacgcacccctttgggtggtttccttggtgccttgtcttccttgcccgcaacaaagcttggttctatagcaattgaagctgctctgaaaagagcaaatgtggatccggccctcgtgcaggaggtctttttcggaaacgtcttgagtgctaatttgggacaagctcctgcaaggcaagccgctctgggtgcagggataccaaacactgttgtttgcaccactgttaacaaagtctgcgcatctggcatgaaagctactatgttcgccgcacagtcaattcagctgggtatcaatgatattgttgtggcaggtggcatggaaagcatgtccaatgccccaaagtacattgctgaagctaggaaagggtctcgttttggacatgacacacttgttgatgccatgcttaaggatggactttgggatgtatacaatgactgtgccatgggaatgtgtgccgaactttgtgctgacaatcatgccctcacaagagaagaccaggatgcttttgctatccaaagcaaccagcgtggaattgctgctcgtgacagtggtgcttttgcatgggagattgttccgattgaagttcctgttgggagaggaaaaccacctgtacttattgagaaagatgaaagcctggataaggcctccttacatagggacttgtgcagatgattattttactgatgccatgcaattt

SEQ ID NO: 17691 - DNA, 2128 bp, Zea Mays
gttttgtgtttgtgtggcttttctggttcgaaagacggattagaccaaggtatcaaatttggcttccgctagctgcccatctcgaaacagcatgaaccggcccgatgacgcgcctcaggaggaagacaaatgaaataccataaatccaggctcagcccgaaattaacccaatagcagcccaaagcaaaaccccagcaggaagcaacgtcgacggcccattaactccaacagtcccaggacccccctgcccatccgacggcgatcacgcctcgcgctcgccaggccttatagtacccctatcctagggtttactcgctcccatccactcccaagtcccaacacccgtcggcgtcgagcagcggcagcggcggcggcgatgacgacgagcctgaagaagaaccggaagaagcgcgggcacgtgtcggcggggcacggccgcatcggcaagcaccggaagcacccgggaggccgcggcaacgccggcggcatgcaccaccaccgcatcctcttcgataagtaccacccgggctacttcggcaaggtgggcatgcgctacttccacaggctccgcaacaagttccactgcccgtcggtcaacgtggagcggctctggtcgatggtgcccgccggcaaggccgcggaggcggccggcgcggaccaggccccgctcgtcgacgtgacgcagttcggctacttcaaggtgctcggcaaggggatgctgccgtccaggcccatcgtcgtcaaggccaagctcatctccaaggtcgccgagaagaagatcaaggctgccggaggcgccgtcctgctgaccgcttagttctggaatggccaagagaagtgacaccaacggttttgaaggagatgaccggtttggaagctgaaaaacttgcgccgaagaaatggggtctgtcgggaagttcaccgtatgttctcattggatttcttggaggcgtatcctttctactaacacaaggggtcgatctacggcctaaactgagtgctgtattgggattagcagcagccgatgcaatgttgctcggtggtacttgtcttgctcaaatctcatgtttctggcctccgtataaacgtcggatccttgtacacgaagcaggccatcttcttactgcttatctaatgggctgcccgatacgaggagtcattttggatccatttgtggcattgcgaatgggcatccagggccaggcagggactcaattctgggatgaaaagatggaaaaagaactagctgagggccatctatcaagcacagcgtttgacaggtactgcatgattatgttcgccggaattgctgctgaggcacttgtttacggggaggcagaaggtggagaaaacgacgagaacttattcaggagtctgtgcattctactgaacccaccccctgctgttgcacagatggcgaaccgagctcgatggtccgtcatgcagtcttacaacctcctgaagtggcacaagaaagctcatagagccgcagtcaaggcgctggaagacgggcacagtctcagcgttgtgatcagaaggatagaagaagccatcgcttctgacagcaaataaatatgaccgttgatcctttacatgtgttcttgtcaaccaagctttgttggcagcttccacaggacgcggaagaaggagaactttcttaattcgcgcgaagggttagtgtgtgttggaacatgagtggcgcttttcaaagaaagaaaggcagaagatccttggagctggagggaatagcggagaccacgaccagggcgtctgatggacggactagatcgagtgatacatccgttggagattttaaggaagtcaaaaggccgttgtgaacttgtgattagtgtcgatgccagatatggcagatgtgcatagggagatatgactatatgatgtcttgatgagtatgcagacatgagctattttgcaatggatggataagtaccgttggtacttgaggtacttttattgtttattatttatttatttgcaatcagtttggtaattaagaaaggtcgggttgcctatttgagctgccgtccggcgtccgctagagatggatactgcatatccgaattatagaataaatttaatattatatatgtatatatatatatataat

SEQ ID NO: 17692 - DNA, 757 bp, Zea Mays
caaaattgtgtgattgtgcccactgatccagctttagaagctcatacatctgaattgactagtcaaactcagtgatctctttggggactaatcaaactcaagaactaagtttcatgtctgatctcgacgtccagcttccatctgcttttgatccgtttgcagaggcaaatgctgaggactccagtgctggtgctggatcaaaggactatgtgcacgtgcgtattcagcagcgcaacggaaggaagagtctgacaactgttcagggcttgaagaaagagtacagctacaacaagatcctcaaggatctcaaaaaagagttctgctgcaatggtactgtagtccaggatccagagctaggccaggtcattcaactgcaaggtgatcagcgtaaaaatgtcgctacttttctagtccaggccggaatcgtgaaaaaagatagcatcaagattcacggattttagactgcaaattttgagtgcttgtgtgtgcctatcatatggtaccatatgataccagtatgttttgtaagtgttacctgcatgaaagtatcgtttgtctggggaactgtctactactgatattgaataacaagagagattgctgttcgtgttcgtctatgaattattatgatctttccccagacttgagctttccaatccgtgttcttttatgatcactttgcttctcatgtgctttctgatatgtatttgaccttcacctcaagttgtatcttttatgatccaatccgtgtttgttt

SEQ ID NO: 17693 - DNA, 989 bp, Zea Mays
aaccgaacaagccccaacagtgccactgtggcagttacggggaaacatccgacagcgacgatgcgcgaggccagtaccagatatgtccccgtcccgccacacgccttctgcccacctctcctccttcgggtcgtcgctccactccagtccaagtcctagcccgccaggaagccggagcatcgcgcctgcaccgcacgcccacaggcccacagcaagcaccaaacaagccaaacgatggcgctcctggtgctgcgcgcgcctgcagccgtccacgcggcctcccggctgctccctccgcagccgcggcggcggcggcggctcgtggccgtcgcctcggcggcgtcctccgcgccgtccggcgaggtgtcgtcccagcacggcggcggcggcggcggcggctacgggatcgtgggcgggcccaacggcaacgccgtcgtgcccgccaccaagtccaccgtcgtcgagaccaccgtcgagagggttatcttcgatttccggttcctggcgctcctcgcagtcgcggggtcactcgccggctccctcctgtgcttcctcaatggctgtgtcttcatcaaagaggcataccaggtttactggtcgagctgcgtcaagggggtccatacgggacagatggtcctcaaagtcgtcgaggccatcgatgtgtatcttgctggaacggtcatgttgatatttgggatgggtctctacggtctcttcgtcagcaacgcttccgcgggtgttggttctgaatccgaccgtgccctgagcggatcgtcgctgttcgggatgttcgctttgaaggaacgccccaagtggatgaagatcacctccctcgacgagctgaagacaatagtggggcacgtcatcgtgatgatcctgctggtgaagatgttcgagaggagcaagatggtgacaatcgccacggggctggacctcctcagctactcgatctgcatcttcttgtcgtcggcctctctctacatcctgca

SEQ ID NO: 17694 - DNA, 2105 bp, Zea Mays
cttgatcagccacttcctttttcgggaataaggtaggtgatgctggaccagttcttgacatgatgtctgtgatgctagagaacatatcacacactcctcttattgctatagcaactacttctgctgtttatcgcacagctcaaataattgcttcaataccaaatttgtcatataagaacaaggctcgcaaagcttgagacaaagcctcagactttcttcagtgtctcacaaacattcttatacttctttaaaggaaggtcaaagtcccttgacagagtcaatcaacgaaatggaaacaattgtgttaagactaagcagccagcaggccactcttctgctctcatctatttggcgtcaagcactttctccaaaaaatgctcctcaaaactacgaagctattgctcatacatatagtttgcttctattgtttttgggatcaaagacaccaatttttgaggttcttgctcccagctttcagattgcattttctttaatgagccattcacttggaggaacagattcattgccaccatctcgccgccggtcattatttactctggctacatctatgattgtttttgcctcaagagctttcaatgtggcacctcttctcccaatttgtaaattaatgctcaatgatggaacgatggatccattccttcatctggtacatgagaacaaacttcaggctgtgaaggactatacggaagatccatcaacatcctatggctcacccgaggacaatcagaatgccttgaaatctctttcagtggtggaactaacaaatagttgctcccgagaatccatgattttaaccattatgaactccataagagatttaccagacttggagttagagaatataaggagtcaactgctgcgtgatttctcccctgatgacgtgtgcccaagtagcgctcactttcttgaatcacctggcaagattgcaccgccatgttctgatgatgacaccgactacgactatcaagaggctgaacttatcgatctgagaaatgacaacaatacttatttggaagcctctgcaactacactggcggctatagctattcctgtgcccacaacaaatcttctcagtatcgatgaacttctagaaacagtcgtgaatgatgtgtcatctcagaccggagggcaatgtttggtgtcaatggccggagacatcccattccaggagatgactagccactgtgaggccttttcgatgggaaagcaccacaagatgtccctgctcatgagcttcaagcaaaacaagcaagcggccatggtcgtcgtgcctgacaatcaggttagccacgctgaagcagcacatacctccgacaagcagagcacaaacccgttcctcctgcagagcatcagtgccggcgaggcacaggttgctggcgacgtccagcagccgttcctgaggctgccaccgtcgagcccctacgacaacttcctcaaggctgctggctgctgatttccacttgcagaaaccctgccgtgtaaccaaccgaatgtatcgtgtgtgtacagtggccgtctgcctcaatcttattacaaactaaacaagggtttggatattacatgctgacttgttttcggatcatgccagggtcaatccaaaattcatttaattgtaggattccaaagcaaagggaatgatagatatataaggagaaaatgttgaaatctaacttagatcgtctccaacggcttatctatatggccgtactaacactgttttacattgtatactgtatcgttggtagagtgaaggttaaatataagaataaagaagatagtggtagtgtgagatcagttgtttttcattaagtagaaaaatatatgcacttaaatttcatcagataaacgattcgaacatgcgttgtggctaggtagatagctacagccacgcaccctggtgagtgagtggtgacaccacttgaatctaaagaactagcggacatggacggcacgtcgtgttctgaacgccgagaaggtccatcattaacttgcaagtctgagctggaacggaaggaatcaagcccgctgggatttgccggtaaaagttactaatactggtttggtgaccactgaccaggaatcta

SEQ ID NO: 17695 - DNA, 1376 bp, Zea Mays
atgggcgccgcgagccagctccgtcgccggacccgggcgcggacgccgccaggtccagggccggaggccgccgccgccgacgacgacgtgaggtgcgaggcgtgcgggtccggggacgcggccgcggagctgatgctgtgcgacgggtgcgactgcgggttccacatcttctgcctccgccccatcctcccgcgcgtccccgccggcgactggtactgcccgtcctgccgcgccccggcctcctccaaatccgaacccgccgctgccggcaagaagccgaagcagttcccgctggtccagacgaagatcgtggatttcttcaagatccagcggagcccgacgccgttggtggaagcggcggagctgaagaagcggaagcggaagcacgggggcgcgctggtggcgtcgaagaagaagagccgtaggctgctgcccttcgtgcctagccccgacccggcgcagcggctgcggcagatggcgtcgctggcgacggcgctgacggcgacgggcgccgcgttcagcaacgagctcacgtaccagcccggcatggcgccgcggtccgcgaaccgcgcggcgctggaggccggcgggatgcaggtgctgggcagggaggacgcggagacgctggcgcggtgccagcagatgatggcgcgcggggagtggccgccgttggtcgtggcgtacgaccccgtggaagggttcacggtggaggcggaccgccccatccgcgacctcaccatcatcaccgagtacgtcggcgacgtcgacttcctccgcaaccgggagcacgacgacggcgacagcatgatgacgctgctgtcggcggcatcgccggcccgcagcctcgtcatctgccccgaccgccgcagcaacatcgcgcggttcatcaacggcatcaacaaccacacgccggaggggaggaggaagcagaacgtcaagtgcgtgcggttcgccgtcggcggcgagtgccgggtgctgctgttggccaacagggacatctccaagggggagaggctctactacgactacaatggctcggagcacgagtaccccacgcaccatttcgtgtgatgtgaccacgaggcgaggcaatctcagtccgtgtccaccattgcagctccagctccacagctgccaaaatttcgtgtgatgtggggacctgtttgaatcggctttggctagtgactagttggagcgggaagttaatctagattagctggccttcttgtttggacagattagagtggctaactaaaatgtcgattcttgcataacagtgagggcagatgaagcaatctagatattcatcagcacctagggtgacaatgtgctctaaattttatactatattattcatttttaaaattaaactaaaa

SEQ ID NO: 17696 - DNA, 2180 bp, Zea Mays
cctcaaccgtaaaccctaatcgtatccagccacggagccaccattccccttcaacaacaggtagccaccccctcgcccaccacatcttcaccgcaatccacgattgagtcggacgcactctgccatgacgaaacgggagaggaaggatccaggtcgcatgacaagcttgggatccctgaccaagcagccgaatctatcatgggttccgcccggaggattctgcaaagcaaagaagtgcaattggaggatccatgcatcacaattgcctgatggtaaaacttggcaggtaaagaagatgtcaaagaggcactactgcaggagcagaagcaagatggagaagaattgcatggccaatcagtattgggttagagacaaggtagtgccgatgcttagggaaaatcctaacctaggtgctggagctctggtgaaaaagctacaagagaaatatctcatccaggtttcatattgtgttgcatggaaaggaaaggagctagcacttgatgagctgatgggcaaatgggaagacagctttgaccatatctatgctttcaaggctgcaatagagaaggagtctcctggtagtgtagtggagatacaaacagagaaggttggggaaaagatcagattctgcaaaatgtttgttgcattcaaggcttgtattgatggttttttgcaagggtgcaggccctatttaggcattgactcaactgtgctcacaggtaggtggaaaggccaacttgcttctgcagttgcaatagatggccacaattggatgtttcctgtggcacttgggctgtttgaatctgaaagtaaggatagttggaaatggttcatggagaagttgcagacagctataggatcaccccatggtctagtaatatccacagatgcaggaaaaggcatagacagtgcattaaccaatgccttcaacaatggtgttgagcaccgagaatgtgtgagacatctatttaagaattttcagaaaaggtttcatggtgaagtgtttgaaagaaacctttggccagcagcaagagcatataggaggacagtccatgataagcactataatatcatgaaaatagcatcacctgcagccattaagtggttggaagacactcacaaacatttgtgggccagatgttatttttctacagcaagcaagtgtgactatgtaaccaataatattgctgaaacgtttaactgttggattaaagatgagaagtctttaccaccagtggagctaattgatagaatcaggcaaaagattttggagaagttttttgtgaggaagaaccttgcagataagttgactggcacaattttaccatctgtcatgaaacaacttcatgatgctggcagaggtttggttggttatgtggttcacaagggtcctgatcatacagctgaagtgtctggtgttcataaggatttgactccatggagacacactattgatctggtaaatagggagtgcagctgcaagaaatggcagctaactggtttgccttgcactcatgcattgagcgttataggttgtttcaggaacctgaaattggaagattatgttgactcctactactctgtggaaaaattcaagactgcttatgttgggaagatacctactttgacagataagactgagtgggagcaaccagaggtaggttacaaggtatggcctcccatactaaagagagctgctggtagccaaggacaagaaggttcattggagtagaatgagggtcggggaaaaagaggcacaaatgcaagagatgtggtcagtttggtcaccaaatgaggacatgtaatgaaccagtatatgactcagatgcaccaccaccaactgctccaaagcctaagagggtgagacagaagaaaaagaaggtggtggtggtagaagatgatcctctgtcattgcctgcaccatcaagtccagtgtagaagaaaaagaaccagaggggaaccaagagcaagtagtgttacttatgttactcattatactacgttctgtaatgtgccatgaagtggtactatgttctgttagtcatgtttcttatgtaagacatgtgcaatttgttttctgttgaacatgtgtaatgtgtcctctgttggacatgtgcaatatgtcattgaactacgttctataatatctaagtttcatggagtttcatctacttcgatca

SEQ ID NO: 17697 - DNA, 2296 bp, Zea Mays
cgcgccgttacccgctggtcctaaaaccctagcgaaggcgagccttccacttccctcaacctgccgccgccaccgccaccgccgccgccatgtgcccagcagcggcgaccacgagctccgccaagccgtcgaagaagcggaaacagcccgtcatagcgccgccggagtcggactctgaggaggaatctgtctacgacactgcctccgacgatgacgaggaggaagaggagacgcaggagttagagagtgaggatgtagacgaggaggtggaggaggggagcgagggcggcgaggaaaatgaaattggtgacgatagcgaggtggaagaagaggaggtgaaggagaaaaaagaaaaggaggagacggtgaaggagaaaaaggaaaagaaggacatgaagcaagagggaaagaaggcgaagaagcaagaggaaaagaaggcgaagaaggacaagaaggaagaggaaaaaaaggtgatggaggacaagaaagaagaggaaaagaaggcgaagaagaagagcgaggggagtggaatcctgtctaacaagctcttctcggagctccccctctctgagctcactgccaaggccatcagagagatgaactacacccacctcacccagattcaagctagatcaataccacatctgttggaggggaatgatgtgatgggcgcagccaagactggctctgggaagactcttgcattccttataccagcgattgagatgctatatcacacacacttctcaccgaggaatgggactggagctattgtggtttgcccgacacgggaacttgctatccagacacacaatgttgccaaggagttaatgaaatatcactcacaaactctcagatatgtcattggtggtaataatcgaagaagtgaggctgatcagcttgcaaaggggatcaatttattagttgctaccccaggcaggcttttggaccatctacaaaataccaagagtttcatatacagaaggctaaaatgccttgtcattgatgaagccgatcgcatacttgagcaaaactttgaggaagacatgaaacaaatatttaaacgccttccccaggcagactgttcttttttctgctacacaaactccagaggttgaaaaatttgctaaactgtcatttgagaaaaatgaagaaagtaaaaaaaaacctgtttatgttggagttgatgatgataagtcaaaggctactgttgaaggcctgcagcagggttattgtgtcatttctagcgataaaaggttcttggttctgtatgctttcctaagaaagaagcggaataagaagataatggtgttcttctcatcatgtaattcagtaaagttccacgctgaacttctgaatttccttgggatagagtgttctgatatccatggaaaacagaagcaacagaagcgaactactacattctttagcttttgcaaggcagaaaagggcatcttattgtgcactaatgtggctgcccgtggacttgatattcctgacgtggattatatcttgcaatatgaccctccagatgaaccaaaggattacattcacagagttggtcgtaccgcacgtggtgagaaaggcaaaggaagtgcattgctgttcttactaccagaagaactgaagtttctaatttacctgaaggcggccaaggttaccctgacggaatatgagttcaatcagaagaatgtgccaaatttgcaatcgcagcttgagaatattgttggtgagaattactttctgaaccagtctgccaaagaagcctacagatcctacgttttggcatatgactctcactctatgaaagacatttttaatgtccatcaacttgatctgcagaaagtagctgcgtcattcggtttcaagaatcccccgaaagtgaacctggacctggatagcagtgcggcgaagcatcggaagaagatgaggagagtagacggtgggaagaggcatggcatcagcgcttcgaacccgtacgggaggaaggacaaaggcggtgccggcgataaacgacagttggcgagattctagaaaggaaggaagagcaggagcgtttcactattgttgtgttcgtaccagggctttgattgatgttacctggcttgggaaaaatcttgacaggccactaagattggctataaattttgggttgtcttgatatatttggtgtgtaacgcaatcagcctgctcgatgcgaaaattggattattgctttatagtacttgtggtttccaacccgaggaaagttggtgctgtggtttctggttttgcgtctcaacacgaccatggcggg

SEQ ID NO: 17698 - DNA, 1017 bp, Zea Mays
gtatttctcttttctactgaactgtactggcagatatgggcatttgtgctatagatgagtttgacaagatggaagagtcagaccggacagcaatccatgaggtaatggagcagcaaacagttagcattgccaaggctggcatcaccacctctctcaatgcgagaactgcaattctggctgctgcaaatccagcatggggaaggtacgacatgaggaggactccagcagaaaatataaatctacctccggcactcctgtcccgtttcgacctgctttggttgatcctggatcgcgcggacatggaaaccgatctcgaaatggcgaggcacattgttcatgttcatcaaaaccttgaatcgccggcgctggggttcacaccactcgagccatctgtgctcagggcatacatatctgcagctagaagagtgattccttccgttcctagagagctcgaggaatacattgcgactgcatattccagcatccgccaagaggaggcgaagtcgaacgcgccaacctcctacacaaccatcaggacgcttctgagcatactccgtatctctatcgccttggcaaggcttaggttctcagaaaccgtggcccagagcgacgtcgacgaagcactgcggctgatgcagatgtccaagtactcgttgtactcggacgaccgccagcggtctggcctcgatgcgatatctgacatatattccatcctgagagacgaggccgcgaggacgagcagcatggacgtgagatatgctcatgctcttaacttgatctccagaaagggatacagcgaggctcaattgaaggagtgcttggaggaatacgcttccctgaatgtgtggcagatccatccgagcacctttgacatccacttcatcgatgcctgatgctgaagccggcaccgatcaccaaacaaatttcatcatgagtttgtggcttcatgatttgtgacgggagggatgaacaccgtcgactgaagcctaacaggatctaaaagttttagcccagttc

SEQ ID NO: 17699 - DNA, 1209 bp, Zea Mays
ggattgactcatcctggtgttgtgggaactgcaccgtcacttgagctcctaaatatatggaatgaaagagagaaaagtttgtctgagacaagcctagagactattaaactgtgtgaagttctacaccagaggccccttgctcatttaccgacccctgaaaattgcttacttgggaaggtccaagaagggactgctgaatggcacataattgcaaacgaagcggccagaactattgctggaagggaaaatggcgggaattgcgacataaagaacctaagcagaggctccagaatttatctaccagtgtttgtcgaaggagcaaacctcagcactggtgacatgcacttctcccagggggacggcgagatttcgctgtgtggagcaattgaaatgagcgggttccttgagctcaagtgtgagatcataagaggtgggatgaaggaatacttgactccagttggtccaacaccactccatgtgagccccatctttgagataggtcctgtggagccacgtttctcggagtggttagtgtttgagggcatcagcgtagatgagtctgggaagcaacattttcttgacgcatctgtggcctacaagcgtgcagttctgaacgccattgagtacctttccaagttcgggtactctaaggagcaggtgtatcttttactatcatgctgcccatgcgagggtaggatatctggaatagtggactctcctaatgctgtaacaactcttgccatccctacagcgatatttgatcaggatataaagccaaaacgcgtgaaggggagaccacttggaggaccacagttgagaagacttccagatcttctaagctgctcaaatcatggacgccttcctgccacccaagacagaagtggtacaagcgcgccctagtatatggaaacagatgcagtatcaatcgacatgcaactgtgccaaggctataatcaagaatgcgtttgtctttttttttttattttcttcgtctaataaaaattacgataaagcttttgccgttctttagaaaaaaataatcaagaattatcctcgattcatcaggttgtcatcgtgaatgagagtgagccttttggttttataccagccaggctctttttaaatggtactgcataaattctcaaatatttatcgtccgctagtttatttttaaactaaaccgtaataaagaaaaaagaacggagggag

SEQ ID NO: 17700 - DNA, 1359 bp, Zea Mays
ctttcggaataggatttccaagtgttactatcttgaagaactctgtaggttccactcttctgccattgctgctgcgagggaggccttagtgtatggggtgccttcaattgcaatctcattgaattggaagaaggacgaaaccaaagacagtgacttcaaggatgcagctcaggcctgtttaccattgataaatgctgctttggatgacattgagaaaggaactttcctcagaggttgcctattgaatattggagttccaagtgcaccatctgcaaataagggtttcaagttgaccaaacagagtggatacagtcctgctcaaagttgggaagctgtgtcaacaagcaggcccttatctgctactcacttcatgggcatgcatcaaagcctcggtattcagttggcacagcttgggaaggatgcatctgcagcaggagctgcacgtagagttagtgcccaacgaaaggcagtcgaggttgagtctgttgcagctgctggtaaacaagagattcgagaagtagtgaagaagttattccgtgctgagtttgtcgagaagcgatatgaaggtttagatgaggatatcgatttgagagctttggagaatggatttatatctgtcacccctctgaatgttcatggacaagtggagcttgaaatcggagccacagcttctgattggctctcagcagctgtatcactagacaaagaaaaggtagctgcttcagctacagctgaccaacaagatgttgcagctgaggaaaaggaagctccctcagcagcctaacaaacacgcagacatgtccacactccgtaggtgtctttagttcctgtggtgatgtcgatcttttattacctcttgtcagtttggtttgtctagtgttttgccctcaatatttgtttgttgcaatgtctattttttttgttcaccttctctgccgattaccggcttccttggccctacaaatgatttggtgcaggcagccctgcattttggatgtaacgatgtaggctacggcaactaccagatgaatactgcccagcccccactatttttttcagtgtggtttgttataggaaggtgttgtattcagcatggggtatgtgattgattttgtcttgctcccgtctgaaccatggcaaccaaatgtggccgtatggatcccttcactttacaagaattgaaatttacggccccgtaggaattggaatcttactattgaaatagtatattttttttgaatgtgacattccaccactttccaaagttatcatataagtttatctcaaatttatagtgtgggggatagaaattgattttatgtatctccaaattatgattctactctgcaattttgtaac

SEQ ID NO: 17701 - DNA, 1476 bp, Zea Mays
agcccgctgccgcaaaaaacacagacaccaaccaaccgcctctctctctctctctctctgtctctcccgctgctgagatctcatctgactgcccagagggagattgagactgcggaattgaagcagctacccaacatgtacgccgacgccctcgcctcctcgcagcccccgccgccacccttcctctccatgggcgtcatggaccacgaagcctacgccgccgtgccatccatggtatcagaatatgacctcggaggagaaggggacctgttcaaagctccacaagtcatcatccaagaagaagcgctgctcagccttgatcctgtcgcagctgcctgctcaatgatgaatcaaactattaaggatgcaggcatccagaacgacgctctcctgagtgaagtgttgtatgagtgcgagaaggaactcatggaaaagtctgcaatcgaagagacaatttctgaacttatggatgttaagatccctatgctgcaagctgaacaactcccggccatggagaatgagaagcgttccattcctgaatgctcgctccagaaaagtgttagttctggatgcctcaactcggcagattggatgaatggagctgtcaggccaaactttctagacttccaagggctggactttgaggcagcgtttgggctgaggagagcttacagtgaaggagacattcagaaccttggagccaacacgcctcgaccagcagcaaatgtttgtgtgaccatcagtgacctcaagaccgaagaaaggaagcaaaagctttccaggtatagaaaaaagaagatcaagcggaactttggcaggaagattaagtatgcttgtaggaaggctctggcagacagccagccaagggtgagagggagatttgccaagatcgaagaatgcgacctgctgctgctgaattcaagcacttagatggaggttcagtcgatcattcagctgttcaaaatccacctcctctacccagccgttttggtgcgagccgagggagttaagagctgaaagtggtggtagtctagttggttagctagcccctgtacaaaggcttgaatgaagatggcaataaaactcagctctcccctctgcttgcttggcactgcactccttgtgccttactgaaaacaagagcaaaaacagactcatgaagattaacaaatttcacggtgtattccttcctttccttgtgccttactgcaccacaatcaatccaactcaaaagtaataggtgacggtagctactttattacatcctgccttggtctgtcggcaattatgtgaaaactgaaaagaaaaaagcaaacctcaagagatttagtcgctggttaattcaccccatagacccacttctccgcattgctggtataagagaccagctccttgggttcaaaccacaaggcgatctcatcctttgctgtctccgggccatcacttccatgaatgatgtttctaaccttcccacaa

SEQ ID NO: 17702 - DNA, 614 bp, Zea Mays
ccactttatgtattgagaagaaattattggacaaggttgatagtaacactattatcaacgacttcacatcaagaaatgttagaagaaatttttgaggtaggaccgcctacgttatgagctttgaggtgggagcggtgctggaggacgcggcgtggcaggccccggagtactgcttcaccaacaacggtgggcttgggctggccgacgagaccaccaccaccatcgctggcggcagcagcttcgtccccaggagcgtgctgtgaggtccccacgagcggcagcagcttcagtatttggagaaatacgatcgatatgtgcacagcgtacgcgcagtaatgtatgtaatcttttgcctgtctgttgtttatctctgagcgaaacgtgtggcttttgtggtgtccacgagctctgcggactgcgtgacactattgaggaagagacggaaacaaaagcaaaaaaagaaagacatcggcatgcacaaatagcatgacgagacgactgtacgaaaaccacaaaacttgcacgtctttcatctaccatcggagcagctagctttcgttgcttccagcacaacacacacgtgtgccaggccgcccagggaaacgctcgaggag

SEQ ID NO: 17703 - DNA, 2257 bp, Zea Mays
cttcctgacctcatcacgcccgctcatctcaaagatctcagccgccgtcgtctccgtcgctccgccgcacctccccccatcaccgcctctctaaaaccctaatccctagccgccatggcggctgttgcggcggccacctcgcacctcctacgccaccaccgcaacccccaccttctcctcctccgcgcagcgatctcatcctcccgtgctttgccccagcagccggagctgtcccccgacccgaccgccggcacccccgacctcgccggcgcggccccactccctccaaaccccagcacggggagccccttctacacccagaactggcgcaacccagccgccgccaacccgccctcctcgcttctgcccaccgtcgtcgccggcagccccttcggggcgcagcacttcatggccgccttctacgatgcacccgacgtcacggggctcaaggagacgttcgccaagtatatggcggagcagcggtgggaagacatgaagcatctgttcgaccactgggtgcgctccctcgacgccgccacggggaagcccaaccaccccgacgtcgacctcttcaatcactacctccgcgccaacctcatgaccagggccctgccgcacgagatgctcgatctcgctgaccacatgctcgagttcgagctccaacccaacgctgcatcgtacaacctcgtgctcaagagcatggtcgccagccaggagaccgagggcgccgagaagctcattgaacggatgctgcaaacaggaacatttccagacgatgaatcctacaatttggttgtaggcctgcttatcagacagaacctcgtcgattcatctctgaagtatttggatctgatgcttaaatcgggctacacgttatcactaactgttttcacagattatatccgagcatgtatgagatctgggaggttggacacgttgacatcaattatagagaaatgcaagacaactgataagaacaaagtcttgtgtccggaatggacttggtgcattgacatagcagatgctgcatttgaagctaacaacagcaaattagctctttttgctttggaatatcttgcaagatggattgctcgtggtgagaatgttaaacctcctgttcagctgtcagttaatgaaggtcttgtaatatcagctctgagtgctgctggcagaacttataatactgacctcttgaatgctgcttggtcgctattacggaaatccctgcgccagaaaagggcacccaccccagagacatatcttgccaagatctatgctcattcatcaattggccagcttcaaagggcttttggtacattgcgtgaatttgaaaatgcctatgggaactctgaggacattgatttagagctcttctcaccatttacttctttgcatcctcttgttgttgcttgctgcaaagatggctttagcacattggattcggtgtatggtcagttggagaatctgatacatgctgatccaccgtacaaatctcttgctgctctcaactgtgttgtattggggtgtgcaaacatttgggatattaatcgagcttatgaaacttttgtggctattaaggaaaaatttgacctcactccagacattcattcatacaatgctcttctgtgtgcatttgggaagttgaaacagacaggagaagcatgtaatgtgttccagcatgtattaactcttggtgttaagccaaatgcaacgacatactccttgcttgtcgatgcccatcttgcaaacaaagatccaaaagctgctcttgccataattgatgagatggttgatgctggcttcactccttccaaggataccctcaggaaggttcgaagacggtgctctcgtgaatcagacttcgacagtgacgagaaagtccagtccctggcaaagcagttcaactaccgaatgggtggtgagaaccgtagagagatgctttatagcatagaatacaatcctgtgtactgaaacattgctactgagtttgctagccattgggagagcacagacattgcagcttgtaaattacttggatgtaccaggattcttaagcaaattttcagtttctcgatcatcatttgtgctcgcagggttcgttttaggacttgctaataagatgacactttgagtctgtttggttgtcaggaccagcatatcctggtcaaagcccagatgcaggctgggcatagcctgcatgcattcgtgcaaatcaaaacaactctacttgtttggttgtttgtccacaattaaccag

SEQ ID NO: 17704 - DNA, 1130 bp, Zea Mays
cagatgttgagactggatcgaaagtcagcgaagacactcaacgacaaccccttggtgaagatgtcggcgaaccgcagcgtggtggggacgctgagaacccgaacgtcacaatcggcgacccgctcgcggacaaagtgcaggtggcaagtgcaacagcaacattcgtgatgatgttctcctcctccctctctgtggtggagttttacttcctgcacagattccccctgccttttgctggctacctcatcttcatttccatattggctggattctggggccagtgtttggttaggaagatcgtgcatgtgctcaagagagcatcgcttattgtcttcatcctctcctctgttatcttcgtcagtgctcttacgatgggtgtcgttggaacccagaagagcatttcgatgatcaacaatcacgaatatatggggttcctcaacttctgcgagtaactcaaacaccatcagactgtcgatccgtccgggagaatccaggccaatgcctaattgacctcatctccctcaaaatctagaagaataaagtcgccgagtatgtgcacaagttagctcctcgccaacatgtgcgcatttagaccgacagagtcgctgtagtgaattcagctcgtgttagctcctggctaacgagctgaccatacggctttagttttgtgaagtgggcgcgatttcgtcatgtcatgcatgtgttagctcctggctaacctgcaaatgcgtgtgttggtgcaggtttttgtcacgtctgcgtcagctcctggctgaccagcagttgtttgtcgttcattctctgcgtcagctcctggctgaccagcagttatttgttgttcattcttgcgctagcaccaggctaggctgcaaaactgcaaatatttgttgcatggaacattgtaaatatcagtcaattcccattctgtttgtgcaagccgagtgcgtttcaagccgtatttccgtgaaaatcagaacatgttcgctgcggcttccaccgacttctgttttttctacagtatttttattatagctaaagcagtccaaacagctttaatctgtctctttgagtgaagatgctgttttggacctaaaatatgatggatcgaaatcatataaagcactggcaat

SEQ ID NO: 17705 - DNA, 1409 bp, Zea Mays
ctggcatcgttccattctcctctaaaccctagccgcctagcgcctcgatctgagcagcctgtctcgcggaggtagttctggttgatttggtcctagatggcggaggaaaaagtggggcggatcttcgtcggcgggctgtcgtggaacaccacggagcgcacgctcgagcgcaccttcggtcagtacggcaaggtcatcgaggctcagagactgcagtcagttcaatttctgcatgttaggaagttagcaaagttgcaggaaaagaaattcactaatcatttgagctcactggttagcattttttgcgatgatgggttcagtaaagatcaattggaggcatatacactgttagattcagttttgctaggtgtgatctgttttgtggacagaaccagatacctgtttttgccttgttagcacttaagataactgcttccagctttagaacacaaaagaatcatcaccggcatggttaatgaactccagtcaagtaaacatggttgccagcactggactgaacttgtggcaaaatttggttgtgtcattctggatcagtttgataagaaaggcagagaaaccatttgtcctttcagtagcgaggcagcaatggtgatgctgaagaatgttgtatgctcatctttgcctacacttgcttcaaagagcattattcccagtgtccatcactccattgtgcatttccatgggaaatgcttagttctttgcgccaaaggaaagccaggattaaaaaatgcatttagacttccggattatatttttctggtactgaaggatatggcagggtaactaaaatctacctggtcatggtatagttcacctctagttttgtgcccatacaattgcccaaaagtaactggtctcagttcagttctctggattggatactggttcttgcagcacgtggccctcacctggaactgttcagactcatcattgtcgtctgtgatcacgtgcttgattcttcagttttgacttctgacctttggctgtagtaatcattaatgttcttaaccagtgaatggtcaagcagattttgatttgcattcaaatttgagttgtggcataaggaattaaggattgaccaaactcttgtacagttgggatgatttcactcgttttgcacaatgtttattagctgtttgatttgataccctaatttgcatgttgttcctactgatagaatttttggttgctcactattatatatagtttctgtcttcccattggttcattttcactgtatgtataggttgtagtggaaagggagacaggccgctctaggggatttggatttgtcacattttcagaacctcgggctgtggatgctgccattcggggaatgcataacggagaactggatggccgcaatatttctgtgaacaaagctgaac

SEQ ID NO: 17706 - DNA, 2975 bp, Zea Mays
tcgtttgggccaggagccccgcacgagcacccagccccagccccagccccgttctcggcttctcgcgtcttcttccccctttccgttccaattccaactgcaactggccgcgcccgccgccgccgcggttcccgtagctggggttcagacgctccgtcctactcccgcgccacgtctcctctgggccacttaacaatctcggtaacgcacgacttccccgccagtttcagtcccgcccccgacatcttccaccaccgggtccggggggccatctgccgtgcttgccaccccgcggtcgcgatcgatgattcctcgagagcagccgccaggtatgttccggccgccgaatgcctttggggcgccgcccccctttcttcctcagcctccaccgttgcagtggcagtggcagcaaccgcccccgcccccgccctcgccctcgccctcgcctgcggttaccttctggcagcgagacaatgtgcgggatcatgtgaggaagctgcaacagaccatcgagttatcaactgcgctaataaaagagctcgaggaaattgcggcggccggaaatcctggtgatggtgccacagaaacacgaaaatctgcttcgtcctcggcggaattgccgtgggggtccggcgattcttcagaggacaagcgcctcggtttcgttgagctggctaggtccatggggattagtcaggacactcatgagtcgatggcaacagatgcagccaattacctttgccaccagcttcagcatcttcttgggcctatctcttctgcgacgagccaaagtggcccctgggaggagaggtcggcgatggttaggttgactcagaagctgcagaaatctaagagaaataagcggtggcggcagaggagaaggaagcatgttgcggagctttttcagaaggagcgtgcggattatgatagagttgaccgggaagctgatgaatggagggctaagcaaatagccaaggacattgcaaagcggagggtggaaagcatgcagcagattgctagaaagaaaacaaatgaggaaagaaagcgcctagaatctgagctggagcttgccctaatggtcgagaaacttcaggagcttcggtctataagagttcaaaaaatgaagaaacaaggctgcagttgaggaagaggagcgccaagctgcatctgctgctcggactgatgctgttaaggatgctattctgactgctgaggagtcaaggaagcctctacagtatacaaattctcaggaaggtggttctgaacagcctaaaagtggaccatctgaagacgaggaccagggagatggtgggatgagtgagagaaatgaccaggcaagccaaaaaacagaacatgaagatgaaggtcatagatttgaggggaaagggcatggacatcatgaccctgtcagcaatctgccttttgagttctaccattattatcatggaagtgactatgacatggggacactcattgaggtccgcagaatgtgggattctttcatcagacctggaggaagccgtatacctgggcactgggttccaccaccccctccagctgatgaggtttgggcatcttatttggtgcagcacaagtaaatcaccatgggtatgagaaatggtcttttctgcttcaaaaccaccggaatctttaatggttcctgcaaggcacacggatacaggctgtctctggtggtgcgcacctatgtgttgagctgagctggttggttggcggtttgcatgaacaacgcacaggcagaggcaggaaacaagccaacgcccaacggcaacaagagaaaaaaccccaagacctttccaagccagcaggcaacagcgcaccaatcccgacgcgaatcgcccagaacgcgaggcggaatttcccatcctcttggacccccccccccccccctctgttcttcctccttcccccgctcctcgtccacacgctccgctccgattccgcccgcgtccgcggacccagatccggcgcccgcgcccatggcgacgcgcaggcgaatgctcctcaaggtcatcatcctcggcgacagcggggtcggcaagacctcgctgatgaaccagtacgtcaacaacaggttcagcaaccagtacaaggccaccatcggcgcggatttcctcaccaaggaggtccagatcgacgaccgcctcttcacactgcagatatgggatacggcaggacaggagcggtttcaaagtcttggtgtggcattttataggggagctgactgctgtgttcttgtatatgatgtcaacgtatccaagtcatttgaaaagctcaacaactggcgtgaggaattcctaattcaagccagcccatcagacccagagaatttcccatttgttgtgcttggtaacaagatcgatgttgatggtggtaacagccggactgtttctgagaagaaggctaaagcatggtgtgcttcaaagggaaacatcccctactttgagacgtcggctaaagagggcttcaatgtagaggctgcatttgagtgtatagcgaggaatgctgtaaaaaatgagccagaagaagatatgtatcttcctgatacgattgatgttgggggcgctggaaggcaacagcgttcgtcaggttgtgaatgctagaagatatggagcactgcgaattgctcggttggttggtctgattctctagggcttgttgtttgggtggcctgtgtcatcatttcatatatgtatttagtttgcaaaactgctatttgtggacactggatagtttggaagtctgcatgcgggtgcttattgtcgactcccgtgtagatgcagagaactcatttgtaactgccgtttcggtgttgtatcgtatctgcgctagatgctagtgttgtaacgcttttgattgttgatggattgcatatatgtactgtatttgtacatgaacagaacgtagtgcccattttcatagtgttcaattgttggttggtttggtattgttctttt

SEQ ID NO: 17707 - DNA, 1066 bp, Zea Mays
cgggtgagcctggcccgtgctcgcctggtaaaagtgctagggttcttctcgcccatcgcagccgccgccgcggctctcgcctcttgactcgctctcgcctctcggagcaaaagctgtgtccgctcctcctggtgatcccggagccagtcctcgccgcaccgcgctgtgtctgctcctcctggtgatcccgcaccgtgctgtgtccgctccatcttcctccgccgccacactcagcgccggtgcgagggcatgtctacctacccgaggacctacgatctcatccatgcggactcggtgttcaccctgtacaggaacagggagaagatcctcctggttgtcaagacgtattggactacccatgaggccatgaccaagatcagtagcaggactgtcaagtaaaattctcaatgttgataagaatttttcatgtttggagttgtaccaccgtttctagctccttgaactagtgatctcttgacggtttgtgcttgctgttctttctggacagtacttgctcggataggaaatttaacatgtggggggaaggaagggtaggtagtaagacccctggcccctgcaaagttttcttcaattccgaattgtgtccaaatggtaaatagaagtcattgttgcgagtcaccccgaccccggataagcataatcacaactggattcattctagcattacaattttgttctgtgtaatttcctttttttaaatcttattagcatgtgttgtcccagatctattaatgatatgaaagaacactgcttctggtcccaaattatggagagaaagggtccaacagtcgagacgcctgaatggtgccaggaatgaattggtaatgtacaaacacatttgacaggacagtaggccatgtaaacaggtctctggtctctattaaaatcatagtttctgtttaattacaatcgtagttctgttttttgttatccatattttaagttgctgctatagttcatatgattgtaatcgaaatgattgtaattagttcaatgagagaaattactagcaagaggatcaatttaattcagattattgtaaatc

SEQ ID NO: 17708 - DNA, 1292 bp, Zea Mays
ggaacgcatcggtgatctcgcacaacggcattgtcggcggcagcggcatggaatgagaaaaatggaggcgtcaggttgaaaacatgtttgggttatcaaattttgttcctatcctttttggaagcaaacagttgtgttctgaactagagaggatacatgatgctctttgtggttcttacagtgaaaataatgtacttggtgagttactcagtgcttcttctgatcctcatgagcaccggaaactttgtagttctgtgatgtctggattcctgatcgacattggatggcttatcagaaagcctactcctgacgaatttaaaagtgtgctgagttcaacaaatatacagagatggatatgcatgttgaagtttttgatacagaatgatttcatcaatgttctggagataatcgtgaagtcaatggacagcatcatgggttcagaggttctttcaaacttggaaagggggaggttggaagatcatgtaacagcatttcttggatatgtaagccatgctcggaatattgctgatcgtagagctaaccatgacgagaaaacacagattgaaacaagaggcattattgttacttctccaaatcagccaaacttaggcgcctcagtgccatttgctagtgaaaacactgactttggaggggataacaaattgaactcaactgatgaggaagaaattatgccacttgtgactagagatgtctcacaccggcactgctgccagcctgatacgactgttaggtggcttaagccctcactgattgttacttatcctggtggtgccacgagaatgcgacttgttacgactgtggcggttgcggctgttttgtgtttcacagcttgtcttgttcttttccatccgcatggggtaggggtgcttgcagctccagtgaagaggtacttgtcgagtgactccgcatcgtagttgatgttatagatcagatattctattttgccgtgccgctctgctctgtctgtatcatttgcgctttgttaaggcatagcttgtgtatctgatttttttgtaagggaaccaacacgcaggtgcttttcatctgtgcaaaactggcatcttttgtttttttcagactgtaagtataggcgccggaagctctgacctgctaatgtttgggcatgtaaacttctaatgtagtgcatcagttaatggaaaatagctgcattgctgcaaagggtggtgtgcgtctgaactgttggcatacaatacaattgtgctgttctcgctgctgcgggttttactggcatacgcatacgccgtggagaa

SEQ ID NO: 17709 - DNA, 802 bp, Zea Mays
attgcggcttcacttgctagcggttagcctgagtggcaaattcatctgtgctcggtggcccatggcattggttaggggcaactcttcttctaaagaccaagtgaaatgatccagcataggccatacaaccagaaagttgatgtctacagttttgccattgtcctgtgggagttagtgactgggaatgtcccctttgcaaacatgagcgcagtgcaagctgcatttgctgtggttaacaagggcgtgcgaccagccataccccacgactgcctccctgcccttgcggagatcatgaccatgtgctgggacacaaaccctgaagtccgtcccccattcgctgagattgtgaggatgctggagcaggtggaggtggaggttctgaccactgtccgtaaggctcgcttccgctgttgcatcgcccaaccgatgacgctggactgacggactgagtcgtccgcaatccaggaaaagaacctggagaggggtttaatcctatgtgtttataatcccaatagacttgtgcttctgtctttgacatgttatcgtagagtacacctagctgtcgtcaccagtggttgtaatagaggtagctttatgcttgactaaatacccttccgttataacaagtgcatgctcttgctgctcgctgttatgtgtcttcatcatcatgcggcagcatgtggaagctttgcttaatggtatatatatatgatatatgtattattagtaactagcatggatttgctcctgcctcgtagtctgtcgaaattcgatgctgacagaaccattaatctttgccttg

SEQ ID NO: 17710 - DNA, 140 bp, Zea Mays
ggacactgtcctgtgcgcctctgactctgccgctacactgttcacgcgtcaggtacttttgcagttgaccgttgcgcgcaggtagccgttgcccgctgactcaccggacagtccagtggcacaccggacggtccggtgaa

SEQ ID NO: 17711 - DNA, 929 bp, Zea Mays
ctccactcaaacttttggttcagaacgtcgcccaattgtagagtttgcgcttgaggatgttgaaaaggtgaggcttcagaagattcgaatggaacggcatcgcaagtcagcagcagaaactgcagaagttcagcagaccccttcaggggatcaacctgcaagtgaaggccgtaacgcagataacagcaggactttcagaaaaggaaacaagcggaaatcacacagtttaccatctaaaccctccgactctgttgaagggctggccaaggatcctctagttcctggagttcgaaacgcgaaagctgcaaagagagcaaggaagtcaaatgtggggaccattttgccggaccgaggtctaacagctgcaaccccaaacactgctcagaatcaagttgcgtcaagtgagcttgatcaggcagctgctccaaagaaaagaaaaaacagaaaagacggtcaggcagagcaaaagagaggaaaggttacaaaaaggacaaggaaagaaccttccggggaaggaggcgtggacaagtcgctggtggagcagtaccgtttcaagttcttgcaacatggtgtgagcaagaccaagaccaagaccaaaggatagttgacttgggaactgtgggaagtgggattgatgttgaagagcagcacggtgtcccggaccaccgtataacgtttcgaagagcaagtctccacaaactttctgaggccaaaatttcgattgtgatgcttaatagttttgtgtccatctgtactgatatttataactgatctagttacagccgtataattatgaatcatcttatcatacaccgtttatggcttcatgatgacctgcctgtgtctgaaattcctgtgttggtatttctaacggaaactttgcaggaaattcatgtggcttctcgagtgtatgtgattttgcttccaac

SEQ ID NO: 17712 - DNA, 1613 bp, Zea Mays
cttcctatacattctacatatcaaccagaccgagaaatgcagtcaagatctcggatatgggacttcaatttaggacggtcaaggcatcacgatgagaaatctgctcttgaagttggatacggttctaaccatggcggctttatgattaagagttacagtgacatgcttaaggacatttcttcggggacaacgaaagatctggaagatatttatgactcaagatactgctcaaccgccgaagatatcatgtcctctaatatctgtcagttgtcatcgaaaaatgtgagcaccgggagcaacaaacggaaggtgaggtcatgtgctgcgtcgacgatggatggaccaacgacctccgggaaccacaaccacgtacccgcttcagcttcaggtccaggagcagcgctcaccagggagatctccttcggggatcagacggtgtccgcccccgcggccgagaccgagaggcctgccgccgtgaggatcgacagcgagacgcttgcgcagaacagggacagcgccatgcagcggtacagggagaagaagaagaaccgcaggtacgagaagcacatccggtacgagtcgaggaagctgcgggcggacacgaggaagcgggtgaaagggcggttcgtcaagtcgaccgaagcactcaacgccgccagatacaacggatgaggcagccatatatatatatatatatgcatggcctgcgggcggatgagtttgctgcgcgcctgcgttattacgtgcggtagttacctcacggagaggtaggtactgctacctggaggtgctacgtatgtatggcgcggccggaatcgctacgcacgcggcccaagtttaattttgcgttgaagctatagcgatcgtggccattgttgggcagtcaactccagagattgcacggtactgcttgtttgtaacagacgaccctccctttccccttttttctctgttgttgccgtcatccccaccagaacagaaagtatgtagcttacctacagcaccgatttaccatgcatgcatgcatctggtcttaacgagctactacggtcgtcgtcgagcgcgtgatgcgttagttcgcagtgaagttgttctgttttgtttatactactactacggtagagacggcagacggcgaaccgcccgctgggctcgttcccccacaaggccaccgaccctatggcggtcgacgccgcctgcaggttcaccgtgaactgatggacgacggagacgatcgatagattagattagatggcagccatgaataatgaacggtagattagatgacagccgccatgcatgaataataacgcacctggtcccatgtggtgcagccagtgcttgctgacgagcttcttcgcgtagacggccgtgtgagcagcgcgtaggcggcgcaggcggagttcgttgatccccctgcaatggacaagtggtttcaatacaatgttatgcatcgacagcaagaaggctatagcagatcccaacgattaactaataatctgggctgggccatattggtttacgtgtacgtactcccagacggcgaatatctatcttcaattaaggtgaggacgatgccccagcggtcctgcctgttggtggccacgaccacg

SEQ ID NO: 17713 - DNA, 1238 bp, Zea Mays
ttttttttttttgacaacaccttagaaaataggtatgaactggcaaagagtaattctgactacataaatatggtaagaaatggattacaagagcaagacttagcatgcttgtcaaacagtcacaatgttaactacctgaagccttcccatttggctgaggaatatacagaaaaactcaaacatgtcttttcactgggaaagtccttaaggcctccgaagaaaaagcttctcatcttagatcttaatggtttacttgtggatatcaacgaagactaccacaacgctcacatggctgatgccaaggttcgaagaaaattagtattccgaaggccttactgcgatgattttctcaacttttgtgctctgaattttgagctaggcatatggtcctcaagaaaaaaagaaaatgttgattcggttgttaatattgttatgagtgaattcaaaccacacctactgttttgttgggacatgtctaaatgcacattcaccggacataaaacactggagaataagcacaagccattagtgctgaaggaattgagaaaactatggaacgtggaagaacaagatcttccatgggaagtgggggactattcaccttcgaatacattactagtggatgattccccttacaaagctctgcgcaatcctccgcatactgccatttttcctcactcctacagttacttaaactggaatgacgattcgctgggtcccaatggagaccttcgtgtgtatctgcagaacctagccgctgcagataatgttcagcattttgttcgtgataatccgtttggtcaacctttcattactgagagcgatccgcattggaacttctatgctcagattgctgatagagggcgtgcacccttgacatgttgcgcttgaactcccaagggtcgtgcttttttctgggagttctgtggttatccatgatcaaaagatcatgatcagtatacagtgatcttctctgagtagtttgcttgtatccctgtactgaagattacagagtttctgctatgggtttaaattgcaggctctacgaaaggtatcagaccaaatgaatgaattgtctgacattatctcagtctcaaactgtttgcagccatgcttttttttcatttgcctcacgttttaaagattaattgtgatgcctccttttgttctggtcttaaagaaagaaggatggggtcctcattgcctagagtagcagggagttcctaggagtatcggtg

SEQ ID NO: 17714 - DNA, 1424 bp, Zea Mays
cgcatctaaagtgctagtctattgaaggatactttgatactaaaaccatgcagctttagattggcagcttttctttttgtgatttattacagaataaaggaaagaaataaaacaaatagttttcccccctgaaatgccaacttactgtatgagaaagaacaggtttttgtcataatatacaagtgctaacatgccatttatcttccggcatttgatatgccaatttcctgtaggctggcttttggctatgcctatcctgcctatgaatgctacaagaccgttgaactgaacaaaccacagattgagcagctcatattttggtgtcagtattggctaccgttttactcagaagcaaaggtgttgttctttgtatatttgtggtaccctaagacaaagggaactacgtatgtttatggaactttctttaagccatatatttctcagcatgagaatgaaatcgaccgaaatcttcttgagctcagagctcgagccaccgatatggttgtcctttacttccataaggctgcttcggtagggcaaaatactttctttgacgttttaaaatatgttgctgcccagtccccttctcggaaatcaaggctgcaccctcatcaggaaccacagcagcagcaaccacaagtgcaggtggagctgcagcagccgcaaccacaaaaacaagcagcacctgttatgcgcagaggagcatctattgctgctcggcaagcagcaatggcacagcaatctctggagactatacccgttccatcttcacccaagatcaagcgtcaaacatcagggagacctggttcggtggcatccacaaagcctgcagcagctgcatccacaccaaaacctggcggtagcccaaagaaaggtgaggtcaaacctgctgtcgacccagttcaaactccagccacaagtgcagattcaccaaaatccgagcctagtgccccaccactttctgagaccgaagaagtagacaacatggcaatcgatgaggtcagtggtgatgctgcagagggcgcggaagagcttgaccctgcgctcgaggagacgccgatggaggagacgatccgtgtgacgcgcgccaagctaaggaggcgcacggccaccgaggattctgctgggaattagctgcatgccgttgttttccctgcacattgtattgatctttttccgagttttaggctcacatgttgtttgctggaatggagatatgttgttgttcacttggttcttgtgacacagagttaattatcttatttccgtgctttcttagtacctttttgtgtgatttaagttgtaaataacagttcccctccgcatttgtatatagtttagcggcatgggcaacgaatgcctgtaattgcaacattacacgcttcaatctggtcactccttgggtatcttctcaagatgtgtca

SEQ ID NO: 17715 - DNA, 1651 bp, Zea Mays
ctggcttcccgcgctatcgcaaagatgccgagctgtttatcggttctataatgagggggcagccgtccttgctgccaagcgtgcggaagcaatggcccgggaagccactgctgtatggaatcggcaccctgttggtcatgccactgaggacactgtatggagtgggtcgtgtttttggcgcaggacggtttctctgcaacatgaccaacgtctcttcgtcgctgcaaattgagcttgtaccatgccttcgagataactatgcgtatatcctgcatgatgttgatactggaacagttggagtagtggatccttctgaggctatgcctattataaatgcattggaaaagagaaaccagaacttgacttatatactgaacacccatcatcactatgatcatactggtggaaacttggaattgaaggcaaaatatggtgcaaaggtaattggttctgagaaggataaggacagaatacctggcattgacatcacgcttaaggagggtgacacatggatgttcgctggccatcaagttcttgtactggaaactcctgggcatacaacaggtcatgtgtgctattatttcgctggttctggagctatatttacaggtgacaccttgttcaatctatcatgcggaaagctttttgaagggactccacagcagatgtatgcctcactccagaaaattacagctctacccgatgatacaaaagtatactgtgggcatgaatataccttgagtaatgcaaagtttgccttgagtgtagaaccgggaaataaagcattgcaggaatatgctgcaaatgcagctgagctgcgtaataagaatatacccacggtaatgttatctgtctttgtgacaagctagtgcttcttaagcatgaaattatgcatttctagctttgtttaccttaaaagtcctcgattctattctttcttgtggacatttcataatgtggaatccataatttatttcatgatccatctgcaatacttaactagagagcgtttccaccttttactctgaccttaaatccttaatccaaatttcacgtttgcaggtgccaacaacaattggaagggagaaggaatgcaatcctttcttgcggacctccaatccagaaattaagagaacactgtccgttccagatcatttcgatgaagatcgggtgcttggagttgtccgtcgagcaaaagataacttctgactaacaaaaggaaatgctcgtgacgtatgacccatatcttgttaaagttcagacagagaacctaagtcacaataaacataggaggaaatgaaggtatatatgtttgagctagattttgaaatgcttcggcaaaattatgtcgagtgtatgtagcttgggcagtgcagtgcttgtctatagcaaccaatgattcttttgaccactacaaataagcgtgttctgctatcatctactctctgtaaaaaaaacgccacgtagccgtttcatagtcgatcttcagttcttattcaatacttcaacttggcggtttgcactgtggcagtggatattacttgaatgcattgcactgcgatctgtagggatccatgtttgttcgctgcatgaatatggtatcaacagtgcagtgcttggaaatgtacatataggctaatatgaaaaggtg

SEQ ID NO: 17716 - DNA, 1911 bp, Zea Mays
atctccagcggaaccgcatgccccaaaagcgaagccaaccagcacaaaaaggagcacaaagctctctctccctcccccctctctctctctctctcctgttccccgcgagagtcgctcagggccgcgacgaggagaagcggcagcgcgtcacctctccaatggcatccccgtccctcctccgtgcaacctgtgcgcttctcgagtgctgaggctccctgtccctaagacaagcttgcgcgcgcgatggagggtttttcgagggacttgctgtgcgggattggcaagggggacgcgccgccaccggagaagaggccggggcagctgcgggaggagatggaggaggtggagcttagcctcgggctgtctcttggcggccgattcgggctcgacaggaaggggagcaagctcccccggtcgtcgtccgtggcggccatgctgacaacgccggtggaggtgccggcgccgccctccctctcgcgggcgagctcgctgccggtccaggcggaggcgtcggaagttgagaggaagcaggggctggatggatggggttcttgccgtgagggcggcggtctcggcgtgcaacacgcggcgaggctgccggcgagcgggaacccttcctctgcctcttcggtaggtgaaggacagattttgcaaggcaccctcatgaggactagttcactccctgctgtcattgaggcttctggcaatgatgactggaagaaacgaaaggaagcacagagcctgaagaggctcgaggttaagaagaagaggattgagaggaggaactctctcgcctgcaacacttcaaaagaagctgctgggcagagtccaaaagagatgaatgcaaacactgacaaattagtaagttctgatgaaactattgtcagcgctaacgaaagtcatagcagtggcaagcatctggtgaaggggcttccaccaaagtaccaggccacaattacatcagaagacagttcgtcagcaatgcgaaagaagccaaactcggccttcaaagccatcactgaggagcagaactcatcatcgtctgttccttcctccggtgaagctataagtagcgtgacggcaccaagtctgcctctgttgtctttggtccccataacagcaacccttggttccagggaagaccaaagcattttaggcagggctggtgcaagggcaaacggcatgggggacgtggaaaggaggatgatgcaggagatgccgggcgtgttcaccaagggcctgtccaacggcagcagggtcgaaggcttcctgtacaaatacagcaaaggagaagtgaggatcgtatgcatctgccatggaagcttccttactccttcggagtttgtggagcacgccggcgccggcaaggtagataacccgctgcgacacattgtcgtcagcgctaccccgaacctgtgactgtgaggccaggcagacccgtgcacaagctatagtgttctgtagactcaggacctgagcctagcgtcagagcaatgtcaccgttagactgtgtggtgcggtgcttatgcccgattaaattggtgggcattgtggtaacataacctgttgataatgttttgacaatgttttgatccttcctatgcgtgatttagttctgcagcttcttcttctttttttcttttgtgttcctatcgtggtttcatacctgggcaagtagatttgtaggttagtgaggggcttgcggtgccactgtcccaatggccttgctctgggtgagctcgaagagaagttttttagactcatttgggcaagttttctacgtccaatatggtactgaagtttttgttgctggtttcgggtgttacaaagcagagtctgaactcttcgtgcttatgtgagatgaatacagactaagcatgcttgtgtttttataggaggccacctgtattc

SEQ ID NO: 17717 - DNA, 3168 bp, Zea Mays
gcactcctattcgcctgctctgtctgacctgaaaattttggaaccaatggaagaggaagagtatagctctgaaacatctaatgaagaagatggcgaaaaagaaggaaatgctgctgagagtgatgtcttcagaccagttgatgtagatccagcatgtttaccaagagtagggatgatatttgactcggaggaagatgcctttcagttttatgtgacgtatggttgtcacgcaggttttggtattacaagaagatctaacaatacctttgatggtttccgctatcgctctacattcatatgttctaaaggagggcagtctagactgagatctggtgtgacaaaacctgcaagaaagcgaggtgtgaagactggctgcaaggccaagatgattgtgaaggatgcccattttcaaaatcgctgggaagtaattgttcttgagttggagcacaaccatccattggatccgaacttgcttaagtttaagagacatttgaagaactccccttttacgataaatccacctcaaatttgtgagtctgagggacaacagagcaactcagctcttgtacattcaagcagagttgttgatactggtataacttcgtcttctacacagattgaattcaaagccaagatagatagaaataggaaattgaagctcgcagaaggagacttagacgccttgttggattttctcaacaaaatgcaagaccaaaacccttgtttcttttacagtttagatatgaatgagcaagggcaactaaggaatgtcttttggtctgacgccaaatcacgcagttcatacaattactttggtgatgttgttgctattaatgtcacaaacttcagcgatcagtatgatatgcagtttgtgtcattcatgggaactaaccaccatgcacagccagtgttactaggttgtggcctgcttgctggtagatctcttggggcttatgtgtggctttttggtacatggttaagatgtatgaatgccaaaccaccacattcaataattacaaactactgtcatgatgtagcgatagctatcaaaaaggttttccctaacgcacgtcaccgtttttgcctttcacacatcttaaatgtgcttcctgaaaagttggaagaaattgataacaaagatgaaattatttccacattcaccacactagcctatgattatgttactatgactgattttgacagagagtggcaagatactatccaacattttcgtttggagagaaatgaatggctgtccaaactatatgaggtcaggatgcagtgggctcctgtttatgttaaggattcattttgggcaggaatgtctgtcacagacagaagtgatagtgtaactgactattttgatggctggttgatgtcaggaacctctttgaaaatgtttgtagagcaatatgaggaagctgttaaaggaaagttagaaaaggaatcttacgaagatttacgatcagctcagatgaggccaccaatggtgacggggttgcctgtggaagatcaagcagcaaaggtgtacactgcagaaatctttcagaagttcttcaatgaaataggacattcatttcattgcaattataatatacttgaacggaatgagtcagtggttacatacatagtttcggagcatgtcgatcaaacaaacaaggtagactacaaagttgcttatgataatgttcaaggtgacatatggtgcctctgccgtttgtaccaatccaaaggaatattgtgcaggcatgcactcactgtactgagacaggagcttgtgctgatgattccacaaaaatacatcattcatcgctggtgcaaggactgtaaacaaacttgtgcttccatatcccagcctgtctcagcaggtaatcaggaactgggaagctacgatgatctgtacaaacttggccacctatactttgcagaagttgtggaatttggttccatgaactcagaatcaaaagaatatgctttgtcaatcatgagggaagtcagggataaagtgatttcatatgagaaatcactaagagatcaaagggttgacagccatgtttcaacagccaactttgcatacaatcctgtgaatgaggattttactgatgatgctttgcctatctctcttagtacaaagggctgggatcttacccaaggccaatctaaacgttcccgaaagaagaagctggcgaccccaactgttcttgatactttgaaaaagaaaactaaaagggcatataacaaaaggaggaatgccactgcaaacaccctgaacacatctgccactgcaactgacggcataactgatggcacaaatgttcagcagaatcctgtaaatgagggatggcagctagcgtcgactagtgctcccgaaactttctcttatggagtggagaacatttcgtttgatttgtcacaatacaacaatgccccaagcttccactggcctgaaagcagcagcaggtctcagctccactgagtaggcagcaatgcaatcgtggatgccttccaaatagactaagttctgacagtcttgtaagggcttgttcggttattcctatcttctgtggattagatgagattggaaaaaaatatgaaagattttgacttgaaagattttgacttgtttgggattaaaacgcacccaattccactcaatctacatggattgagagcaaaaccaacaagccctaatttggaaaaaaaaaaaaactagaggtgatggatcaggtttgacctttctattcctgcctaggactctaggagtcagtgaccacctgaataaaggtgaaaagggaagggattcaatgtggtgaagtgacatctaccatctatgtaccaatttagtggaacgggttctctacataatcattcctttttttccttccatggatatttgcagctcccgattgatttatctgaaccatgtaaattaggtcagatgcccctgaatcgacctgatgtttcactatggatccctcaggaaatcatatgccccttctctgatgaagctgtttgtaacaagatgtttattgcttcaccaagttcatctgttttcgctaatatttgttccgttcaatttctatgatcaaattattatatttgttctgtccagataatattttgtatcattttattctttttttctcaaacatgcaggagaactgtgtg

SEQ ID NO: 17718 - DNA, 1656 bp, Zea Mays
ccggctccggctgtagggccaccgccgccacctcctccttctccgccaccaccaccgccgccgccggtgggctactgggagagccgtgtccggaagcccgacacgtccaaagaaacccgttcgccggcactgtcgccgccaccacaagctgccaacttcaggagcgtccctgcacccaccgatgcgttctcaagccgtccgcccgagagctccgaccaaggcgacaagtcggaggacacgacgccacggccgaagctgaagccgctgcactgggacaaggtccgggccagctccgaccgcgtcatggtgtgggatcagctcaagtccagctcattccaggtgaacgaggagatgatcgagacgctgttcatttgcaacccagccaatgcgccggccaaggaggccacgaggaggccggtgctgccgacgcccagggccgagaacaaggtgctagatccgaagaaggcgcagaacattgccatcttgctgcgcgcgctgaatgtgaccaaggaagaggtctgcgacgcgctctgtgaaggtaacacggagaactttggagcagaactactggagaccttgctgaagatggctcctaccaaggaagaggagatcaaactgagagaattcgaagaggagacttctccagtcaagcttaacccagctgagaagttcctcaaggcagtgcttgatgtgccttttgccttcaaaagagttgatgcgatgctatacatcgcgaacttcgattcagaggtcaattacttgaagaagtcgttcgagaccctcgaggctgcttgcgacgagcttagaagcagcagactatttcttaagctacttgaagcagttctcaagaccggcaacaggatgaacgttggcacaaaccgcggggacgcgcacgcgttcaagctcgacactctgctcaaactggttgacgtcaaaggcaccgacggacacacgacccttctgcacttcgtcgtgcaggagatcatccggacggagggctcccgtcagtccgccagcgcccaaacaaccccaagaacccaggcgaaccctctgcgagaagagctcgagtgcaagaagctaggcctccaggcagtggccggcctcgccaacgagctgagcagcgtgaagaaggcagccggcatggactcggacgtgctgagcagctacgtcaccaaactcgccggaggaatagagaaggtcaccgaggtggtgctgcggctgaagaacgaagggacggagtcaagggacggcgcgtggcggttccacgacaggatgcagaggttcctgaagaaggcggacgacgagataatcaggatccagtgccaggagagcgtggcgctgtcgctcgtgaaggagatcaccgagtacttccacggcgactccgccaaggaggaggcccacccgttcaggatcttcatggtcgtcagggacttcctcgcggtcctcgaccaggtctgcagggaagtgggcagggtcaacgagcgtaccatcgccagctccgtgcgccacttccccgtgccggttaacccaacgacgccgcagctgttcccgcggcttcatgctttgagagctgggttctccgacgacgacgacgagagttcagccgcttcagtgtcgtcgccgtgatcgctgaactggaaggtacctggactctct

SEQ ID NO: 17719 - DNA, 6051 bp, Zea Mays
aattaactagaaaatttattctcgcgtgcgacgaaacctcgagacgccgaggcagacgagacgagggaagggggagaccgagggcaaccaagcctgcgaggagcccgcgtccgaatctcgcgatccccaatccgcaggcctcgattcgccgatccggccgcggcagggggagagatcccgcagatcggggacctcgtgctgcttcgattcgagcttcttccagctgacagtcgcccgtccgccccccgtgctggtccgcgagctgctgtgtgctgcctggtggtaggtaggtggttaggcgaagcgggccgtgcccgggtgatgctgtccgtgaggcggcggcaggaggatgcgggcggccgcgtagcggcagcgcagacgcagcagctccggggcggactcggcatggacgacgacgccgagctcgaggagggggaggcctgcggggacgacaccgccttcgtcgaccccgacgtcgcgctctcttacattgacgaaaaacttcaagatgtacttggccattttcagaaggacttcgaaggaggcgtgtctgcagagaatctagggtccaaatttggtggatatggttcatttttacctacgtaccagcgctcccctctcccccaaactagaagtccacttaaggcagcaaatgctacctcaaaatctcccttccaccagtctagcgagggcatgtctcaaaagcctcctgctgtgacagtttcatctaccccccaaagtaatggtcctatggtgcctttttctggcgattcaattaaaaaggaaatacgcccaaccacaaaggctgaagggggttccgtctcccatgattcgtatggaccattgaaatgtcatgaccaaaatagacttaaagtccggataaaagttggctctgataatgttttggcaagaaataatgcggatatctacagtggtctgggccttgatatttcttcaccttcatccatcgaggatagccccgatggccgtgggagcctatcccctgaagttaacaatgtgccacatgaatctccacaaaccatccttcagatcatgacatgcttttcagttcctggaggcttcctgttatcccctctaccagccaatatcttgcaattgacaaaaaaggttgtggcttcgtcaaagaagtgggaatcaaatgtgcacatagaaagtgtacaagaaccatatgaaggccacacgactaaaaaggtaaaatctgatgctaagaaaaagaagctgatagatgcaaaaaattcaaagaacagaaatgatattagtgcagttatgaaaaaggagattgatatagaaacagttgctggtcaaaagatcgtatccgaagctctcaacatatcattgctgtctgatcccagagccatggatgcaaaaggtgagaatcgacttgaagtggaaccagcagaaaacaacttggcgggaactagagatgcccgattgaaagagcggtccactaagaccaactccatgccaatcatagttgaacctgccaaagcagaggcgacggaatgcttagagaacagtagttttggtagttcagaaatggatttttcagcagtaaaagcggaatcaaaatccaaggcagaaaagggagaggcaactttagaagagaggaatacaactaatggcaaagacctaatatcggataggaagcaagaaaagaaaatgaaacctgagagtaaatataacgcctctaactttgaagttagcaatgttataaacgaaagaggtccagctgtttcccggagcatgggcaaagtttctggtaaagaagccttaccttatgacacaaatgaggaaaatagctccaagaatgaggtcaaaaaaatgcagagagaacaaaagaccaatgcttcgagatcttctgatttcctggaggatgagaaacacattcgttcttctgctgcagttaaggagaggaaaagtgacatgcaatccaaatctagccatactggaaagaaacccaaaacaaaatcacatagagatgttagggacaacctgcctgaaggatctcacggaagcaaggaaaaagacacattggagaatgaaagtgcctttggagatctccgaccaaaggaaaagccatggaaatatgacatcgagagggattctgatgcacctgggatctctaggagggagatttcttctagtgtaaagcatgataagcacttggcttctgaggagcagaagatgcatatacctccaccttccactgtatcaactgcaaatgcagctccagttgtgataaaggagcattgggtgagctgtgacatatgtgataaatggcgtctcctaccttatgagatgaatccttcagatcttcctaagaagtggaaatgtagcatgctatattggctacccgggatgaataggtgtgagattagtgaagaggagactacgaatgctctgaatgcactttatgtccctgcccctgcaaatggtattcctgcagttggtcatcctcatgttgcttcaacaggactagtaacatccagcactcccaacatgaatggacatattgagcagaatagaaaaagaaaaaatattccaagtgatggaaattttgtggctgagggttctcacctaacacaggtttcaggtcatccaatgagcaaccaacatgctcctagtaaaactaaaacttatactgatggtatccagtattcggctgagaggcattctgtaagcaaatcagttgacccaataattgaaaagaaaaggtccaagagcaagcatcacagtagctattctgatggaggagatcttgttgaaagacctaagaagcattctaaagtgaaaaacaagagagacttagatcatgatgaatacaaagcttctaagaaaattaggaaagaagagcgacaccattttgatgtagatcggatccttggatctgatttagctagcggagatgttcctgatgaggccaaggctttgcctgcgaagtcagcaacctcaaagggttcaggtgaaaggactgacctttcttcatcaaagcaaaaaagtgcctcacggcataatcgtttggaaacttccaagaaagcaagacaagatgatttagttggtcctgaagacgagagcaagggatattttcaccagtcagatgtacaaagatcagatttgtctagtaagaagaggatagtgaaggaatgggaggagagccagcacaattcagtagctcatgtaagcaaaggagctgtcaaagaaacctatagggaccagaacttaaaggaagcaaagttgaaatcattgaattctgaagagctgttttctatgacgagcaccaaaccaccaaaagttcaacatgctgatcaggttttgtcttatgatggggggcgtatgaacagtgagttagttgaggataacacactctttagtggcaaaagaggtctgcctgaacaagaaaagagcctttctgatcaggctttggacttgggtgaacctgctagtgatgtggcctatattcagacttcagctgtaacttcaagttcttcaaaggcttcggtctcacaaaaaaagaagcagaccactcaagctatgaagacttcaccaattgagcctctttcttcatcaccacggaggaactccaacattgacaaggtctctgtccctcatagtagaatttcaggtaaggatggatctctgaatgctaactcagccactgtgccaatcatggcaaaacaactaaatactgaagttcgcgtagcaagcaatgatcaacggtctagtgaacctgtttcggttggttctccccgaagaaaatctgatagggataatggactggttcagttaactcaaggtcatgcctctgatggttttcatcttgaaaggggtttcaatgaggacctgcagcctgaatctgggagaaaggattccaatgtaaagagctcccatattcctaaagcttctcaccatttgcattctggtgaaaaaaacaactacaatacagatggctctcctatgcaaccaggaaagcatcctgttgatccaaagacatcagtcttggataaatgtgattcaagcatgcatgaaagtaacaaaagcacaaattctcttcaggatagaaatggatcaactcattgcccaccagatggaaatcctctgctcggtttaccatctggaaaagagaaatcatatatcaacagcaacaagcaagattcacagaagcctaaaccccagatggtctgctcacctttgaaagaaaacaaactggattctcactccacaccattaaaacctaatgggtcaaaattgactccacaatcaagacaatacaatgctcaaaatggaggacgacatggcactgcaaagcatgcaattcctagtcctgctgatacttctagtccagctaggaaggacaatacttcaactgcatatgctctcaaagaagcccgggatttaaagcataaggctaatcgtttgaagggagaaggaaaagagcttgaaagtacaagactctactttgagtctgccctaaaatttttgcatgttgcatcacttttggaacctcctagctttgatggattgaaacaaggtgatgcagcccagagcatgtattcagatactgcaaaactttgcaactttgttggtcatgcatatgaaaaatgcaagaagatggctgctgctgctttagcatacaaatgtgttgaagttgcttatctgaaggctgcatactacaaacacccaactgcaagcaaagatagacaagtgttacaggcagttgtacagactgcaccaggtgaatcaccatcatcttcagcctcagacattgataatttaaataacaatggattatccaaggcctcttcaagcaaggatgctaattcaccacaagtggctggaaatcatttgttgctggccgctcgaaatcaaccacacttgatgcggttactagcttatacaaatgatgtcaatagtgcctttgaggctactcggaagtcacacatggcaattgcttctgctgctggcaatcatgaaaatggagtcgatggtcttccttcagtaaaaacagtactggattttaacttccgaagtgtgaatgatctactaaggcttgtgcgaatttcaatggagtccatcagctgctgacgtgttcagaatctgagaaagtgccacccgttggaagttcctgttggatgtttaatccaattaacttttcttgatgaagtagcatgaaactgaatagttcaacagtgaacagtgtaaaagcataggtcttctcatttgagcttgctggtcaatttgtacagagactgatcgtggaattcttccttctttcttattttgatggcacccagttagtatacaaagttgcatatccacttggatgatttagttagtgaggccacaggttaagatgagctttgcactgctcaatgctcgtaatagttttgaggaagaaggatgctcttgcgcatgcagttgatgattcatttgagcagtgcaaaatggtgtgtccctatcttgcgcatgcagttaatgattcatctggaaagcggcttgctactgagcattctcttccgaccgtatcatagtttcctttgagcagtacaagatggtgtgtcgccacttcaattttgatgggagaggacagcaaagccaactaattgtgctaaccaagaaatcagctactatgccatgtcttctggatgaagttcacgcaggtttcaaataagaaatcacttggactatcggacttgtatgaatgttgtacaaagatctctaatgtacattaaccttttttttttcagccagcgcatgtacatggtggggcatttgttaccacgtgctggtctctatgtatgacgcctttggttctgccaagcctgtctttcattattcttcaaattttgtgatatttagttgtttattaaggtatataacgtttagtactgggaatttgttgcagaatgcaaaaatgaattccgtgctgtgcaacttgtatcttaacttgagtttcagctttcagtagggatgataatttaatccaaaacctgacaggtacctgacccactggtgcacccgcatttgacccga

SEQ ID NO: 17720 - DNA, 1121 bp, Zea Mays
cccccaaaaggaactacatgcatgccaaatttgcttcctcttgtagacgctggcttcaaacaaagaaaacggtataggatatgcattggcaaggaaatttctggaggctggtgataacgttataatctgctcgagatcagctcaaaaggtagaatctgtggtcggtgacttgaaggaggagtacggagagcaacatgtgtggggaactgtctgtgatgttagaaatggaaaggatgtaaaggcacttgtggagtttgcacgtgacaaacttaagcatattgatatatggatcaacaatgctggatcaaatgcatatacatacaaaccactagtggagacctctgatgaggctctcatggaaatcatcaccactaacacccttggattgatgatatgttgtcgtgaggcaataaatatgatgaggaaccaacctcgaggtggtcacatattcaaccttgatggtgctggttctgatggaaggccaactccaagatttgctgcatatggtgcaacaaagagaagtgttgtgcatcttacgaagtcacttcaggctgaattgcagatgaatgaagtgaataatgtgatggtgcacaatctatcgcctggcatggtcacaacagatcttcttatgtctggtgcaactacaaaacaagcaaaaattttcatcaatatattagctgaacctcctgatgtggttgcagactaccttgttccaaacgtcagagaaatccctaccaagcaatccatgaagccaacctacattcgtttcctcacaggcttgaaggcctactcaagaattttttctagacttgcttttggtgctaggagaaacaagtatgttactgaagattagttatgctgccagcttccaactgaagagattaggaacaattcttttcattaagcgtcacttacttttctcataagatgggatgtattacagatgtcatctcatgagaacagtgatatactcttctgtacagtagtagcaatttttttagtaaatgcataggaaaactgtgcatcaatatatcaagaagaatatagaaataaggtctaaaatagaccacaacatgataaccacctcacctcacgaatatacaaaagagtccatctaaaaa

SEQ ID NO: 17721 - DNA, 864 bp, Zea Mays
ccaaaatgtttgcagtggacttgacaatggaggaactgtttgcaactgagataaatgaaaccatatgcgtgctctattacttttcatgtcactttgcaacgcttgcgggattcggtaccgaaagaagaggaggcaagagcttggcctagagcacaacaagcagcagcagcaacaacaaaataatggcgaggcgaagactggagtaaaagacagctctagcaacagcagtagcgggagcagcaactttcacgtggtgcagaaacggaggctcctaatggaagtggaggaggctgctctgctgctgatgaccctatcttcttcgcccgcatccacattgctacatggctaggaaccctgcaacaccaaatcaacgatgtacatacacacacaggcttccccaccccacaccttgcacagtcaccatccaacgattccagtccaaatcgtacatgtttctcacaccagtctgagatagggaaggagggggcctatctcgggattgtgtgatcttctgataggggtggatgattagtgccaacctaatcactccattgatcgtcttcttctctgtttccgtcctacctgtagaccttgatgtatctgctatgtgagttgtggtaggctccataacaagaggtcctgttgatctcacttccccacacatctttttctctgtccttttctctctctttttttatgttctccctctttcggttttgtatgtactttgatgttgcccctttgtgagggatggatgatcaaaaggagacgccatcctttctcattctggaataatcaaggatgtgagctctttcatttcagtaagttcgtgttgctgtgtcatgaacaagaaaaaatgcagtt

SEQ ID NO: 17722 - DNA, 3983 bp, Zea Mays
ccacccgccagcgcccagagaggcagagcccgctgccccactcccgccccgagctgtgccgtcggccggccgcccgctcccgaactgcgccgtcggccgcacccccgctcccgagctgcgccgtcggccgcccgcccgcctccgaggatatcgtcgccccggcgttcgcggcccgtgaaaacccacaggcagcaaccctggatttgggcctagcatttttccacgagggatttgggttatcatacagcccagactccaaacccaagaaaaggcacaaactaatcgaaccctaccttcttctccactccacaccagcgctagctagttcctagcttacccacgcacggccgccgcctcctcctcacgcacgcggcagccgcggtacgttatccaggtcgtgccgacgtccgacgacaaagaaggccttgggggcgctggcgcgcatcgcgagtcccctcgccggcaagaatatttgcaagcagaccttcgagctccctcggagggcaagttcccgaaccggggaatcaaggacgtcgtcaggagcatctgctgcgggaacgtagggaaaatgtcaacgaatcctgatgaacctaagagtcgtgcccggacagactttttgctcaacaatgaactagaggtccagaagttttgggatgagaacaaggtttttcaggctgatcctggcaatgactctccaagccctggggaaaaattctttgggaactttccatacccttacatgaatggcttgctgcatctgggtcatgccttctcattgtccaagcttgagtttggtgctgcataccacaggcttcgtggctccaatgttcttttgccctttgctttccactgcactggaatgcccatcaaggcctccgctgataagctagctagggaaatccaacaatatggatatcctccggtgtttcctgtggcagagggttctagtgctgcagtagccgatgctacccaggctgaccaggttgatgttgttgccccagataagtttaaggggaagaagtccaaggctactgcaaaggctggtgcacaaaagtaccagtgggagatcatgaagagctttggtctagatgatgaagaaattgccagatttcaagatccttatcattggttgactcacttccctccgctggcaaaggaggttctcaagaaatttggcttgggttgtgactggaggagatcattcataactactgacatgaatccatactatgatgcttttgttaagtggcagatgaggaagctgaagaaattgggcaaagttgttaaagacatgaggtacacaatctactctccgttggatggccaaccttgtgctgatcatgatagggcaacaggtgaaggtgtgcagccacaagaatacgtcttgattaaaatggaggtgatatcaccttttcctcccaagctgaagtcattggaagggaggaaggtatacttggcagctgctacactaagacccgagacaatgtatggacagacaaattgctgggtccttcctgatggaatgtatggtgcttttgagattaatgacactgatgtcttcatccttacagcaaggtctgcttttaatcttgcataccaacacctatccagggtccctgaaaaaccaacctgcttatgtgagctatctggcagtgatttgattggtttgccactgaaatctcctcttgccttcaatgaaacaatatatgctcttccaatgctcactgtcttgactgacaaaggtactggcattgtgactagtgtccctagtgattcacctgatgatttcatggcactgcaagatttagtcacaaagccagcattgagagcaaagtatggagtgaaagatgagtgggttcttccttatgagattataccaataatccacattcctgaatttggagacaagtcagcagagaaggtttgccatgatcttaagattaaaagccagaacgacaaggagaagcttgctgaagcaaaaagaatgacatatctgaagggatttactgatggaacaatgattgtaggtgagttcagtggtagaaaggttcaggaagcgaaaccgctgattaaaagtaagcttttggaagaaggcacagctgtgttgtatagtgagccggagaagaaggtcatgtctagatctggtgatgaatgtgttgttgccctcactgatcagtggtatataacttatggcgaggctgaatggaagcagaaggcagtcaaatgtttggaccacatgaatacattctcaactgaaacccgcaatggttttgaacatacgctgggctggctgaaccagtgggcttgttcacgttcatttggactcggtactcgaattccatgggatgagcagttccttgtagaatctctttctgattctaccctatacatggcttattatacagttgcacaccttttgcaaaatggtaatatgtatgggaaagaaatatcttcagtaaggccagaagaaatgacagatgaagtctgggatttcgtgttttgtgatggcccggcaccaaaaagcgagatccctgccgctctgttgaacaagatgaaacatgaatttaagtattggtatccatttgatatccgtgtgtctggtaaagaccttattcaaaaccatttgacattctgcatatacaatcatacagcacttcttcctgagcaccactggcctattggtttccgctgcaatggacatctaatgcttaactctgagaaaatgtccaagtccacagggaatttcctaactctggaagatgccataaaaaagtactcttctgatgccactagatttgcccttgctgatgctggcgatgctgctgaatcaaaattaagaactgggccgcccactacatatgctgaccgtgtgttttcaaacgagatgaacattgcaatcaaagaaactgagaagagctacaatgctttcatgttcagagacgccctgaagtctgggttctatgacctccaattggctagagatgagtacaggctctcttgtggtgcagcaggcatgaaccgtgatctgttgtggcgatttatggatgtccagaccaggcttatcacccccatttgcccacactatgctgagcacgtgtggcagaagatcatgaagaaagaaggctttgcaataaaagctggctggccagccgcggacaccccggatcccacactgagaattgcaaataaatacctgcaggattccatagttttgatgaggaaactgcttcagaagcaagagtctggttctaagaagcctaagaagggagctgcaccggcacctccgtccgaggaaaagaagatgagcattggcctcatatatgtgaacgagcactactctggatggaaagagcagtgcttgaaggtgctgcagtccaagttcgacagccaaagccgctccttctcacccgatcaggaaatcgcagaagctctgaaggagtgccccatcgggcaggaaatgaacctgaagcaggttcagaagctgtgcatgcccttcatcaagctgaagaaggacgaggcaagggaggttggtcctcaggcgctggacttgaagcttccgttcggtgagatggatgttctccgggagaacttggagctgatcaagaggcagctgggccttgagcaagtcgaggtgctctccgcgtcggacgaagctgctcgcgctaaggctggtgaacatgcttcgctgctggagaagaacccaccatcacccggcgaccccatcgccatcttcctcagcaaacagagctgaaaactgaccttgcatatggcccttttgttatttacttcgccgcacatttgcttcttttttgtttttgtttttgtgaaaccagtttcgtgtctgtaaacatagcatgttgtcctccggtttggtgaaaccagttttttctttttctttttctgtcaacagaatatgttatccattctctgggtaaccagttcggctattgtcgacaaagtatgttttgtgtcgctttacatca

SEQ ID NO: 17723 - DNA, 1093 bp, Zea Mays
aggtggtgcactggtgctggtgcatgttggggaggcttgacatatttcagaagtcccattgtgtaaaggtcaatcctgacacacctcagaagcaagttcggttcttaacattgtcaggtgataaaaagctgttgactccgcaacctcggctaaggacaggatttttctcagttatggactctcagatgatacctgttgggtgcattcctgaagcatgcacttctgttggtgcagctaaatatgggaggccaattggtttagatgaaagccttaaggtggatttgattgtgattgggtcagtggcagttgatccaagttcaggagcacggttagggaagggagagggatttgcagagctggaatatggaatgcttcgctatatgggagctatagatgattcaaccatgatagtaactactgtgcatgacaagcagttagttgatgacattccagtggagaagctgctagttcatgatgtgccagttgacattatctgcacccctactcaggtcatcttcacgaagactacgatcccaaagccacaagggatttactgggaaaagttatctccagaaaaattgggccaaatccgaattctaagagagctgaagcaacgtatagagcaagagacaggaactatgcttccttgtggaccttcggagaagctaccgccaacagctcagagaaagcagaggtggcagcggcgacgatgagacttttaaatgactgccccgtgcgttgcgacggcttacaacaatacccatgtaaactatccaccaaaaaaatttcaatattttttgtttattgtctccgctctccgtgtaatatttttttttgatttggctaactggtgttattatttactctatccaatatatcttgttacaacacaaccaatgaaatgagcgattagaagagagttcacaacgactgactgaacgaacaaatattataaaatgatataattccaccatacaaagaccaaataagaaaaaatttgtaagctcaagtttctaaaataagtcacatgaactcaaacttataaaaaagataaatcaaaatatggagtgattactaaagtcagacatcaata

SEQ ID NO: 17724 - DNA, 875 bp, Zea Mays
gtcatggaagttttgaactctatgtttacagcctgtgcgtgagacgcgggaaaagcaagtgcagttatggaaggatctgatacttgattactgtagaagtcaaaagatacatacaatatctctagaagaagatttccccttgttctccaatgcaaagattgagagatctcttagctacgaagcaaaggaagtgttcctcgcagctctcgtcagtgaaggtcgtgcagaatggatggacaaaggtcacaagaagtgcctaattctttggctaaggatacaggattgggcaaatttcatattgaactttgtaaaggataacgggttggaagtaatgactatcgaagaaatacgctctggaattgatacacgtggaactgaactcgagggaattgatcgtggtgttctcatgcgggctctgcggcagttggagcaaaagggaaaggcagctatcttcaaaggcacctctgctgatgacgaaggcgtaaagttttcggtgtaattcttttgcgatccttaaactggcagactaataatctcgttcagccggtgcccttgaacatggcatgagacacccatagcctcgatcattcagtgccctttgaaaatggcatgacacatccttgtaaaaagcagtagggctgatcacattcttcccgagtagtatcctcttcagtgctgcggtaaaatttcccaactcatcttttgttgtagtgaaaaatcggccaagcctgattaaacattgtggagtggttggtaagaagaagttgaactggtcatgcctcttacgctgattgattttccgatatctaagcaaaggtgttcatgaaatgtacgcgggattaattctgggtttattcgaaatgggcgtaagtttc

SEQ ID NO: 17725 - DNA, 168 bp, Zea Mays
agattaggcaaatctagattcaggaaaagtacttaacttgtgaagtaaaattttggcataaggatccactactagtaagctcttttgcaaaatgagtctatgaaatttgataagctttaccttgattcccaataaaccagcatacccttgagagtcttttctttagtc

SEQ ID NO: 17726 - DNA, 2384 bp, Zea Mays
cagcgcagcattgttcgtagaggttgtggtggaaaacactcgtgtgggatctagctggctcttgtgcaattggtatgccacagctgctcttctcaccgtgtgaggacgagcacagtaaaagctaagcatttcttgattcatcctcccagcttcgttaattactatcaatgatgttgctgcatatttctttggcatcttctttgggaaaacaccgctgatcaagctctctccaaagaaaacgtgggaaggctttataggtgcatcaatgacaacattgctttctgcatttgtgctactcctgctgaaaatgtactaaccacaccttccatggtggagtgcagggcctccctgttggggcacgagatcgcccacccgtcgtctacaccagattatttctatcataccatcagatagtggatggacaaccaagcgtgcaccgtttcatcatttctgattctttcttagatgactaagataagtgtgaggtctgtactcatattctttccttttcttttcaatgcaggtatgatcttatacgagtggagattggcaacaaagatataaagcttgaatacttagtggaggcatttacaacttcaaatgacgtagcctcctcgacaccttctgcttctgctaactccggtgcaaggtagatccttgctatacttgacaaactaaaggaggaaagggagcaacaagaaggaaaatatggggaggaagatgtggatggttcatgtatatcagaagaagaagatggtgactgggatgtagatgagccagatgaggaggacatcatttacgtaaaatagcccattgtcttctaggaacttggtcatcattcatccagaacacagcaggttgcgttctgcatacataatattgcctatcaaggtagatttgccagagcagacttcgatcttcttaatctacctgacagtttcttaccatcatttgattttattgatggacatgttaagcctgttctagggagaaagattaactggatgaagacagggatcgttgagagtgatctggttctaacagttagtccacattatgttaaggaactcacttatggcccagataaaggtgttgagttggatggtgtccttcgcacaaagcctcttgaaattggaattgtaaatggcatggatgtttatgaatgggatccttcaacagataagtacaccagcgtgaaatatgatgcaacaacggtaactgaagcaaaggctctcaataaagagaggttgcaagctgaagttggattgcctgtggactcgagcatccctgttatagtttttgtcgggcgtcttgaagaacagaaagggtctgacatactcattgcagccattccagagttcgtgggcgagaatgttcagataatcgttcttggcacgggaaagaagaaaatggaggaggaattaatgcagctggaagtgaaatatccaaacattgctagaggcatagcgaaattcaatgttccattggcacatatgatgtttgctgggtctgacttcattattgtcccaagtaggtttgagccatgtggtctcattcagttgcaagggatgagagtttctagctcgctttgttacagttcagatttgagtgcgcattcccatctgttcatcacctggaggacttgttgacacggttgaggaggggtgtcaccggattccacatgggttctttcaatgtcgagtgtgaaactgtagacctagctgacgtgacggcagtagcgtcaaccatcacacgggcctagaacagtacggcaccccggcgttccaagaaatggttcagaactgcatggcgcaaaacctatcctggaaggggcctgcgaagaagtgggaggaggtgcttctgggccttggagtcgaggggagtcaagctggcatcgacgacgcagaggagatcgctccacttgccaaggaaaacgtagctactccatgacgcttggtgcctcggaaacacgcgttggtgataggaagcatcttctaggatcctcctggccttgtggctggagtgagttgttcagtcagacacagtttcgcctctacaacatcttcctcctcctggtggtggtccgaactccgaagcaaattccagtgataaaggatgaactaagaggtccatgtttctattgctagaccttttgcctcctaaatagacgatgtactgcgcttgtaacaagaacctcactttcgtgtcaagtaatatcaacaggtttcataatggtagtgaactgcactggaaaaacctgtaaacaatgcaaacaggattcaaaactaaaacaaatctgctattaaaagctgttattcaaaattgaaaaaaacaaaacctgttaattcagtattataactcagcaaacataaataaaaaaaaca

SEQ ID NO: 17727 - DNA, 1224 bp, Zea Mays
gtcgccgctttgccttccccgcgtcaaacaaatctagggttccaagcgagcgaataccttcctccgcctgccgatctccccgcatctctcgggctaagacgattcgaggcacgagcgaagatgccgcagcggcattcgaaaaacaacaacgacctcgccttcttcacgtacgaggagaagcggaagctcgggtacggcacgcagcgggagcgcctgggaaaggactccatcaagcccttcgacgcctgctgcctctgcctcaagccgctcatcggcccgctctgctgccccaagggccacacattctgtaaggagtgcatcctcgagtgcctcctctcccagaagaaggacatcaagcgctagcagcacatgaggcccagaaaaagcaggagaaagaagaggaggaagagaagctaattctgcagaaggctaaggagttggatgcctttgatcagcagaatcatggagctgttccccagtaccatgatcgcagtggttcccaatacaagaatgggtttcatggagcaaatagtgtgaaggtcacttcttttgaagaggaagcccttcgcaatatgaaggcattctggctcccttcagctactcctgaagctacggtcaaggtagacttgccctccaccgacactgtttgcccggaggggcaggagaagcttaagttgaaatcgctcttccctatctcgttcacagaggaaactgctgatcagaagagcagcaaggcaggaaactcctgtagctacatgtgccctagttgcaagtccactctcacaaataccatgtcccttgtggcggtgagcacctgtggccatgtcttctgcaagaaatgttccgacaagtttctagtgaaggataaagcttgcttggagtgcagcaaaccattcagggagaggaatctggttccattggagaaaggaggaactgggtttgctgcacatgatgaacgcctggaggcaagagatttcaagtatttgggtagtggctctgggttagggctagtgaagcctgcaccaaaaacttactaaccttgaataattatagctgatgttgtgtattgtttaccatggtgtcatgaaattatgtaacctggagaattttgttttatggcatcaaaatcgttgtattcagaacagttcatcttcagtcttttaggggctgtttggtattacgcctaaactgccacctcccgccacacttttgctgccgcagctg

SEQ ID NO: 17728 - DNA, 792 bp, Zea Mays
tggagatgctctaagagaagaaccttattttctaagaatttttatttttccaagtaaaattaacttaatttttgtcagaaaaataaaaatcccttaaaaataggactaaactaaccctaagtatacgaaacccaaagtttacggtcctaaaaatcaattatctcacccacgagcgatcgctttctacctcgctatgcccacgagctcgctttctactagctctcgacgcgtcgccgccgaccacagcacggctggcgtgtggatccctcccgctctcctcgccggatctccacccgcctcgctctctctgagtccagtggggcagagatccgtgagcgcgaggactggtcccttcttgggttgggtctcttctccagctcgcgagttcgccactggttgacactgattgtagcacttcgtggtgcctgattggatcgcgggtgcggtttgccctccacaaatttgggtttggttccactgaacccccatgacccaagcgaagtccgctcctggaaggaaggagatgggccgtgggcggtcgccggaaccgctcgatttcttcatatggactgtcgaggatgttggattatggctggaagaaattaaccttggtggctacagacaagtatttgaagaaaatggtgtcaacggagaatatctagaaagcttgtccatgtttactactgagcagattctgcgttttattaggcggtgccatatgaaatggggagactttatcacactgtgcaaagagttgaggcgcattaaagtgccattgccaaggtaccggag

SEQ ID NO: 17729 - DNA, 1734 bp, Zea Mays
accacgtccagccgcaggctgaggctgcggacgagatgccgcgagggcctacgagtcagtgagccaagcgcgccgcgtcgcgtctgctggtggactctgcgcctcgtgaccacggtctccagggaccagggcggtgagccagcatcttctttttccgtcccctcctgcagccgccgcccgccgagacgccaagcgcgagcgggaggagaccatgtcacggtggcgcgccgccgcctacagcatctccgcagctgccgcgtcccgcaactctgcggcggaggccggcgccctctccagggccttggcgaaggctccctcgccgccttcgcttcctctccaaaccctcacgagaaactttgccaagtccgctgccgccgccacggccacgtcgcccggccctggcgcttcctctccgcccgctgggccgaggcccgagattagactgaagtctatgttcttatccaagccctgttcattagcgttgccacctgactcccctcatagagcagtggatccacaatataagggcatcaagcgattcctactcacattgttgttgttctacagtaagcaaagcaagtccatcagaggagcaaatgttgtttatgatcgaatcacttctcaagttgatgcacctactatttatgatgtttttcagttggagaaaacatttaagacaacattttcattgcttgttctccatatgtggcttgttctacgccgcttgaaggaagaagggaaggatggtgttaagttcggacagtacatctacgaaatgtacaaccacgatgtagaactcagagtttctaaagctggggttaacttgcttctgacaaaatggatgaaggagctagagaaaatattctatggaaacattgtgaagtatgatgctgcgataagcccagaggctcgtcaagatgatcttgtaaatgtcatctggagaaatatttatgctgaggaaggttcagaggctatggatgtggctgctgcccctgctgtccaggcattggcaagatacacacgaagggaggcaacttgcctatcattgactggcaaagattctatgttctcggggaacttcaaattcacagctctgctgccggcaactcccagtcccagcccaaagaagcctgtgcgatgaactgccgtggtacgtccacatttcacgcgaaggtttagaaaacagcaggatcggtggatacctgctgttctctcagcagtacaaataacaggcttcttccagcagttgtttactctggggtccccacgattcaaacccttttgatggatatacttcgttccagataggaagtttgttttgttaatctctagtctcgagtatttgctctaggagaccacccaccagaacggagccttcttgtcgccggaccaggcatcgattcgcacactgtatgaggcgatgctgaaagaaaaaaaaaaggaaggcagcaccgatgttcggtcattaatatgcagtttctttcggctgcatgtgtctcttatgtagagtaaaactaatttattctcgcatatagaatcatactataccggacatcaattgatgatgtgaaccgtatgcaagatcatcgccatctactgtagtatgtgacagtgtaagttgttttttttccttaaaaaatgtaggcggagcaaagtcgaatctgttgtgttttttgcgatttatctggggaagagaaagaaaatggaccgctttaacatgctaatgtagagttg

SEQ ID NO: 17730 - DNA, 3064 bp, Zea Mays
tgcagttgtccttcaccacagcggagtgatggctgttgtcaacccaaccaaccttgctattgacgacgatgacgacgatactcccatttcattcaagaggacgagtaactctacgaagactgccaggcccaccccttccaagcatgaggggtcgtcaggaggtaatggtgcacctgttaggatccccaaacctgtgtctcccaatccgcagaagaacggagccaccggggcttcaaggccgttgcatatgaagccaccgtcatccagtccaaaccatcgtccttctggatctggccagccaaacagtttggcacaacatagttcaaaggctaatagcattgacatgagtaaactgaaaagacctctcgtcaaagatgagagatctgatgactcagatgacgaggtgccgattgggttaaggagaaaggttgaggagaagaagttgaagggagttgatactcgggttcagaagacagatgactcagatgacgatgataagccattgggtctcaagatcaactcatccagaatgtcttccaacagagtgaataagcctgttctgcagagaactgtaccaaaggttgagcagcctgatgaagattcagatgatgataaaccattggcaagcaggttgcccagtaatgccggtccaaaaagtggaggtgatgtctctgaggattcagaggatgagaagccactggctgccagattttcaaaagttgctggtagtggaaacccaaaaatagcttcttccagcaaagggttaaccagtgatacaaatggccaacaaagtttgggtaaaaggcctctagacaatagtaatcaaacaagttcagctcttaagaaggctaaaccttcaaacgtttcagcttctgcaatcgttagaagagaaatcaagacagatgacaacacacctcttgcacaaaggctgaaaatgggagagtcttcgaaaggcaagtcatctgcaaagagtgtctttaagaagagtcctgcttctgtgaagaaggacatcaagaaaatgaaagggaaagggaaattaaagaagaacatgaaaaattctcagttctcaaagataatgaaggtcccccctggatctggtggaggaaagaaatggactaccttggagcacaatggtgttattttccctcccccatacaagcctcatggtgtcaaaatgctttacaatgggaaacctatcgatctgacaccagaacaagaggaggttgcaacaatgtttgctgttatgaaagacacagactatgcggccaagccaacattcattgataactttttcactgattggagaaaagttcttggtaaaaatcatattattaagaacttcgagctttgtgatttcacaccaatatatgaatggcacctcagagagaaggagaggaagaagcagatgacaacagaggagaaaaaaacattgcgggaagacaaattgaaacaagaggagaagtacatgtgggctgttgtagatggtgttaaagaaaaggtcggaaatttcagagtagaaccgcctggcttgttcaggggacgtggagaacatccaaagatggggaaacttaagcgccgcattctaccaagtgatattacaataaatattggaaaaggagctccagtccctgagtgcccgatacctggagaaagttggaaagaagtcaaacatgacaatactgttacatggttggccttttggaacgatccaattaacccaaaggatttcaagtatgttttcctggcagcaagcagctcactgaaggggcaaagtgacaaagagaagtatgagaagtccagaaaattgaagggtcatatacaaagaattcgtgagaattatacaaaagatttcaaaaacaaagatgtgacgaggaggcaaatagctgtggcaacataccttatcgataaactagcccttagggctggcaatgaaaaggacgacgatgaagctgatactgttggttgctgtacgctgaaggttgataatgttacatgtatgcctccaaatcagattcagaggttgaagagcttgtgtacaaggcaattgagggtttccgtgctggaaagaagccaggacaagatctatttgacaagattgatacatctaggctaaatgctcacttgaaggatctaatgcctgggctcactgcaaaagtgttccgtacatataatgcttccataacattggacggaatcttgcatgaagaaacagaagatggaactgttttagaaaaaatcgctgtctatcagcgggcaaacaaagaggttgccatcatctgtaaccatcagcgtagtgtctcgaaatcacatgagtcccagatgactagaatgaacgaaaagattgatgagttgaagtcccagatggaggagctgaaagcagacttgaacaaagcaaagaaagggaagcctctaggctatgattcagaggggaagccaaagaggaacttggctcctgaagcgattcaaaagaaggttgcaacacttgaaggcaagatagagaagatggagatggataagaggataaaagaggatctgaagacagttgcgcttggaacgtcaaagatcaactatcttgatcctagaataaccgtggcatggtgcaaacgccatgaagtccctattgagaagattttcaacaaatctctcctcgcgaaatttgtatgggcaatggacgttgacccggaattcagattctaggagaccattggctaccatgtgccagccagtttggtccagtttccagcccttctccctggacactaattgcagctaggaaaggaaagagctcggtgtttgttttttcaaagtccccaccccccctgctcgtggaacgaaggaaagcacccgtcattctctttgtaggcccttcttttttttttcttttggttcaattgcgctaagttcaatatgtattctgctgagaaatctgagctcgtttgagaacggttggacattgaattcatagtgagttttaatcttgaatatagatgacttgttgagggatgatcccgtggtcgtttgtgtgttttgtcgactagtgagcttgccttgtccaccaaagtca

SEQ ID NO: 17731 - DNA, 1018 bp, Zea Mays
cgcaggcgggggcacggtgcggtggtggacgccctccgtccagccttaaggattagtatatatatatatatatatatatattgacacttcatgagatgaatacaactgtcaattcctttctactctcggtgtctcgtttacacttattctaacacgttatcagtattttgcctaccgccgaagtctaatcggccattgcgttgaagaagggcgagcgcccacttactgcagatgtcccccgatgaagaatcaatacaagatgatccattggatagggtaacaatattctgattctaccttccatggatcttgattcattttgcatacttcctggacttctccatgcaaccgctgcatgaccgccgtggtgattgccgcatgatgtgacatgctctcacgttggacatgcataccacgagtggatctttgggtgattggcgacatcgcagggagcatcatagcgactaaccgcaccaagatctggatcccacgccgaggccgcctgccgtcgagccaaggctgcggtcgcgcccgcgctcgcgcgtaccatggccgggcggccgcgcccgcgctgcgccgtgcgcaggggccggaccgccacacccgctctcgcaccggggtcggggctggatccgcagcaccagcgtcgtggctggggctggggacgccgcacctgcgctgtcgaagggctgcgcccgcgcacccgaggggcctagcctgctgccgaggtcgggggcagcgcgccggccaggccacgtccttgtcgcggctgtggctgcgccttgaccgcgccaggcagcacgcagggccgctgccgcgccgggacgcctgtgccgccgtgagtgccacgggcccgcgccagtctgcaccgagccaccgaggggccggagggccacgcgccaccgccggaggctcgcccgcgtgcaccgaggggcttcgccgcccacaccgccgcgggggacgctgactgagtgccgcgcgcgaggctgtgcccgcgccgccgagccgcggccgcgcc

SEQ ID NO: 17732 - DNA, 4042 bp, Zea Mays
ccttcctcatccagacactccccttgccgccgcctcctctgcccctctcgcgccgccatggccacctcgctctccaccccgtcgcagctccgcacctcacactgccacgcccgccgctacggccgcctcctcggcctccacccgcgcgtctcctgcgcgcgctgcccggctccccgccgcgccgccgccctctccgtgcgcgccaacgccgcctcgactgatggcgacgctgccgtcacggtgcgccgcttcccggccgcgccgaccaaggctgggcggctcgcgggcgtcaagaagatcatgatcctcggcgcggggcccatcgtcatcggtcaggcgtgcgagttcgactactccggcacgcaggcgtgcaaagcgcttgccgaggagggctacgaggtggtgctcgtcaactccaacccggcaaccatcatgaccgacccgggactcgcccaccgcacctacatcgggcccatgacgccgccgctcgtcgagcgcatcatcgacgccgagcgccccgacgcgctgctccccaccatgggcggccagaccgcgctcaacctcgcggtctcgctcgcggactcgggcgcgctcgaccgcctcggggtgcgcctcatcggggcatccctccccgccatccgcgccgccgaggacaggcagctcttcaagcaggccatggaccgcatcggcctcaaaacgccgccctccggcatcggcaccacgcttgaggagtgcctcgccatcgccgaggacatcggggagctaccgctcattgtgcgcccggccttcactctcgggggcacgggcggtggcatcgcttacaacaaggccgagtttgaggacatctgcagggccggcctcgccgcgtcgcacactcagcaggtgctcgtcgagaagtcgctcctgggctggaaggagtacgagctggaggtcatgcgcgacatggctgacaatgtcgtcatcatctgctccatcgagaacatcgatcccatgggagtgcacacgggggactccattaccgtggctcctgcgcagacactcactgacaaggagtaccagaggctcagggactactcggtggccatcattagggagattggtgtggagtgtggtggttccaatgtgcaatttgcagtcaatcctgctgatggggaggtgatggtcatcgagatgaatcccagggtgtccaggtcgtctgcacttgcctcaaaggcgacagggttccccatagccaagatggctgcgaagctctcagtaggctacactctagatcagattcccaatgatattaccaagaagactccagctagcttcgagccttccattgattatgtggttacaaagataccacgttttgcttttgagaaattccctggctctgagccaatattaaccacacagatgaagtctgttggtgaggcgatggcattggggcgtaccttccaggaatccttccagaaagctgtccgctcactggagactggttttgcgggatggggttgtggccctatcaaggaacttgattgggactgggaaaagataaaatatagcttgcgggtacctaatccagatcgtatccatgctatctatgcagctttcaagaaaggcatgagggtcgaagatatccatgaaattagcttcattgacaaatggtttcttacagagctcaaggggctagtggatgtagagcagttccttttatcaaagagcctagatcagttgtcaaaggatgacttttaccaagtgaagaagagggggtttagcgacaagcagattgcatttgcaacttcttcatcagaaagtgatgtgagatcaaggcgtttgacattaggcgtcactccgacatataaacgtgttgatacttgcgctgctgaatttgaagccaacaccccctacatgtactcttcctatgagtacgaatgtgaatcatctccaaccaataggaagaaggtgctgatattgggtggtgggccaaatcgcataggccagggcattgagtttgattactgttgttgccatgcatcatttgcacttcgagaggctggatacgagactattatgatgaactccaatcctgagacagtctcaactgactatgataccagtgatcgtttgtactttgagccactgacagttgaggatgtatcaaatgtccttgatttagagcgcccagatggtataatcgtgcaatttggagggcaaactcctctaaagcttgcgctacctattcaacagtacatagaggagaacaaaatggtgtctgcttcaggcactgggaatgttaagatatggggaacatcaccagattccattgatgcttctgaggacagaaaaagatttaatgcaattctcgaggagcttcaaattgaacagccaaagggagggattgcaagaagtgagtctgatgccttggcaatcgcctcagaagtaggttaccctgttgtggtccgtccatcatatgttcttggtggacgggcaatggagattgtgtacaacgacgaaaaactgatcaagtacctcgcaaccgcggtgcaagtagatccagaaaggcctgttttagtggacaaatatctaattgatgcagttgagattgatgttgatgcattggctgacacagctgggaatgttgtgattggtggaattatggagcatattgagcaggctggtatacattccggtgattcagcatgttctcttcctactagaacagtctcagcccaatgcctggaagttatccgttcatggaccacaaagctcgctaagcgtctgaatgtttgtggactaatgaactgtcagtatgctatatctacttctggtgatgtgttcctacttgaggcgaaccctcgtgcttcacgcacagtcccttttgtatccaaggcgattggccatccgctagctaaatatgcatcattgatcatgtctggtgtgaccttgccggagctcgggttcactaaagaagtgattcctaagcatgtgtctgttaaggaggctgttcttccattcgagaaattccaagggtgcgacattcttcttggaccagagatgcgcagcactggagaggtgatgggcatcgactatgagttctccggtgcctttgcaaaagcacagattgccgctgggcagaagctccccttaagtggcactgtgttccttagcctgaacgatttgacgaaacgacatcttgctgagattgggagtggattccgggagcttggcttcagcatcattgccacatctggaacagccaaagttctccagctcgagggcgttccagtggagccggtgctaaaaatacatgaggggcgaccgaatgccagggatatgctgaagaatggtcagatacagatcatggtgataacaagctctggtgatgctcttgactccaaagacggtctccagcttcgtaggcttgccctcgcctacaaggtgccaattatcacaaccgtcgacggcgcacgtgcctccatagatgccatcaagagcttgaaggacaagtcgattgagatcctcgccttgcaagattacttccagactgccgatgcttcggcagatttacaagcagcggcacagaccaccccttagtgctgtcttccttttccatgtactgtgatcctagctcgagccaaaacaacatcccatatgaattattttgtttacggttgcacctgcagcatgcatggcgcaaggacaggcatccagatcgtatcggtgacaagcatagctagacagaattggtattgggcgaatgtagttgtactctgtaatgttagttagggtgatgagcatccacaataaggcttcccaactgcgattttgatgactatcatattctttgtggagatttacattgtatcattgtcgcatacgaaactgtgcgacatacatgtaccgtatgcatgttatcagattcttagatgaccacacattggcacacccgtctctcgtctcgtgttctttcactgtgtgctctacaattgtacaaacaaacgattgtgtcaaggattaattaatgggtagcactgtacaacgtttaaaaaaaaaa

SEQ ID NO: 17733 - DNA, 994 bp, Zea Mays
atggatgcactaactaattcaaaccaaaagaaagtaaaggacagttggagaattgtcaaccaccgggatatcattccaacagtgccacgtcttatgggctattgccatgtggaagcaccagtttatcttaaatttggggacgcaaaagatgcaccggtaaataacagcattctagatgatgaagaccaaggtgacgtgataggggagtacacacctgatgttcttgttactgaatttatgaaaggcgagaagcaacttgtggaaaaactactgcaaacagaaataaatttactccgctcaatcagggatggttcggctcttatgcagcacatggaagacttctactatgtcacccttcttgagaatgtgagatcaagttatcaagtggcagatactgccaatgatgaataccaattgacagcgtgatcctagtaaaactgcacagctgaacatcatggactgtgtttccctgcaaaaacttcatttctgaaggacactgaatggggctatgaaagtgtgcaatccttactcttagtggaaacatgaacaggcagaacagccttggacctcagtcaggatagaggaaatgaaactggtttcactggcggatatacttgtagcaccgtgtcaattggtagatatgttgtttgagctattttccgttgatgtagctagcacactttggaatatattgtatgatgtttgaaattctagaaaagttcatagacacctgggagaataactcaagaaatatccaagtccgttttggccaatattttttttcatggagaaacttgcacaccgtggtaggctaccggctacccaagggctgatagggtgtgttaatcgagtgtacgacctagataaaaatgttcaatgtgatggaactatatatcttgcatggaataaagtagcatcatgtaatttcggcattttttcttgaacatgcatgtgaaccgcgtcattatattaagatagaataagttatctggca

SEQ ID NO: 17734 - DNA, 249 bp, Zea Mays
agtaagataaacattaaataatcagaaatgaaagtgtcatcagtgactatacctggtcggtatttgtctccatcttatttagctcatcaataatagcccctatactcggccttttgtgccgatcggtctccacacaacttaaagccatttcaatgcatctcactacttgttcacaatatgtctccaatgcagctgcatccattgttgtttgtaacttattcctccatttttcatgtacctgatggtttg

SEQ ID NO: 17735 - DNA, 595 bp, Zea Mays
tctattgtttcacttatgctgcattcactaggtagcagactagcagggtatcatgaatgggagctcttatttttgcagagtccattgtgaagagaattgaatttgttaatataggtctaatccttccaactgtgcaaatcaactgtgttcctccctgaagcattggttgtagggtgcgcttgaaaggatgtgcaatgagattgtttcgatgtagcgtgcatgagtaccctgagtagctgtggatggttatacagtttgtggtctagggatgtgcagtgagggcagggaattgggaataatttcgtgcccccatcgaccttgatttgtagggtaggatgatttactgtttaaccactagcaaatgttagtagccagttccatgttcatttactccacggcaactgtgctttcgtgtgccaataaccggagttgatccacatgtaatgaattggtgtcaaattgacgatcctgtgtttcaaagtatggttattggatcgtgttgccagcttttgcgtgatttgtcacacgtataatcactatagctgacttgctggtacaaatagcaatgggtaaaaatagggtgggtatatgcctg

SEQ ID NO: 17736 - DNA, 2026 bp, Zea Mays
gggaccaaccgttgcggatgatttcctctcgtctcgtcccatactcccgtcctgtccgtcttcacctgcgttccccgggtcccgacacgccgctgtaccagtcccgcccgcctgcgcacttctcccacccccgcgccgcctccggcgccggcgagccctcccgacgctcctcgaacgatccgtccctgtcgcggcccttctctctgccgcttccagcccaaggggaggagagggagaggatgtggtcgtcgagccaggcgagcacgaggggcgtcgtggagatggggagggtggaggccgggccgtcgcatttccctaagagacccgcgcctcagaactccgccagggtcaatctgtcaaggacacacacagtcaaacctacctctgctggcgaccgttcaggaatttctgttaaatgcaacttggggtggtcttctcaaccatcgcctgacttgaggcatcactttagaggatactcatcagcatcagaggcagttcttacttcccaatctgatgtgagaaaactgtttgttggcaatgaaaaaatcggtgttctcttgctgaatcttgggggcccagagactcttgacgatgtgcagcctttcttgtttaatctttttgcagatccggacattatccgtcttcctaggctctttcgctttctgcagaagccacttgcaaaattcatatcagaagtgagagcaccaaaaagtaaggaaggttatgcatccataggtggcggttctcctctacgacaaattactgatgcacaggctgaagcacttagggaggcattacatgggaaagatgttcctgccaacgtgtatgttggaatgcggtattggcatcccttcactgaagaagccatagaacaaataaaacgggatggaatcacgaaacttgttgtgttgcctctataccctcagttctccatatcaactagtggttcaagtctccgtttattggagagcatattcagagaggatgagtatctcgtgaatatgcaacatacagttataccttcctggtaccaacgtgaaggatatatcaaggctatggcaactttgattgaaaacgaattgacaaaatttcaagaaccccaaaaggttatgatatttttcagtgctcatggagttcctctggcatatgttgaagaagctggtgatccatataaagcagaaatggaagagtgtatcgatcttatcatggaagaactggaaaaaagaggaataacaaatccgtgcatacttgcttatcagagccgagttggaccagtggaatggctgaaaccgtacactgatgagacaattattgagcttgggcagaaaggggtaaagagcctgcttgctgttcccattagttttgttagcgaacacattgaaactttggaagaaatcgatgtggagtacaaagagttggctttagaatctggcatcaagcactggggacgggttccagcactaggttgcgaacccacattcatttcggatcttgctgatgctgttattgaaagcctaccttatgttggcgcaatggcagtttccaatcttgaggctcggcagtctctcgtacccctcgggagcgtggaggagctgctagcagcatacgactcgaagcgcgatgagctccctccaccggtaatcgtgtgggagtggggctggacaaagagcgcggagacctggaatggtcgtgcggcgatgctggccgtgctggctctcctggtgctggaagtgaccaccggcgaagggttcctgcatcaatggggaatcctgcctctgttccgctgagccgacagttctgttcatgatggggtcataattttgctgcagccgaaggaagttttgaacttctgatgctgtatatgaatcaatttgccttaaatcgtcgatgggaaaagaggagaaaatggaggttcaggtctttcccacatggtacaagattctctcatgagtcaaactctactcatgcgaaagtcctcatttctacgtggctaggctcgcgtgagcacaacaagcgtgtgaatgct

SEQ ID NO: 17737 - DNA, 1557 bp, Zea Mays
acgagggcagttcggtcactactgccggcggcgtctcgctttccaactccgccaccacacggcccacaccacgccaactgcttccgcaaggccgcgagagctttgcgtaaggtaaacttcagcgagcagcatccgtcccaccgaccgcaatgccggaggacaaggagtacgcgcccgtgccgctcggccaggcggcggccgaggcggcagcgcctgactccgaggaccctgccaagtcgccgccgcgacccagctcgcccggcacgtccactcgcaaggcattctttgctgttcttcaaagctgggtgtcaagaaaatttatgactggatgtgtagttcttttgccaattgctgtcacattcttcatcacttggtggtttatccaatttgttgatggttttttcagcccactctatgcaaaactggggtttgacatattcggccttgggttcttgacctccctggtgtttatacttcttgttggaatctttgtgtcttcttgggtgggttcaacggtcttctgggttggagaatggtttataaagaaaatgccctttgtaaggcacatatactctgcatcaaagcaagttagcactgctgtttcaccagatcaaaatacaacagcattcaaagaagtagcaatcattagtcatccccgtgttggtgaatatgcatttggattcataacatcaaccatggttcttcagacagacaaaggtgatgaagaattgtgtagtgtttatgtgccaaccaatcatttatatattggtgacatctttttggtaaactccgccgaaattataaggcccaatttgtctattcgtgaaggcataggtgatcatgtcactggaaccaacacctcggaagagccagaacgtccgtttggacagagtgaggacagtatgactgtatgaggcatgcatgaaagtgatgggtgtttcaggatggcttgttggttatggattcaaagctggggcatggagcttgagacaatcaatttgtagattgcattcagaacttgcgcattattggcagatacatgacaacctcacactaacttgcgttgctatcagttggtgacacgaaaattgcagctccacttacaattacaagcacgacatgcacttttaactgatctccagctgcgtgctaggtcgtgtttgctgaacgtgattcaatgctgcatgtgcatctaccagtggtacttgtgtatatgattttttttttatactacggttgtcagcgtgctcggggaaggctatagtcctggagtctgccaagacgcatggaagaactgtgatgaaaaccaacctgttcttggggccttatgcctcaaggacctcccttggcttttacaaacacaagtgtccaccccaccatttagaacaagtataatatggctgggctttaaacagctccatgtcaccaaaatcctagatggtaggatgagaacatctcgagaacattcgagagcaaagaaagtaggtgcttcatgaagaacttggctttggcgcattatacgaggagaaagagtgtgattgcaacctgctgtgggag

SEQ ID NO: 17738 - DNA, 306 bp, Zea Mays
ctgacccatcataaataactggccacaataatgtcacatccggatttaggggtccaaactcgggtgcggctcacacgtgtgatggaatcaagtctcatacatatgatgactcatggtacagaaacgaatgtcacatcattaatatataacaaagttttgtacaaaatagttaaataattaaattatacgaagacaatgatctagcaaccaaagttgaccgggagacgacggcctagacctctcacgaacatcatcgcgacatccttcatgcgcctcatcctgcggtgcctattcttgacctggggg

SEQ ID NO: 17739 - DNA, 822 bp, Zea Mays
cagtgtaggtgcagcccagccatgcagggggatcaaaagcttcctgcggagcaggagcagcagcgaggaggaggagctggtggaggagtgcataaaccgggcggagtgcctgacgctggcggtgcggcggcggagcaagggcgtgggcggctacctcgtgagcacccggtggcagaagaacttctggctgctcgcctgaccggtccacgaggactccccctcctcatcctcatcctttgacgcaacgcaagagttttacttacttcccgggctaatcgtttttacaaagtccaataataagtaaccaccaccaccaccactactgcatctgtttgttgatctgtaacctccagtgtcctagggtgtgtgccagccagtgtgcgtgtgcctgatcctctctctctccccacgatgtggtgctgtattctatgtatcgtcttggtttagctgtgctgctgtagcctgtagagtgtaagctagctgttgtgtagtgaaggcacgcagaagctgagccgatccgtttgccctgtctgttctgcgggaatctgtctgttttgcagagcggggatgcagaggcgcgggacggggacgtcagtacactgcgttgcgttgcgttgcgttgcataaactacgacttgtgtattgtgcttgtgcgatgtgtttgtttgcttgcttgcttgctacaatggttggtacagagttccataatgaagtgatgatgcgttttgactaactgtctcccccttgcgctctctctctctgtcaaaaaataaaaataaaactaggccgaggcattttgacaggtagtacaagcaagcaagc

SEQ ID NO: 17740 - DNA, 1097 bp, Zea Mays
gagtttgagatcccgatcaacaacacaaacatcaaggcaatcatcctgcgcaggatttattcacaggagggacggagacgacttcgtcggtggccgagtggctcatggcggagctgatgaggaaccccgacgcaatgcacaaggcgcaagacgaggtgcggcaagcattcgagcacagcagccccgacgagcacgaagcccagatggacaagctgcgctacaccaagacggtgatcaaggagaccctgaggctgtacccgcccctcccgctgctcctccctcgccagtgccgagagacctgcgacatcggcgggttccaggtggccaagggcagcagggtgatcgtgaacgcatgggcgatcgcgaggagcccggcgcactgggacgacgccgacaggttcatgcctgaaagatttgagcgcgacgatagcgcggcaggttattccagggctactactgatggcactacacagtttgagtacctgccgtttgggcacgggaggaggatttgcccgggcatgggcttcggcttgtccaccttggagatcctagttgcgcggctcctctactactttgactggagccttccggaaggaatgcaggtggtggacctggacatggacatgactgtcggtgcgtcggccaggaggaccaacaaactgcacctagtggcctcgccgtatcaagtgcccacgtagatttcatatgatggttgcagttttgcaaccaaaagttgtgcctctttttcttttcctggcttctttcctatcctgcggaaatcaaataaggccttgttcggttatctcttaatccatgtggattgagttggattgggtgggtttaaatcccaaacaagtcaaagttcttctaaattttttccaatcccgctcaatccatatataatgggaataaccgaacaagacctaaacagtttacgtattcactaccaactccagcagcctccgtatccaactctccggtactactaactccaacagcctccgtatccagctccccatccccattttgcatgttctaaattattgtccagccgtccagcagcctcgccctgttgagcactaaatttggtacctaga

SEQ ID NO: 17741 - DNA, 2382 bp, Zea Mays
atagtagggtttggactatacaattctcgtgtctcgccctcccccgacgcgccgtctagggtttcacagccgcaccccgatccactagagctatggagttcgacgaatacgagtacctggagaaggcggtggagccggctcccccgccggccaatggttccggctccggcgagaaggaccgcggctcgcgtcgccgcgagggcgacgagggccgcatatcgaagcgctcccgctcgggggaggaccgcgagcggggccggcaccgcagcgttcgggaacaccgggatcgggataaggatgacgggaaggagaaggagaggagccgcgatagccgcgggaaggacagagacagggaagggagagaacgggagaaggagaggggggacaggcaccggcccagagagagggaggtggaacgggagcggaggagcctgagccgttcggagcggcgccgtatcgaggaagaggagatggtgagggagctggagatggagcgcgagcgcagcgagcgacaccactatcgcgaccgtgacgtcaggcgtaggaaagatgacggggcagagccagaagttgatccagaaagggaccagaggactgtatttgctttccagctatctctgaaggcagacgaaagagatgtttatgagttcttctcaagggctgggaaggttcgtgatgttcgtcttatcatggaccgaaactcaagacgttctaaaggagttgggattacacactgaaattttatagtttgctctacatgctgggattatcggcaatttacaagttctaggcaataaagggggcacccaagaaccaagttcgaaacctctacaatttttgatcaaaatgcctgaagttttctgtgaaaaattgaaatgtacattgagttttacgatgttatgtctgttccaatggcaattgctttgtctggtcaaccgctgcttggacaagcagtgatggttaagccatctgaggctgaaaagaacttagttcagtcaaatgcgacatcaggtggtgcggcttcaggtggagcaagaaagttgtatgttggcaatcttcactcaaatattactgaagaccaattaagacaggtatttgaaccatttgggcaagtggagcttgtacagcttcctctagatgcaatgactggactgtgcaaaggttatggctttattcagtttgcccggcttgaagatgcaaaagctgcacagagtttgaatgggcagcttgatattgccggcagagttattaaggtttcagctgttactgatcatgtgggagtgcaagctagtggagctactactggagatctagatgatgatgaaggtggaggcttggcgctaaatgcaagctccagagctgctctaatgctcaaattggacaggagtggtacagcaaccagcttaactggtggtattggtgctgctggagtggctgtaccagctacttcagttattggggcagcaggagctgcttctcttctgtcaccaacagtttctgctgttggatcagttcctggggcacctgtgcttcctattaccgctcagaatgtgatcatgtccacacctacagaattcttgttgcttaaaaacatgtttgacccatcattggagacggatcctgattttgacttggatattagagatgatgtccaagatgaatgttccaagtttggtgcagtgaagcatatttttgttgacaaaaatactgcaggcttcgtgtatctgcagttcgatagtgtaactgcagcagggaaggcccaacaagcacttcatggaagatggttcgccggaaagatgattacagcgacatttatgtccgatcaggaatacagtactaagttcccaaacttgtgagcatatgcggggaagagttggtcagacccgcatagttcgttcggagagtttgctagtgctgtatcgttggatggtagactagacgaacaccttattgattgtatgacaggatagtttcagttgcagcgctggtcgtgcgtacaatgtttgatgtactttatttacggcatcacacacagtgaccatcccttattttgtccaccgaatgaaatgccctatgatctccaggcacgttggcatatggtttatttatgtacgatctgttggcactggtacgtatttgtatactaagcaaaagcgttacataatcacaatggtacctttattagtcccctgtcgtgggatatgcggccgcattttggccagctttccaatgtgttccattttatttttgttctcatgatgtttcgacatgttttcatcagtttttcctttcaccaaggtcactatttcattccgtttcattttcatttactccactgatactgtatctagttattttatttggtttatcaagaaattataa

SEQ ID NO: 17742 - DNA, 1328 bp, Zea Mays
agggctgggtactccttaaatgcgaagccatgatggaaattcgaagtgacctaatggatgcacatctttatgcttttaagaggacaatattacaggacgtactggaacaaaaggaagcataccgtagcattagacttgaagtcctcccgtatttagttaggagtcaattgagatcaactccatcaggtggcagtggaacatcagttgacgaaattgagagtagtgcctttcagtccagtggtaatttgcagtgtttgtcgcagcatcgggtcattgcaccatctgctttcaagcaggatgtattatcaagatcaagtggtggacataggtgctgtgcttatattgctagtaaaagcaaatactgtcaccgcttgaactcaatccagtcatattgtgatatcaatcgagatgttataggggaagttagccacctgtctggttattcgttttctgcacaaaacaatattatccacccatcctctgttcttggatcaaagactacaataggaccacactgtattcttgctgagggttcacagcttggtgacaagtgtagtgtgaagcgatctgtgattggtcgtcattgccgaattggttccaatgtaaagatcgtcaactctgttgtgatgaatcatgttgttattgaagatggttgccacatccaaggttctgttgtatgtaataatgttcaactgcaagaacgggcagttctgaaagattgccaggttggagctggttatattgtgactgctggcagcgagcacaaagcagaatccctagcaagaaagtacagtgagctttgactggtttgttagatcctgaatgttttttttttgtgttcacttgagatgcaccccctcagaaaaaagggtagcagttgtccaaattttataaaatgtcattatgtacaacagcacagttcagtgcgaaaggtttggttgcttatctttcctaccaggcggcttgttagagcgaaaggtttggtcgcctatctatcctaccagctgcttgagcaagttgcatgctgtctgaggacgatgggttgatagttggggcatgtagttgggacctactattgtcggaaattctggattcggtttctcttccgccttgtgtttttgtgaggccaggtgattgcctcttataccccttaggtcctcttaggaccacaggtttcttgaaatgcatgaataggaaaaatgcaggaatagaatgcgtaacatcttgaatcctacggatcgaaagcacacaagaaactgcaagattgaaacatttggacggggcgcatgaaaaatacagaaattcgttgagagagacatgtttttgtt

SEQ ID NO: 17743 - DNA, 657 bp, Zea Mays
gggggctcaggacatgctttgtgtaaactcgaggccaggagaaggagatggctcgaagactatccggaggcgactaacacagacgaggctgtcgtcttcgccacttccattattccatggtgggcttggatgaaacgcttccaccttcccgaagccgagaagctaaatggtcgcgccgccatggtcggcttcttcatggcctatttcgtggacagcttgacgggcgcgggcctcgtcgaccagatgggcaacttcttctgcaagacgctgctgttcgccgccgtcgccggcgtgctgctggtcaggaaaaacgaggacgtcgagtcgctgaagaagctcgtcgacgagaccacgttctatgacaggcagtggcaggcgacctggcaagatgactccgctgggggaccaaacaactagttcagcgttgtggtacaaaaaaaatgcaaaacgctttcttgttacgtagcttatctatttcctcggccttcttgttttccctgtgtagtgagaatttttttgtttttgtttttgacaaacgcaatgatctacgtcatgttgtaaaattgtatggaaaataattctgcagtttcagttttttttaaaaaaaaaccgataatattcagacatggaaattgattcacatatcgaccaaagaaa

SEQ ID NO: 17744 - DNA, 835 bp, Zea Mays
ttcctccatgtggagatatccttgatccataaaccaaacggtccacaggatacttcacaatatgagcattcgtccattcctgcaacagtaaagaagctattcaatttacattctaactttctgacaaagagagacgcatgggctgggacctttgagaactactttaaaatccggagaacgccaagaacagactgtcctgagaagctcccagaggtgacaaagtcactgcgaccatttggtcccaaggaagattcgtctctctcagagttccaagtggagttgattcaacttgcctcgcagcttaacggcgaccatgtactgaacacgtacccagatattggcaggaccatgactgtcggggaagcgaaccgctacgcagaggatgctgtcgccagattcctggaagctggtcggattgctttgagagctggtgcgaatgaatctgctttggtgacgatgaggcccgctctcacaagcagggcctcaatgtcctctggtttatcatcagagctctagtagatggttccagtctgcccacaaattacacatcgccattccctctgattcagctcttgggtggtgtagtgcaaatatgatagtttggttctgtaaatagacagtcggtacatgtcaaagcctcaatgtgtagtggggatttctaaaagcaatttgtgggtacctgcttgtcaagcagctggactgcactctggagtaaatgtatgatactgtacagtaactgaattttcatgtctgtaaacatgggcttaaacatgtgtaatatgatacttaaacatttgcttgggaggatgagggttaacacttaacaatgtgaaca

SEQ ID NO: 17745 - DNA, 51 bp, Zea Mays
cccggcctgagattccaaaggtggtggtgtcctgtcttcggggacttctat

SEQ ID NO: 17746 - DNA, 863 bp, Zea Mays
  misc_feature (863)..(863): n is a, c, g, or t
ctttattacagtagggtagttatcagaatccaagcctattccatcgaatgaccaggacccagacctggagctgatgctgatgcctcctccacgcataatgccaatgccactccccactctcagcctccaagagctttcactgattggagcgcgtccaacagtgcctttgccgcacagcccgcccctgctaccaccaatacacccttccactacaacctctcccagtcttatgccctatggacccattacatgctcaacaagaatgtatcctactctacttactctacaccacatgagccgttgcgccatacccacatcccggataagtattcaggttgtgcattcagccttgggtttgactctttcactacgatgtcccttggaccaaatatttgtgccaacatgacgcccatggaaagatctatatctgccaaagaacctgagaattcagaggatttgcctacagtagttagaagcagtgatgaaatggacactagaaacagtggcgacgttcgtcgtgacacagttgacactcttcctgagtcgaagcagagccatgaaagttgcgcttctgttagtaacaagttcgactctggagagtaccaagtcattttgcgcaaggagttgactaagagtgacgttgcaaattccgggcgaattgtgcttcccaagaaggatgctgaggctggtcttccaccattggtgcaaggagatcctctgatactacagatggatgacatggtgcttccgattatatggaaatttaagtatagattttggccaaacaacaaaagcagaatgtatattctggaagctgcaggtgaattcgtgaagacacatggccttcaggcaggggatacacn

SEQ ID NO: 17747 - DNA, 2375 bp, Zea Mays
aagaagagtgccttttcatttggtccccgcggtttaggtttttgttcctgtggctgcggctgttggattgtgctgaaagatctcagtttttatctccaaggaaggattactcatcgcgaatccggatctgtcggtggtggaaactggaaagttgccacttttatgaggcgaggctgtgaggaacccgtgtccctcccgtggatgtggtgagccctgattggcgcaccaggcgagaaggggcaggagcccagtaggtggtgacagagcagggtgagagggagaaccggagaagagaggtagccggtatacaagacaagcaggcaactataggaaggacgaaggaaaaggagaggagggagctctccatgggggagcccctcctcgcctccctctctatggagaacagcaacagccacccctgcacgctcctctccatggaccctgccggctcgcacctggcctccgccgagtcctcgggcggcggtagcgccgcgaccaatggggttggcaatggtgttgaccgggaactctttgtcattccgcggcgtgagtcggcgcaccctgttccgccggacatcaacctcccgctctctgcagatcactcaccgctgcctccgtcgtggagcctcgacacgttcgacatacttgatgtcactcttggaacacacaactacgagtctgaggttgcgcttacgcttccaaagccgaccggcaacggcaatggcagtgccgctatcggcgtcggcgcgaggaaatacgctaagagaggcgacagcatctggggcgcgtggttcttcttcaataactacttcaagcctgcacttgtggagaagtcaaaggggaagatggtgcgagacgcgtccaggaacatctcgggctttgacaagtctgatctacgtcttgatgtcttcctggtgcagcatgacatggagaacatgtacatgtgggttttcaaggagcggcccgacaatgcccttgggaagatgcagctccggagcttcatgaatgggcattccaagcatggggagccgtctttcccgttcagtgccgataagggctttgccaggtcacaccgcatgcagcgaaagcactaccgtgggctgtcaaacccgcagtgccttcatgggattgagatcgtggcctcgccaaatttgtccgcagttcctgagtctgacttgaagaggtgggctgaactgacaggcagggaacataatttttcagtaccatctgaagccagtgactttgagtcatggaggaatcttcccagcactgattttgaacttgacaggccacatccaccggccgcaaagagtgccactcatggccagaagaagggattgaatggttcaggtctcaacctttcaactccaccatcatcagacgatgggatggacctttcaccgaaatgtgccaaacgccgcaaggatttctttggccatggcgtagaggaggactgtgtgatggcgaacaattcttgttccgacagagagcaagaggcagaagctcacactggtgagccatcatggatgcacgagttcactggtgtggctaagcatgcaagcggccctgtcactgctgccaagacgatatatgaggatgaggaagggtacttaatcgtggtgagcatgcttttctccgatccacatagtgtcaaagtatcatggaggaacacgctgacgcacggcatcgtgaagataacatgcgtgagcactgcccggatgccctacattaagaaacacgacaggacgttcaagctgacggaccctttccccgagcactgccctcccggcgagtttgtgagagagatccctctggcgacacggattccagaagacgcgaagatcgaggcgtactatgacgagacaggaactgggctggaaatcatggtccccaagcaccgggttggaccagaggagcatgaagttcaggtgtgcatgaggcccccacatcttggtgacaacgatctcgtgctctcctagaacaggaaaacagctagcttttagatgttctggtgtcatgctcatgccatgagatactggaacataaactggtggtgccatggctcagtaagagccgtcctatttgctgctaaacatgtagcttgtaagttgagaattcctttccccccataaaagtttgtgatttaggcaaaaggttacctcctccctctgttaatttccctctgtacctctgctacacaagtgcatcactattggtgatcttccttgactatctgaaagctgactagtcaagattctgtgtatattcagatgaccaggttcgtaataatgttgttgatggctacctatgattttgaggctcggttgtcggtttcgaaaattatttgcaatgattgccttaaccgttttaatgtg

SEQ ID NO: 17748 - DNA, 467 bp, Zea Mays
atatactttccaaagagagaaagggcaggcccagctctagcctttccaaagtgcgcgcaatctcctctgccgcatccgatattccgatctcgatcccgcgacgcggtgtctccggtcagcgccgccgccttctccctcgccggccgccactgcatcgccgcagtcgccatgaattatatcattggagcattcaagccaccttgtgacatctcgatcacattctctgatgcgaggactaggaagcaggtttcggttaagaaggacaatgggaagacaacgatggtccctgttttccagagcctcgaaactatatctggagaagtatcaatagcaccagttccaggtaaaaggattgaacacacgggtgtcaaaattgagttgctaggccaaatagagctctattttgaccgagggaacttctatgacttcacttcgttagttgatgagtttttttggtaataaaagaa

SEQ ID NO: 17749 - DNA, 987 bp, Zea Mays
gaacaggactccgactcgttcgggctattccatctctgctctctccctatatacgactaggctaccgccgccgccagatgcgcaggtcttcgtcggctccttctacttctcaggcaacgagcacccggcagtaccgatcgggtgttcttcactgggtccgctcctgcgtgctagaactagaagaatcctctgctcggctcgaacttggaaggggggaggcgagggatggggtccctgctttgctgcatggggtgctcggaggacgtctcggcagcgccgcccgtgagctgcttgtgcctactatggcctttccattattaccacaatttgaactcgggctctgctgcttgtcacagatgtgatacacgggtggcacctgatggtggaaggagtcctcctgcaaatcaagtggattcattggatactttgggtctccctccaaggcctttgccttacgatgatcctcaatccagccctcgcatggtgcaacacccacttgtatcaggacacgacaaagcaccaacgcatgtccagaaactaggacagcctgcagaaactaagaatacccatactgggtcaacttgcacagctcataaggtttctgcgtcctcaccaaaacagcactcagaaggttcaagaatggatgatggagtacaattctgtgattcctctgacagtgaggatgactgtccagtatgcctggaagaatatgattatgagaatccgaagattgcactgcaatgcaaacataatttccaccttagctgcatttacgagtggatggaaaggagccaggcttgcccggtctgtgcaaagactatgttgttcaatgaggatgaatgaccccgccgatggaagtcttcccagacggcaagtggaagacccaagctaaatcctgcgtgttgtgttctgaaaaccacagctttcggttgaaatcaaatcaaatatacagactggcctctatttacaggacataacccatgttcc

SEQ ID NO: 17750 - DNA, 2075 bp, Zea Mays
ctcacatggaagtggaaccgaaccgtgctctcagaggatgcgtaaataaagcggttgggataagtttgtaaattgctttgtcaaaccaggacaaggttctgaatcaggggcaggcaacctctcgcgtagcctgttcatcttcatcagacaggcccaaggatatgtcgtcgtccaacaactctgtcagcgcggcgctgtcaggaacgacgcccgtgttccggctgagagtatggcagctgattgccatcgccgtcgggatagtcatggcgatcctgctcgtcattgcgttgtgcctttcgctgcggaggaaaaagaagacagtgaaagggttcgacaacacttcgctggccgagatcccgatcgtctccaaggagatcaacgtcgacagagtcgatgcgcagagcctacatgacggtgaagcgcccttcatgccggtgcaggataagtactcgcagaccaaaggcgcagggcagctgggagggcgtagatccgtcgacgtcgacgcgttcagccagtgcagctcggtgtacaacatagagaaggccgggagctcgtactccgaagattacagctacagcagctccggtccggctaggaaaggcagctcaccgtatgcgtattcagcgtcgccgctggttggcctgcctgagctgtcgcatctaggctggggccactggtttaccttgagggacctggagtgcgccacgaaccggtttgcgaagagcaatgttcttggggagggtggctacggagttgtctacaagggccgtctggtgaatgggactgagatcgccgtgaagaagatccttaataatgtggggcaggcagagaaggaattcagagttgaagttgaagccatcggtcatgttcggcacaagaatctggtccgccttctgggatattgcgtggaagggatacataggatgcttgtctacgagtatgttaataatggcaacctggaacaatggcttcatggcgtgaatcaacacggtgtccttagttgggaaaaccgtatgaaaattctccttggcactgcaaaagctctcgcgtaccttcatgaggccatagaccccaaagttgtgcacagagacatcaagtcaagtaatatcttaatcgacgatgaattcaacagcaaggtttctgattttgggttggctaaacttctgaattctgacaaaagtcatatcaatacaagagttatgggaacatatgggtatgtagcacctgagtacgcaaatagtgggatgctaaatgaaaaaagtgacatatacagttttggagtggtgttgttagaatgtgtgacagctagggatccagttgattacagtaagcctgcagatgaggtgaatctcatagagtggcttaagatgatggttaccagtaagagggcagaggaggtagtggatccaaacctcgatgttaagccaccaaaacgtgcccttaagcgggcaatcctggttggcttcaagtgcgttgatcctgatgctgacaagaggccaaagatgagtcacgttgtccagatgcttgaatccgttcagaacgcataccatcaagatcaaagaaagctcagccaggtgggaagcatagatatcgagtcgcagcagtcgctagaggagacttcaaacagtgctgatgcctgaacctctccgattctgaacaagcactggaatcatctgatagcaacattgaattgatcgttgctcggtactttatagagtgagtggatcaggcttacagtttgcatatactggaggaggaggtggttaaaatcaatcagtagcaagttgttcattccgtttttttacccatttttccgggtgtgcttctatactcccctaaaaggttcatctcttttacccttaggatatgtatagttttccttttgggagagcatagaagcaccttcatcttcttcttctttttcgtttgagttgccaggagcgactaacctcaggcatagtcactggatttcattacccgtgtgtagcggctttatggaaactcactgttaccctatatgaaaacatgaaatttcctgctgtgaagcgctgacatctgaatccttttttccccct

SEQ ID NO: 17751 - DNA, 1526 bp, Zea Mays
ccaaaatacaagtattctggagcctccctcctttgtctttttagcagcaaatattgagattcctttttaacttggcatcactcaaacagacactcagtacttaaggaaaataacaactgaagtactccctccatcctaattagtgaaggacaaggtggtcttttgccaggattcttatttcgtctggaaatcgcttggataccttgtatttaaggatggagggagtatatgtttgccactttgtatttgcttatatattatgggcatcgtaaatccatagtggtacttcactgttttcagtgcgacaatacagaatcttttgaatcatgatactgcagatagacacgacagatattctttttatatgtggtggtgcttttgtggacttggaaaagactatttctgaaaggcgccaagattcatccataggatttggggcacccattcgtacgaacatgagaagttctggagctagctgtccaatggttacctcatctttattagaatctgttgaaagtggtgatcttgtaagatatggtctaattccggagttcattggtcgtttgcccattctagtaagtttggcagctctgaatgaaggtcagctcgttcaggttctgacagaaccaaagaattcactttccaaacaatacaggaaaatgtttaacctgaacaaagttaagctgcactttactgatggtgcacttagattgttagctaagaaggcgatagctaaaagcactggtgctcgtggtttaagagccatcttggaaactgttcttttggaggccatgtatgaggttccagacgaaaaaacaggaaatgagcgagttgacgctgttgtggtggatgaggaggcgattggttccgttgataggccaggttgtggggctaaaattctccgaggggatggtgcattggaccagtacataacaagaaccaatgtgatgaatttacaggaaactaacgatggtttggccggggagctcgaggaagcgtacatgctgtctagaattgttagcttgtaatttgaaaggctggggaggaagcgtatatgctgagttctgaccaacttcgtacatcgtgtaacatgtctaccccaacacaggccggctactttttgctcacaaaatcacctgtactctgtctccattcctgttaagctctaacgagcagatagatccggggcaccttttccatgtaaacaggagttgccttttgattgagcaaccgtcctgcggagtaaattgttgcccatttttccccgctgcccccaactgggcagctcgattgtggttgacagagttgtaaagatcatcaatttactgatatgatatgataagaaggagcactttcacaaagcacaccagatcaaatgtagctcgattatctgtccgttggcaggtttcagaacctgatagcaaatatgttcagttcagccgtgaatatagcatgttgcagagtcactagacacacggctgagattcattattcaatgattgcatcatgcattctgaatttctgat

SEQ ID NO: 17752 - DNA, 650 bp, Zea Mays
aaaaccaggccgcacgagcacactctctcctctcgctcgcgtccgcacaaatcccgtgctcccccgtctgaaaaccctccccacctccggcggcggcggcggcgctggcgaccgggtgtcttctccggcgagtctcccccctagtaacaagaaaatatggatgtacctgttgatgaccctgtggagaacctcactggaagtcctagtacccttggcaatgaggaagaagccactacttatgctaatgtgcaagatcagtccaaggaagaaccagaaaagctttacgaggaacccaaagacccaatgcaagacgagttgggtaaccaagggcatgtgagcatgaacaatgaagatgtgggaggccagaacaaagtggaccaagctacccccacagagcacggcgaggaagctggggtgaagcagcatgatgctacagttcctgatgacaagaaatggcctgggtggcctggagagagtgtgttccgtatactggttcctaccacaaaggtgggtgccgtcattgggcgcaaaggggatttcatcaagaaaatgtgtgaggaatcaagagcccgcatcaaggttcttgagggaccaccagctgtgccagaaagagctacttagtgccagaggctcccacacgagtagggtct

SEQ ID NO: 17753 - DNA, 233 bp, Zea Mays
gtgcgtctcatatgtgcgccaaaaaagaacatcacatataacgacaaaatgtatagagataaatgtcacaaatattattattacatagcggacgagccttacaaaaataattataacaataaagcgaactaataattattccttagcgccataagctgactgggagatgccacctagataagctcatactcttcgttgtaggcctcctcctggaccacctgttcttctcctat

SEQ ID NO: 17754 - DNA, 343 bp, Zea Mays
agtaggtagagttgaatctgtcttttagcgaagctgccaatggctgcataaagcaagtgtcctatcatgcaaaaaatgtttgtgattcatgtggtgggagaggtcacttgccaaatgcaaagatatatgtttgtccctcatgtaaaggattgggaagagtcactatgtatccattcacatccgtttgtagttcgtgcagaggcatcgggaaagtaataaaggattactgcttgacatgccaaggttcaggggtagtaggtggtatgaaacatgtaacattggatatgccagcagagagtcatatttgcactggttctactggaaacttcccaccacaacttgt

SEQ ID NO: 17755 - DNA, 3981 bp, Zea Mays
tagcaaaagttcattgacacagtgacacagattcttgctagagaggactgcttggagcttagacaggaagctagcgacctccttgagtattctaatgcaaaattgggccgtgtcacccgttatcttggatttcttgccgacagaactcgaaaattagatcaagctgcccttgagactgaagctagaatcacccctttgattcatgagaagaaaaggcttttcaatgacctattgaccttgaaaggcaatgtcaaagtgttttgtcgttgtagaccactatttgaagatgagggtccatcagtactagagtttccggatgattttagtatccgtgtaaacacaggagatgaatctttaaccaatcctaagaaggattatgagtttgatagggtatatggaccccacatcgggcaaggtgaacttttccttgatgttcaaccatttgtgcaatctgccctggatgggtacaatatttctatatttgcgtatggtcaaagccgttctggcaaaacacatacactggaaggatctagtcacgatcgtggtttatatctgcggagctttgaagaactgtttgatctttcaaactcggatactacttctacagcacattttaacttttattttactgcctgtgagctctacaatgatcaggttagggatttgctatcagaatctagtagcactgtcccaaaagttcgaatgggggtccaagaatcctttgtggagcttgttcaagagaaggttgaaaatccactagagttttctgcggcactaaagatagcacttcaaaaccgatcagtaaattcgccaaaggccatggtttctcacctgatcattaccattcatatacactacagaaactatgtaacaggggagcatctatacagtaagctttctctagtggatttgccagcaagtgaatgcttgcttgaagaagatgccaacagggacaatgtaacagatttcttgcatgtctcaaagtcactttctgtgttgggtgatgcatttgcctctttaagcgcaaagaaggagcctgttctatatgggaattcaagaatcacacaaatcttagctgactctctaggaagtagctcaaagatcttgctgatcgtgcatgtaagtccaagtgcttcaaatttgtcaagaactttatccacactcagtttttctgcaagagcaagaaatgctgagctgagccttgggaatcgtgacacaataaagaaatggaaagacgtggcaaatgattcacgcaaacaattgcatgacaaagaaaaggaggttctagacctgcggcaagaagttattgggttaaaacattctctaaaagaggctaacgaccagtgcatacttctgttcaatgaagttcaaaaagcctggagagtttcatcttcactccaagctgatctcaagtctgaaaatttaatgcttgccgagaagcacaagactgagaaagagcagaataaccagctaagggatcagatttctcatcttttgaaagttgaacaagagcaaaacctaaagatgcaggaacgggatttaacaattcagtcactacagactaaactcaagtccattgagtctcagcttaatgaagccctcaatgctagcgatgctagatcaactattgggtctgaatctgcttcagtaatttcttccccaaagataacagaatcaactgctgactcatcttcagtgacgaaaaggcttgaggaggaattggcaaaaagggatgcccttattgagaaattacatgaagagaatgagaagctttttgacagacttacagagaagtcaggattaggaagtgctccacaggcttcaagcccttcagcaaacaagccagctaatggtcaaggaagggagataggcaggagtgacagcagcaaaagtcgatcaccagatgtgtttgcatcaccagtgtctcaggataaaactggaaacagtggagctattgtaaaatcaagcaatgagctagcaaaaactacacctgctggggagtaccttacgtctgcactaatggattttgatcctgaccagtttgagggatttgcagcaatagctgatggtgctaataagcttttgatgctggtcttggctgcagttatcaaagctggtgcagctagggagcatgagatacttgccgagatccgtgatgctgtgttttcattcattcgaaagatggaaccgaaaaaagttatggatactatgttagtttcaagagtcaagatattatacatcagatctttgcttgctaaatcacctgaactacagtccatcaaggtctctccagttgagcgtttcttggagaaatcaaatactggtcgaagtagaagttctagtaggggaagtagtcctggcagatctcctgttcaccaccatggtcatggttcccgaactgcgcttgttgatgaacatgtgcatggtttcaaggtgaacattaaacaggaaaagaaatcaaaattctcctcaattgttctgaagcttcgtggtatcgaggaggagacatggagacagcatgttactggagggaagctccgggaaattactgaggaagctaaggccttttcaattggaaacaaggctttagctgctctctttgttcacacgccagctggtgaattacagcgccaaattcgtgcatggcttgctgaaaactttgagtttctatctgtaactggtgcggatgctgctggaggagccgcaggacagcttgaactgctgtcaaccgctattatggatggctggatggctggtcttggtacagcgcagccccctaccactgatgctttaggccagcttttatcagaatacacaaagcgtgtttacacatctcaactacaacacttgaaggacatagctggcacattggcaacggaggaggctgatgatcctgcacatgtcagtaaactccgctctgctctggagtctgtggatcacaaaaggagaaagatcatgcaacaaatgcgaactgacactgccttgttaacaaaagaagaaggtggctcaccaattcgcaatcctcttactgctgcggaggatgcacgattagcatctctcatatctctagataacatcttgaagcaagtcaaggaagtaattagacaaagctctacaggacctatgagaaaatcaaagaggaaagctttgctagagttattggatgacctcttgacacagatgccctctcttcttgatatagatcatccatgtgctcagaagcagatcatggaggcacggaaagttgtcgagtcactgcaagaagaccctgatgatcctgccccacagtctaatgcattgggagagggcgaggtttcacagtggaatgtactgcagttcaacacgggaacgactgcgcctttcatcataaagtgcggagcaaattccagtggtgaactggtgattaaggctgatctgcgagtccaggagcctaaaggtggcgaggtgatccgtgttgttccaagaccaacagttcttgcggacttgagttttgaggaaataaaaggtgtgtttgagcaattgccagaggcagttagcttgcttgccttggcacgaacagcagatggtacaagggccaggtattcaagattgtacagaaccttagccagcaaagtgacggccttgaaagagactgttgcagagatggagagaggtggtgttttcaaagatgtacgataaatgctgtgttattgtagagttatttatgatattgatgttgtatatggatgccatttgtcggcatcccttgtaactgtatttgtttttactatgtggaaacctatgttgtaacactattctttggcaagagatgagccttgcctgccccaacccgtaatactatggttgtgcaaggcattaatgtaaattgtagctgcagctgataaatgtctgcagtgctgcaagtctgaactttccaggttatggaactattcaatgtttatttgtattaagcttttaagatgttaaaattgtgctagtttt

SEQ ID NO: 17756 - DNA, 2333 bp, Zea Mays
cccacccccacccaccgcctcccggcagcgtagttactcccctccctcgccatcaatcctcctccccctgttcgctgtgcagtgctcagtgcatgccactcccgtttctccctccaccaccattcaccaccaccagtgccactgccactgccacacacccacaccgaattacgcggcggccctgcgcgcaggatgctctttgcctgcctgcctgcctgctactgctcatctctgcccatatagcgcgcggctagcagcttccggatggacgcgtgcgatgtagcagtggccagctactcggcagcagcgctcgctctctagacgcttgggcttggcacgccgtcgccgagatcatccatggccggcgcaggccaggaagaagaaaaggtggagcacgagggagaagaaatggtggccggccggcagcaaggatcgtcgcgcggcgccgtggagcaatgcggcggccaagcacagcctgccgtcaccgctccatgctcgtccaagacaaaggagctgatagcggagatcgaattgctcgaggaggaaatcgccaaccgcgagcagcacgttcttactctctacaggagcatcttcgaccagtgcatgtctgggccaccgtctgggcagagctctggcatctcgtcccccgcgcacgccaaaactatcaccgctaggacacgaaggcagccgagcataatatcgagtgcattttgctcgtccaagaagctcccgctccagcccttccacatcacagagtcactctccgagtcgggaagaaccaagaacacgctcaaggctaagatcaagcacccatctttttcaagcgaaacattggatagcagccattctacttccttcccaccggacccaaaaaagctaccttattctgggagtggcggctctcttgcccgcactctgaaagaccacctctaccaatgcccaagcaaaatatccgaagaaatggtcagatgcatggcatccatatactatcttctgcgcaccgaggcgccagcaggaaagcctgagaaggcccgctcgccattcttgtcaaggtcatcgacgaatgtcatccttcctcggcgggtgaacggagaggaaaacagcgcaccgaacaacaggtgcacggtggaaatagcttccatatcagttgacaagaaccagatgccagatgtctcttacgcgatcacccactacaggttgcttgtggaacagcttgaaagagttgatctgagcgtgtcggagaacagcgttaagttggccttctggattaacgtttacaattcgcttatcatgcatgcgtatctggcatatgggattccaaacagctctctgaaaagaatggcgctatttcacaaggctgcctacaatattggagggcatgccattaccgccaatgctatcgagcacgccttgctgtgcttcaggtctccacggatcggtcgttggttcgagtccatcctctcgacggctatgcggaagaaatgcccggacgagaagcagctggtccagctcaagttcggcctgcaggagtgccagcctctggccctcttcgccctgtgcaccggcgcttcgtctgaccccatgctgcgggtgtacacggcgaagaacgtgatggaggagctggagcgcgccaagcgagagttcctgcaggcgacggtggtggtgcgcaagtccacgaagaagctgttcctgccgcgcctggtggagcggtacgcgagggaggcgtgcgttggccccgacagcgtcctcccgtgggcgcagcgcgagggggccgtcgccgtcgtcgacgaccggccgcagcaggaggccgcccagcggggcgtggggagccggcgcaaggccgtgcaggccgtagagtggctgccgtacgccaccagattccgctatgccttcgccaggagcatggtcgacaagccacactgctagctgcttcgcctcgcacagtcgcactcctcgcatcgcagctgttgccgtctggccccgtttccgctggagaaagacatctgatcgctgtggcgcagccattctgatggctagatgtaaatgtctcgttgatgctgcgatgttgacggctagatagtactgctccgttccgtagtgaacaagtggcaaggatgggacgaagggtttgactaattttgcacaaggtgtacagaagctagttgatcgctattatttcaggtttcagcagcagtctgttggagaccatttgaattcattcgaattgtttatctacttggtcgtttgtatttccattggtgtgagcaacttgtccgatttgggacagcttcagctctagaaaatttggttggtgaagttggtggatagagcag

SEQ ID NO: 17757 - DNA, 1101 bp, Zea Mays
agtcacagagcaaacacagctgagccgatctcttgaaaaggagaggcagagagcatctgaaagtagacaggagtacctagcaattaaagaggaggcagcaatgcaagaagggcgggctaagcagctcgaagaagagataaaggatcttagagttaagcacaaggaggagctgcaagaagcagcagaacacagggaacttcttgagaaggaccttgaaagggaaaaggctgccagggcagaaattgagaaaacatcttcccgtgaagcgcctaaagtcccacttcccgatcagacaagaaatgcccctctcagaaagctgcctagttctggcagtataaatagtctagaagaaagccatttccttcaggcttcgttggatttatctgacaatgcttcattagagaggcgaatgtcttcagaaagtaatatgtcatattatctgaggaccatgactccaagtgcttttgagtcagcacttcgtcaaaaggatggagagcttgcttcttacatgtctcgcttggcctcattggaatctattcggaattcactggcagaggagttggtgaaactgacagaacaatgtgaaaagttacggactgaagccgctgctgtgcctggcttaagggctgaattggaagctctgaaacaaaggcacttccaagctctagagttaatgggggaacgtgatgaagagttggaggagctaagaaatgatattgttgacctaaaagagatgtacagggagcaggtggatcttcttgttagccagctccaggcattgggtgctcgtgtatagtgccggtatggatttgtcgtgccatcgggcaaggcaagacaggtctgagacttgagcatgttttcctttttattttgtaaccgtacaacggcactgaaaatattcgtctgtacacatcaaaaacaccttcggcgttgggtttaggaggatacgttgttgtatactagatcaagtagtttcacagttttacgtgcattcttttttatctgtgttcattgaaatgtatcaaatttgaatccatttgcatgtgtacctcagaggaatgcaatcaatcaataatatcgagagctctttttatgtcctaa

SEQ ID NO: 17758 - DNA, 547 bp, Zea Mays
gcccgacttcagtcgcccagcgacgctagggtttcactctcctcagtcgcagcggttcccactctcgtctccagaagaagcgccgcgatgggttccccgccgctgacgccgtaccgccgatgggccactccactgcactccagcagaagcttgaggccaccacacagttcaggaagctgcgctccataggtgagagcgaagtcccccaattgaagaggtgatcagcacaggagtcgtgccccgattctacgggcatgtgatgattttatatttaactgttgcctttacttgcctatgatgatatgttttataatgatgatcaatcaagggagtatgacttgtagcagtcttttcagtgaatcaaggatgagtttctgtttaatgcgtacagtgagaatacattaacaattactagcagtcattcatagtcagtcaacataggccatctgctgctagtacctcttttcttctcatgagttgtagcaatttctgtttaattcatatgaatgtaattacaattatattttaagttgctactatagtttct

SEQ ID NO: 17759 - DNA, 727 bp, Zea Mays
gcttgttggaacttggaagatgcaagaaaaggaagtccatgactacctgaaaagcctttgccctgatctccatattaccagaggtgaacatgatgaggatgctcgatacccagagactaagacacttacaattggtcagtttaagcttgggctgtgccatggccatcagcggcagctggacgtggacatcctggtgaccgggcacacgcaccagttcaaggcatataagcacgagggaggcgtggtgatcaaccctggctctgccacgggcgcctacagcagcatcacttacgacgtgaacccaagctttgtgctgatggacatcgacgggctccgtgtggtggtgtacgtctacgagctgattgacggcgaggtgaaggtggacaaaatcgacttcaagaagactgcgacgatgcacggctagccctatccttccactccgtgattgagtgcaagacatgtctagcttctgtttcttttctttcagcttcttgattcagagcctcctgaacacgctttctacctgttcatgcgcaaagaactttttaggtctggttgttaacaatgtttctcggagccatgaatttaaatactatactttttaattgtcatgataataacataactttggctagcttaaaacaccggctattgtttagataaagtattgtaaatgatgacatttgggcataagttaatcatactatgaaaaatttgggttggagtg

SEQ ID NO: 17760 - DNA, 2332 bp, Zea Mays
cttgcacaccagcagcaacaaaccacgcaacggctagtacggaagaagaggggcgagcggcgagcagcgccgttccgtcttcgccgtctcctcgtccgttcgccaagacaacggtcatattaccgttgtcctgccaaaattccaacactttaaaactgccacccaacgcgctcctccgccgccgtctccagcacacgcttccccttccctcccgctcccattcacgtcgtctctttcctcgagcctccgcttcgccagcgacgcgcccttctcacccacctcgccgaggaagtattcaccgatggagacgccgctgtcttccaggaggatcacccgctcgctcgccgccgcatctgcccagcgccgccgccgggccggactccgccgccctcttctcccgcgccaagaacgccgccgctggggagacccagcctcgcgccgccctgcacgacatcaccaacgactcccccatcgtcgggctcgcggcgggcgccctccacgccaccgataccacccccgcctccaccgccgccaagacccgccgcagggccccgcgtcgcacgcccggctccggggaggcgctcctgcgcggccaggtcaaggcgctcctccacaaggtcgaagaggagcagggctgcgccgccgcggccatcgtcaggcccgcgcgcatccaggcgctgctcggtgtatccaggtcgccggcccagcttcttgcgccgacgccagccaacacgccgcagatcgagcccgtccccactcccagggaaggtctcctcctgcttgatggcgctacggtcgtgccctgcgtcctagacgaagaggaactgctgattcctaagcttcaggtaatgtaactgtcgattctgcacttattgaaccccccttgtatgaaatcttccaacttcccgaggagcaatactctgcaactcggcatgtgcatggtaggtagaacttgatccaatgtttctgttccaatttcagtcagggaacgcatatagtcaaccttatgccgaagtacctaccatttgtccaattcatctagtatcttcattcgttaaccttatttgtgcacgtccatgagattagatgcaattctgcatgacctgttgtatgtaggggtggtaatgggttcctatttttccctgaactaaaattaattaaggcgagtaactgtaagcagtataatcttgatatatgatgaattttctgaatgttttcatgttgcactgttagcccctactcaaatgtcaatggcatcccagctctttcagaactgcaaattagatttctactcgtatcatctaacctggaattcagcctagatgttttagaggcgtagcactttgtcgtaaggtgtcttcctgctgctccccttattgtgcaggtcattgcagcttccctacctccacctcatcaggcagaggagaagctcggggactgccagctgaaccgtgcgctggtgttcgatgactcccctgagaaatgtgaagagtccagtggatcagccgtctcgtcaaccttctccctccaggagagcagcaccggcagctacgtggacaagtcatcatcacctgaggacgacagctcctctgcctggtccattcaggtccatgccagctctgagaagggcgacgaagaagagctgggcgtggaggagctggcagcagagtacactgacgaagaggaggaggaggaggaggaggactgggacgaagacagcgatgacgactgctacgatgatctgtgcgaggagatgagcaggatgaccgtgttggaggaggaggagaagaagaagaccgtgctgccgcagttcgaggggaagcacaccaggttcatctacaacagtgacgacgagatcgagcgggtggaggaggcggatgcagctgaggcgacggcggagcttcgcgcattgatgctcaggggcctgctggtgccggaggggaggcacctgcgcttccacgacgaggatgccgacgaataagaatctcagttgtgttgtcaagtggttggttgtctttcgctgacaccagccaaaattcttttgcggggctctgagtccagttctgtacgttgattcatgtctccgttcttaagagaaataatccaacttttctgaaaatcaaaaattttgtggcattcgattacatggcaagtcttttatgtgctgtgtgctatgtgggaactctcatgtttctgattttttttgtaccttcaaattttcttctagcgccaaacgatttctacaaccctaaacctctgggactcaggaatgttgacgatttttttgattttttttattttgcggaacgacctggcctactgagggtcgaca

SEQ ID NO: 17761 - DNA, 1091 bp, Zea Mays
cttaccatatgctgctgagagagaatgatgcaagtaacaggtgctggaaaacacagggcagagtgagtacatctgacgtgtttggtgtcaaagactctgatttggtccctggaaaatatgaaggtgggttgaagctgtgggaaggttcattagacttggtgaaagccctgaattctgatatcaaagaagataaatttcatctggaaggcaaacgcgtattggagcttggatgtggacatggcctccctggcatttttgcgggtctcaagggtgctgacctgattcatttccaagatttcaatgccgaggtgcttaggtgcttgactataccaaatgtaaaagtcaatcttttcaaggattcaccagaaggaacatgtacatgtccgattgttggtttctttgctggtgattggagtgaaatggataagctactactttgcggggatgctgagcaagacaaaacagccagtggtgatacagaagtgcttgcgctaccctgggggtgtggtttacatggcagggaagaagcattactttggagtaggtggtggcacaaggcagtttctgcgcttggttgaaaaagacggtgccatgcatcctgagcggctcaatgatgttgctgatggatcatccaatgttagggaggtttggaaattctcattcaaatagattagcactgcccctgcgattgtcgggagaactggaaacatgtactggactccatattgggtgagagggaggtcttataggacttcctggttctgttaatctacctgtgactgtttcaaaaagctgatctttctcttttggagcactgctttgctcttgtagactaaaaaaaatcgcttttacctctggtttctgtttgttaaacttgtttagcctttcatatgaaacgatgaattctccatgatattatcacacttgctctcaaattaccctccaaagatagcatctcctatgtagattaaaagcgtcactttccaccgagcatcatgacgaagattcctgatagttccaatggcagacacatctgattgagtcacacctgacaagtcaaaaaaaggcgcaaggacaaaattctatcccag

SEQ ID NO: 17762 - DNA, 1262 bp, Zea Mays
ccgccgtgatggcgcgtctcttcttcctcctcctcctctttccgctcctctactcctccgtcaccggcctcaaccgcagcgacttcccgccgtccttcctcttcggcgccagcacgtcgtcttaccaggtcgaaggcgcatacctagacgacagcaagggcctaagcaattgggatgtcttctcccatgttccaggaaatattgacgatggaagcaatggcgacgtagctgctgaccattatcatcgatacaaggacgacatagaaatgatgcattcgattggtctcagctcctacagattctcattgtcgtggtcgagaattcttccaaagggtcgcttcggaggtgttaatcaggcaggcgttaaattctacaatagcctcatcaacggactgctagaaaaagggatacaaccatttgtgacgatcaaccactatgacatacctgaagaactccaagaaagatacaattcttggttgaacccagagattcaggaggacttcacctacttcgttgagctttgcttcaagatgtttggtgaccgagtaaagcactgggtcacattcaatgagccaaatcttattgtaaagcttgcatactccattggggcatttccacccaaccgttgttccgagccatatgggaaatgtgattcagggaattcatcaactgagccctacattgcagcgcataacatgatattagctcatgcaaagacggtcaacatctacagaaagaattacaagtccaagcaaggtggctttgtaggaatttcattacatctaagatggtatgaaccactaaggaatatcacagaggaccacttggcagtaagccgagctctgtctttcgatgctccatggatcttggatcccttgttctttggtgactatcctcaccagatgcgccaaatcttaggtccaaacttgccaaaatttacagaaggagagaagaaactactgaagaaccaaattgacttcatcgggaacgaaatgggatacccattggaaaaccgacacctgttgcaaacacctatgtcgttccaagctccatggagaagttggtcatgtatttaaagcagagatataaaagcatacctttgtacatcacagagaacggttatgcccaaatagccaatattagcactacagcagaagaaataattaatgatattgaaagatcaacttacattcgtgactacctcacttacttgagctttgcaataaggaaaggagcagatgtgagaggttattttgtgtggt

SEQ ID NO: 17763 - DNA, 151 bp, Zea Mays
ccagtgcgacttgctgccgcctccgcgatgaagttgtgggtggactcggtgtctgagagggctgtgaaggtcgccgcgcccacagtcacacgcacctgcatcgtgtcacaaatcggcataccagcaacgacccggagtgagaacactggcg

SEQ ID NO: 17764 - DNA, 1914 bp, Zea Mays
atggccgcctcttccattcctccttgccaggttcaggagcaagatgacgaggtggtggacaggaacatcctcccctactgcagcatcgacaggaagcagaagaagacgctgggagagatggagcaggagttcctgcaagccctccagaaggccatcatgtccaacgaggagttcgacaacctcaaggaggagctcatgtgggaggggagcagcgtcgtcatgctaaacgaagatgagcaaaagcttttggaagcttccttggcctatacctccggcaacccaatcatgtctgatgctgagttcgacgaactgaaacttagattaaagacagacggcagtgtcattgtgaaggagggtcccaggtgcagcctaaggactcataaggtgtacagtgacttgaatgttgactacctaaagatgttcctcctaaatgttccagccaccaccgtagctctgggactgttctttttcattgatgaattgactggttttgagatcaatgtgttccagctgccagagcctttcggattcattttcacatggtttgctgctttgcccctaatattgttcttagcgcagtcattgactaaggctatagtccaggattttttaatccttaaggggccatgtcctaattgtggtactgaaaacctttccttctttgggactatactgtcagtctccagtggcggtacaacaaacaaagtgaaatgtgcaaattgcagtaccgagctggaatatgactcaaaatctcgggtgatcacacttccagaagcatcaaatgcataaacataggtgactctacatttacgccagtaactataaatggatgctctttggtctatattccaaatgtgggagacatcacaccagctttgaagtattgcccgtctccattgtgaacactctgcagcatatgtagcagataaatgagtgaaactatttgtactgcctgctctgcaaattagtatgaacacccctcaaaaagatttggcccacactctggtctctctgtttgcagctgggaacagggagctccagagcttgtgaattctatagaataaaggtggttgtccgcacagtatagcaaactgcgaagcctgcaactactagagtttggtctgtagcaggctcagttgggaatgtgtagcagagcatgatccatggtgtggatgaattgcagagtactgtgctgtgtgtgtaggaaggaaaagctgccgcctgccgattgtgcagtcagtctagtacgttggtatgcgaccatctcaagtctgggctttgattttaagcaatgatttttggcaatgaatgaacaagctatctactgtacactgtttttgtacagttatgtttgcaaggcccaagtctactgaacggccacggccaggctgactgatgacctgaagcccggcccacggcccacggcccacagcccaactggttgcacatactgcgagagaatttctctcaaccaagcgtctgcatcttccttctctagcttgtgtcatggagtatatgcatatgcatccctgacctctttcatgcatgcatgtttaaatgactttgttcctcaagcaacctgcaagcagaattaataccattccaaatcgatcgatgagcagaatcagaattagcgagcattttgcattgctccaccaaacaaaaaaattcggccacctcaatgcactagtaggaaacggagttagtcctgattgagaacccgaactacggattcaggactaaagagcactttagaggctttttttattttttgcacaagtttctctccacccttgtgattcctgggactcaaactcatgagcattgtcttgtatatgggattagatgatgctctggaccgatctattagatctactggactttcaatttattttggtctaaagttaagtaata

SEQ ID NO: 17765 - DNA, 590 bp, Zea Mays
cctgggttcacagtttctctgcaaaaaatgcagggcaccactcgaagaacaagaagtgctacgtctgcaacaaaccgacgctgggcatcttcaacgctgcacaggagatccgcaagaagatggcacaggacaagaagcagcagcagcaggagtaggagagctcaaaacacaccgttgctaatttagctgtgttgtacaacgatgattggtgcgataactagagtccggtatttttcgccatcagataaaagagaccaagttttgaacgatcacaatgaatgcattcagatccagtcactagatccctacccccagacaggccatggtgcctgttggttcctggcgatgggcaaagctccaaaggtacagtgctagactgccaatgtgtttgtttgttgcagggcacccgaagctcttatctttgatacagtagtagcaatcgtgtcgtgcagtctgactttgagaattcccgctaggctttcgagcgtgctggccttggtgcctctgctcacgcctttccccgtcttgtttgtgctcctcaagtgcctttattatcagtcaaggtgttaccaacacttgttatattatag

SEQ ID NO: 17766 - DNA, 3391 bp, Zea Mays
tgtaactccccctctcacagtactagagggcccacccctacccctgcccccaaatcgccaaatcctccccaccaccgcacgctggtcctgcccgtctcccgcccccgccggccgccggcgactggccgccgccatgggctccgaccgcgccgagctcgcgcgcctctgcagcgcccgcaactggtccaaggccatccgcctcctcgactccatcctggcccgatccccctcctccatccacgacctctgcaaccgggccttctgctactcccagctcgagctccacaagcacgtcgtcaaggattgcgaccgcgcactgctgctcgaccccgccctgctgcaggcctacatcctcaaaggcaaggcactgtcttcattagataaaaaagaggatgctctagctgcttggaagcaaggatatgaaattgctgtccgtgacacaacagacttgaaacaattgcttgatctggaagaattggtttcttctgttaaaatttgcgggacaacccagtctgcggaccatgtcatggatgcatcaacttgtgataccaaagttgttatctcagaagatcgtgttgctgacacgtcgttcgctgcaactacaatggctgatacaaaaactgttgtctgtgaagaggccattggcagttccaaagtttcatcaaatggtgataccaagttgacgaattataataaaaaagcggaccataataaagtctctagcagttcagtgaaagacatcacagggactcaagctcccaagaaggcaccgaagctagataagaaaaacaaagcaaaagctgtgaaagaaataaatggccgagctgaaggtgtaactggcagagctagtactgatgaaagtgaaactatttcactggatcaagcactctttgctacaaaaatttcaaagtcatcaaaatctataagcttggatttccgactttcaagaggcattgcacaggtaaatgaaggaagatatgaccaggcgatatccatttttgatcagatattgcgggaaactcctacgtatcctgaagcactgattggaaggggcacagcttatgcatttcaaagagaattggattctgctatttctgatttcaccaaggctatacaatctagcccatcggctggggaggcatggaagcgacggggacaagctcgtgctgctttaggagagttcaaggaggccattgaagacttgactaaagcattggaatttgaaccaaattctcctgatattttacatgaaagaggaattgtgaacttcaaattcaaggactacaactctgcactcgaagatctttcgacatgtgtgaagcatgacaagaagaacagctccgctcacacttatttaggtcttactctttcagcacttggagagtacaagcgtgctgaagatgagcatgtcattggtttaaagtatgacgagagtttccttgactgttgggctcaccttgcccagctttatcttgatttggcatatccagagaagttgttgaattgccttgagaaagctattcaaattgattcaaggttcgcaaaagcttaccatctgcgtggaattctctaccatggaatgggtcgacataggagtgctattaaagaattatcggttgctttgacatatgaaagttcaagtatagagtgcctatacttacgtgcctcaagccatcatgcaattggagaatataaagctgcgataaaaggttatgatgatgtacttgatttggaacttgattccatggataaatttgtgttgcaatgtttgtccttctaccagaaggaaatggctctgtatattgcttcaaaggccaatttagagttctctcagttcaacattgatgatgatgttgacccactatttaaggaatactggtgcaaacgactacatcccaaaaatgtggctgaaaaggtttatcgccagccaccgttgcggatctcattgagaagtgggcgccttaacaagcaagacttcaaattcacaaagcatcaaacaactcttcttctagctgcagattcaattgggaagaagattcaatacaattgtcatggcttcttaccaaatcaacgtcagtaccgcatggccgggttggctgctattgagattgctcagaaagtgtccaaggcttggcgctttctaaggaatccgaagaacatcgcaaagttagttaggaaaagggataaacttaacatgagccagaacaggggaggttattgtagcactagcactttggctggatctccaacttccagcccaaatgaagacagggtctcctccgggatctctctttcctggcaggatgtctataacattgctgttaagtggagacaaatttctgaaccttgtgatccagttgtttgggtcaataagctaagtgaagagttcaattctggatttggttctcataccccaatgcttcttggtcaagcaaaagttattcgctactatccatattaccaaagagtcttggaaactgcgaagactataatgcttgacttgaagtatgtcaataatgcagaggaccgtgcaatttttcttacagatattgacaagttgaaaaagatagaaattgcatcgtcatgctcagatttgtaccatgtagttggtgagacctactgggttgctacaagatgtgatagtatggcgtttcgggggaggcgccttgaagggacaagaattaccactcaaaacataggcaagacaggatttgactttgcaattcgaacaccttgcacgccatcgagatgggaggagtatgatgaagaaatgactgcagcctgggaggctatttgtgaggcatattgtaatgacacaaaccccacacgagaccctggtgtgcttgatgctgtgaaggacgcgatattgcggatgacatattactggtacaattttatgcctctttcgagaggctcggctgttgttggctacgtagtgttgctcggtttattcctggcagcaaacatggatattactgccagcattccacccggtgtccaagttgattgggaggcgatcctgtctccagatcccggcacatttgttgacgccgtgaagccctggttgtacccatccacaaaaataagcaggtgcctgaaagattacacggacgtcagctgcgcgttcagcacgacaggttcggttgtagcggccctaacatctgttgacccataggttatttgtccaagtgttataggttgctccagttgttagtgtatttgtttcaaaatacctcagctttgcttagcttgtcagaatttctcagtttgcaaaaagtttgtatgtttctgtgttgtatacagatatgcagtaatgttgtaacttgaaaaaaaataagatttattttcattggaacaagttttttttttttttttaatttaaaccaaatat

SEQ ID NO: 17767 - DNA, 4370 bp, Zea Mays
gcgctgcgccaccaatcgccatcgcctcgttgcccagtctccgcgccgccgcctcctccgctccctccctccctcccctcttctagggtttccatcccatgcgatctcgcggccttggtgttccgggacagtagggacgcctcctctccgttcgaatcaagggagtcagcgacccaatgggtaagggcgggcaggacgaaggcaaccgccggcgggacggatccgccgcctcggggccggaccgccccgcgccggtcttcccggcgtgggcgcgcaccccgagcgagtgcctcgcggagctgggcgtctcggcggaccgcggcctcagctccgaggaggcggcggcgcggctgcagcgacacgggcccaacgagctcgagcggcacgcgccgccgtcggtctggaagctcgtcctcgagcagtttaacgacacgctcgtgcgcatcctgctcctggcggccgtcgtctccttcgtgctcgcgctctacgacggcgcagagggcggcgaggtggggctcaccgccttcgtcgagccgctcgtcatcttccttatcctcatcgtcaacgccgtcgtcggcgtctggcaggagagcaacgccgagaaggcgctcgaggctctcaaggagattcagtcggagcacgcaaccgtcaggcgtgatgggcgctggtcgcatggcctccccgcgcgcgacctcgtccccggggacatcgttgagctccgggtcggggacaaggttcccgcggacatgcgcgtgctccagctcatcagctccaccctccgcgtcgagcaggggtctctcaccggcgagaccgcctctgttaacaagaccagccacaagatcgagctggaggacactgacatccagggaaaggagtgcatggtttttgccggtaccactgttgtcaacggcagtgctgtctgtgttgtgacgggcactggcatggctaccgaaattggcaagatccatgcgcagatccaggaggcatctcaggaggaggacgacacgccactgaagaagaagctcaatgagtttggtgaggcgctaactgccataatcggggtgatctgtgccttggtctggctcatcaacttgaagtatttcctttcctgggagtatgtggacgggtggcctacgaatttcaagttctcatttgagaagtgcacgtattactttgagattgcggtggcactggccgttgcagcaattccagagggtttgcctgctgtgatcaccacgtgcttggcactcggtacaaggaagatggcacagaagaatgcccttgtgaggaagctgccgagtgtggagacattgggttgtacaactgtgatttgctctgataagaccggaactttgaccacgaaccagatgtcagcagtgaagcttgtagcaattgggaggtggcctgatacacttaggagctttaaggttgatggaaccacttatgatccgactgatgggaagatacacgattggccaagcttgagcatggatgaaaatctccagatgatcggaaagatagctgcggtttgcaatgatgcaagcattgcccactctgagcatcagtacgttgctactgggatgcccacagaagctgctctgaaggttttggttgagaaaatggggcttcctggtggttatactccatctcttgattcatctgatttgctaaggtgttgtcagtggtggaataatgctgccaagagagtagcaactctggaatttgatcgcaccagaaagtcaatgggagttattgtgaaagcaaactctgggaagaacttgctgcttgttaagggagcagtagaaaatctgctagagagatgtacccacattcagttgctcgatggatctgttgtgctattggatgatggtgccaaggcgctcatattatctacactccgtgacatgtctgccagtgctttgcgctgcttgggttttgcttacaaggatgaattgtcagaatttgcaacatatgatggtgaagaacatgcagctcacaagtatctgcttgatccttcatattactcatccatagagagtaatatgatcttttgtggttttgttggtctaagggatcctccacgagaagaagtccacaaagcaattgaagattgcagagctgctgggatacgtgttatggtgataacaggagataacaaggaaacagcagaggccatttgtcgtgagattggggtttttggccctcatgaagatatcagttcaaaaagcttcacagggaaggaattcatgggtctttctgataaaaaggagctcttaagacaacagggtggccttctcttctccagggcagagccaaaacacaagcaggagatagttagactgctcaaagaagatggtgaagtggttgcaatgactggtgatggggtgaatgatgcaccagctcttaaactggctgatattggagttgcaatgggcattactggaactgaggttgccaaagaagcttcagatatggtacttgcagatgataactttagtactatagtcgcagcagttggtgaagggagatctatttacaacaacatgaaggcttttattagatatatgatctcctcaaacatcggagaggtcgcgtccatattcctgacatcggctttgggtattccagaaggtctcatcccagtgcaactcctatgggtcaatctagttacagatggccctccagcgactgctttggggttcaacccgccagataaagatatcatgaagaaacctcctcgaagaagtgatgactcgttgatcactccttggatcctgtttcgctatatggttattggcctttatgttggggttgcaacagtgggaatcttcatcatctggtacacgcatgacagtttcctgggaattgacctggctagtgatggtcatacacttgtatcgtactcccagctctcaaactgggacaagtgctcctcatgggagggcttcaaggtgtcaccattcaccgcaggagcgaggacattcagcttcgatgcaaatccatgcgattacttccagggtggcaagattaaagcaacgaccctctccctgtcagtcttggtggccattgagatgttcaactcactgaatgccctgtcagaggacggcagccttgtgagcatgccaccatgggttaatccgtggcttcttctggccatgtcggtttctttcgggctgcatttcttgatcctctacgtgcctttcctcgctcaagtgtttgggatcgtgcccctcagtttgaacgaatggctcttggtggtggcagtggccttccccgttgtgctgatcgacgaggttctcaaatttgtggggcggtgcctgacagcgcgtgcccggaaacaatcagggaagaggaaggcagagtagatgctagtgatcatcggtatttagaatctgtagtgccacggggaatcgatattcaatgtgacacccccattgtttttgagctgctaagggctctcgatcctttcagagtgttttaggttgggaatatgaccgtgcatgacaggctaggatactctatagaattggtaagcatatcgcgttgaacaacactgccttttgtttttcgttgtaacaaatgctggtactgtgaacatgctggagatacaacaatggttacctgacgtttttttctctcaaaacaaatgaagttagtggtatagaaaaggaattagttgctgagatctctggacttgaggagcaaaggaatcaactcgaggcagaactgaaaaaggtgaatactaaattgaaagttgctacagtgaagcttaaaaaaactagagaggaacgggaccaatttgatgaagcaagcaatcagattgtgttgcacctaaaaacaaaggaagacgaactttcaagatccatagcttcatgcaaagtagaagcaagtactgtcagtgcatggatcaactttttgaaagatacgtggaaattgcagtccttgtttgaagagctaagagaaaaacaggccaacgaagaattggatagatgtggactctgctttgcgaaattgatgaagtatcatgtttctgcatccatggaagagctaagcacttctattgaccgtatcaaaacctttgttgataacttgaaaatatttggtaacagatccgtgtcagcagaggatggagctaatggtccgtctaagcaatcaaaccctcgtagatatcttgaggaagaatatctccaaactgagaaaaaggtcgtagctgcattcagtttggttgatagtatcagagcaatatattcttcaaaccaggattactataaaacgagtttgtgcagaagggatgacactgaggtaaaaaatctgtttacctccattgacaatctgcggatcgagttcgaatccgtgccacgtccagtgct

SEQ ID NO: 17768 - DNA, 2230 bp, Zea Mays
catgatctacatctatatgcgatgactatgctcaggaggacgaggaatacgaggagaagctgaagaaggaaactgtggtgctgtttttcctagcaacatatggggatggggagccaactgataatgcagcacgattctacaaatggtttactgagggaaaagagaaggaagtttggttgaaggatcttaaatatggtatttttggccttggaaacaggcaatacgaacattttaataaggttgcaaaggtggtagatgagctagtagaggagcagggtgggaaacgtcttgttcctgttggccttggagacgatgatcagtgcattgaggatgatttcactgcatggaaagaactagtgtggccagaattagatcaattgctccgcgacgaggatgacacaactggtgcatcgactccatatactgctgctattcctgaatacagagttgttttcattgacaaatctgacctgtcattccaagatagatcatggacactagccaacggtactggtgtgattgatattcaacacccttgcaggtctaatgttgctgttcggaaggagctgcacaaaccagcttcagatcgctcttgtatccatctcgagtttgacatttctggcactggtcttgtgtatgaaaccggagaccatgttggtgtatatgcagaaaattctgttcagactgtggaggaggttgaaaggctacttgacctttctccagacacattcttctccatccatgcagatgcagaagatggatctcctcgtaaaggaggaggttccttggccccacctttcccatctccatgtaccttgcggactgcgcttctacgatatgctgatctactcaatccaccgaagaaggctgctttgcttgctttagcttctcacgcatctgatccagctgaagctgagcgacttagattcttggcttctccttctggaaaggatgagtattctcaatggataactgctagtcagaggagccttcttgaagttatggccgcattcccttcagctaagccaccactgggagtgttttttgcagcaatagctcctcgtctgcaaccacgatactactcaatttcatcatctccaaacaggatggctccctccagaattcatgtaacatgtgcgttagtttatgggccttcaccaacaggaaggatccaccaaggagtttgttcaacatggatgaagaatacaattcctctggaatatagcgaagaatgcagctgggctcccatctttgtgaggcagtcaaatttcaagttacctgctgatccgtccactcctattatcatgattggtcctgggacagggctggctccttttagaggcttcttgcaggttagcattgaaacaatctggggcagaattgggcacttcaatccttttctttggatgcaggaaccgtaatatggactacatatatgaagatgagttgcaaactttccttgaggagggggcgctttctgagctaattgttgcattctctcgggaagggccaacgaaagaatatgtgcagcataagatggtggaaaaggccacagatatttggaacatcatctcaaatggtggttacttatatgtttgcggtgatgccaagggaatggctagagatgtacacaaaatgcttcatacaatagtccaagagcagggatctttggataactccaaaaccgagagctatgtaaagagcctgcagatggaaggaaggtacctccgtgatgtatggtgacacatcacctcaaataagccatagctctagcgtgtggaagtaaagctggctttgcgtgtatgacatgtctaatgccaacccaatcgtcagctttggaatgaagcgtgccattgatgatatactgaaatgagttgatcagtgcaattctttgacatctaactatttattattatatgagatgggaggaactgatggagaataaatgctgctgtagatttgtagaagttcaaaaaaattgggtacccctgacaagtttgtagccaagggggtacatcatacagtttgagatgaggacactatgtatactgtttgagacgaggacattatgtatactactctagaaggctaccgaaaccaaattttgcatctgtttattaaaagcttgtacttttatcatggtatccgtcgttggcaatctacaactttgtacagccgcaatgttgcatcgaaggtgcagcttgcttcggcacccgtagggatgcaagtt

SEQ ID NO: 17769 - DNA, 1506 bp, Zea Mays
gtatcattgggatcaatcattaaaaccttaatgggcagagatagttatattcatgcaggctgttatttggttcatttccaaaatggtttgcatggtggggaattttaaaatgtcttctgtgttgaagcttgtaatgatggaaaatcacgcaacaccagatgacgtgatccatgagatgactgctgcacaggtcctacagaagcaactgtttgatgcacacgaaccaaatttactggatgaaaatgatatgcatatatttggatcaaaaccgatggccgacccattggacttggtctgctgtagtacttgcaagaagccagtcaaagccagccaatatgcaattcatacagggcaatgtagttcagggaaggtaaacacaaatggttcagtgggtgtggatcatgccaatcctacaaagcccctgaagaaaggcagaaaaataaagttgataagtaatggaaatcaaaaagtgcacataaaagtgaaagcaaaatctcaaactgaaagcaataacattgccaatagtttcgagttggacaatggacatgtcactaaagtacaacctatagattccacagggctgggcctgtctgctgatagttcagctactatcaatgtgcctaaaaatcatcccagagatgcgccagttcctcttgcaacaaaaatgtatcattcacagggcaactaccgtcttcgatttgagcttggccagctttatcgcgaatcatgtgtgcagcatttgagtggccacacaactccaaacgtgtcacatgagaatggattgatggcatcatcacggttttcttcttgtggcaactcagcattgcctactcagaagagccttgttcctcaaacaaagcctctcgcagaccctcagcaattagcagcaagcaggcctaaccagtcacaaggaacaaaaactgatagagcaagtgcacaagcatctgcaattaaaaatgaaggttcacgatccagatgcaataaagctaccattccccattcgagaaacaaaggcagcaagaagacgcaacagcaacctaatggacgtgttcatgcgatcaagttcccagtagagtagcccattcgtaggtaatttattggttaagtggaagtgtctcttctggtgaacagtctcttcttttctcctttccaaatgaaattggttattgtcaggattgttctaatttggactgtcccgatccgaggttttggttcgccggccattggtactagaagctaacagcactagttgtagcactgacgatgaacttacctgtaaatatggccacagaggccttggcttcttcctgccgaaggtcgtggacctgatgaacattttgaatgtagccttcatcttttgggcattgagttctagttgattgatgttttgtgtttgattcttgccctaagtttagctttctagccggcgattgaaccgttttacgggctaccgctgccagctgccggtggatgagcccttccgtattcaccttgccggaaagctgt

SEQ ID NO: 17770 - DNA, 880 bp, Zea Mays
tagtgcttgtaattcagctggaaaggggtatgcaagttctataatggaaagtctggatctcttgcaaagcttcaaggtgccgtagtaccttctccgctgaaaaagcttccgaagcaagaaagaccatcccctaggaagcgcaaaggtcttcttccattcagtctcaaatggggcaaaccacagaataaagaggtattccccgaagatgatgcgattggcagccccacaaactgcgtaaggatggctatatcgcctgctgccacaagcagctcaggaagcaacagtggtagcgacgatgaacataaccgctgccagaagccatcttcccgtcgtccgcacagaaggcccagcagtgtcatgggtgtttttgcttctccgcctgcacctcgtccaccccagcagttctcagctgtcatgagatctcaatcaatgcttgatctgcaggatgcgacagattcaactgacctggtcactcccagggacaagcgcataaagaattagcaaaagttgaatagtatcaggaacaagggcatgaagaactaggtagatctgatgtaacctgaaccttggtgtcagcccaaacaccggtgtccattttagacagcgaaacccaatggctgatgtctgcatgcttagcgacaccgaatgaactcgagttcatatagctgggattctccttatacccgatgtaccgagaattgagaaagatacagatgaattaggcaaattggtgtaaggagtcagtggctattgcattggttactatttgacttgtaaatgctggattctgcttctctttgcctaattcaaccatgttgctcgtattgacctttgctttgctcgtcgttctgaattaggcaaaatttgttgtctgtattat

SEQ ID NO: 17771 - DNA, 138 bp, Zea Mays
gaattttctaagaataatgaagatgtagcaagtggctcctctccatgagcaatgtgtcttatgtttgttgagagatgtgagcaaatgagccttgattgtaatagtctatgcgtgctaagtgatctaaatgtgagcaag

SEQ ID NO: 17772 - DNA, 2502 bp, Zea Mays
ggcccagtctctccggagaccggagcgacgagtccgcgagaccgccaccgccacccagcaagccgagcggcgccaattctgcgctgccatcgtcttcctccgtcacacccggctcgcaaaccctagctcgccccggccccacctccggccccgttcgtcggtgctatgtcgaagcggccgaagctcgagggtttcagcatcccgcggcccacctcctacaacttcgagcgctcgcagtccgtgcagcggctctaccgtccgaccgatgacccagacctcgacgacatcgccttctccgacgacgccccctcagatgcccaagccagcaccgcggtagaaggaaaggccgagaatgaggaggagatggacccgctcgacgccttcatggccgagatccaggaggagatccgtgcgccgcccccgccgcccaagcccgaggcgcttcgccgcacggattccgacgatgacgaggatgaccccgtcgagagcttcctgcgggccaagaaggacgctggcctcacgctggccgccgacgtcatgcgcgctggttacgactccgatgaggaggtctacgccgctgccaaggccgtcgacgccggcatgatggaatacgactctgatgacaaccccatagtcatcgacaagaagaaaatagagcccataccagcactcgatcactcgaccattgagtatgacgccttcacaaaagatttctacgaggagaagccatcgatttcaggtatgagtgaccaagaggtaacagattatatgaaaagtttgtcaattcgtgtttctggttttgatgtgccgaggccaataaaaaactttgaggattgtgggtttcatgtacctctaatgaatgctattgccaaacaagcttatgaaaaaccaactacaattcagtgccaggctttacctattgtactttcagggagagatatcattggtattgcaaaaactggctctggtaaaactgcagcttttgtgctccctatgattgttcatattatggatcagcctgagcttgagaaagaagaaggtccaataggagtcatttgtgctccaacaagagaattggcacatcagatatatctcgaagctaagaagtttgcaaagccttacaaccttcgagttgctgctatatatggtggtgtttccaaatttgaccagtttaaagaactgaaagcaggttgtgaaatagtcattgcaactccagggagattaatagacttgctgaagatgaaggcattgaagatgttcagggcaacttatctggttcttgatgaagctgatcgaatgttcgatcttggatttgagccacaaatacgatccattgttggtcaaattagaccagatcgacaaactttacttttttctgcaacaatgccatacaaagtagagcgtttggcaagagaaatattaactgatcctattagagttacagttggtcaagttggcggtgctaatgaagacattaaacaagttgttaatgtactcccttctgatgttgagaaaatgccttggcttttggggaaattgcctggaatgattgatgatggagatgttcttgtatttgcatctaaaaaggctagagtggacgagatagagaaagagttgaatcagagaggattcagaattgctgcgcttcatggcgacaaggatcaagcttctcgtatggagaccctgcagaagttcaaatctgggacatttcatgttctggttgcaactgatgttgctgcacgaggtcttgacatcaaatcgattaaaacagttgtcaactttgatattgcaaaagagatggatatgcatattcaccgaattggaagaactggtcgtgctggcgataaagatggcactgcatatactctgattacacagaaggaggcacattttgctggtgaactggttcacagtttgattgctgctggccaggatgtacccaatgaactcatggatctggctatgaaggatggaagattcagagcaaaacgagactccaggaaaggtgggaagaaaggtggcaaaggaaaaggtggtgttggcggtgctgggcgcgggcgcggtgtgcgtggagttgattttggcctcggcataggttacaatgccgaatctggttcacaagtgcctgctgcaagatctgctgctgtaaattctctgaagacagggatgttgcaacgatttaagagcagctttgtctctggatcttcaaatacaccaagcagcagtgcaccttcctttgtaagaccagcactccgtggctttgtgtctggcggcaccattggaggagacacacggcctgcacaggcagcccccactttcatccctgcatcccggcctgcacagcctgcccccgcggtccctgcatcccagcctgcaggaaataacaacgaaaatgggaacccgaatccagaaagttcacgggatcagttcagggagagaaaacgaccatcaggttgggatcgctagtccctgctaactgaggctaatgtcaggacatttcag

SEQ ID NO: 17773 - DNA, 750 bp, Zea Mays
ctgctgcctgcatacttgctagattttcagcgccaactgggcactcccactgtatagagcagaccccacttttgatatcgttgacctcatccttagcaagaatgaccctgatgtggatactgattcaagcagccaggcgggctttttctgtggctcgcctcctgcacgcactgacaaccctgttatcaatgacccacagtttggaaagaaaacaccatccttttctcctttatttggtggaagctcttccgggaaaatgacagctggaagagtcgaagtaggttctccgtcgtcttgcggggcgagcagcccgaaagtaaggatcgaaggttttgcttgcgggaacaaagagccccctcactgttttgcctgatgatccggatcattgaccctacctaaccctgttttgctacccccgcaacatgtacatttcccctgctagtttctttggttaaaaaacctggtagtttctttgagtcggagtcgagtaagagcgcttgttgttgccccttgtgatgaccgtgggtggcttttggtgcaagggagcagagcacagctctcggatgtaaatagggtggcgtatgtagtgctagatgtttgtatgtgtctgctaaaatgtagtagtaaggttgggtgggtccatgtgtcggcgtctgtaaatagcgtcatgcatttggatgtaaattgaaatgcgtcttcaattattgtcacctgtctctctgctggtgctgggtccaaattgcaaccggt

SEQ ID NO: 17774 - DNA, 3103 bp, Zea Mays
cacgcctcctcttcctcgttgcccctcggccctcatcccctgcatctgctccccctctaggcctctaccgaaccctagccggccagctgagcttattgaaggcaagctaggcgagagcagcgtccgccgccgcgctctcatggcggcgcccaaaccgatctgggtgcgccaggctgaggaggcaaagctcaagtccgaggcggagaccgctgccgccgccaaggccgccttcgacgccaccttcaaggccctcgctgccgcgtctggtgacgactacaacgatgtcgaccccgccccaccctccccagccgagctcacctccaccgactcggacgacgatgctccggccctgccaggcccggtcgacccgtccaagtgctccgccgcggggcctggcatcgctggcggctctgccggaacgccctccactttcaccgtcgtcgccaaggatcgccacagccggaggctcaccgccggtggggcgcgcgtgcacgtgcgtgtctcgcccgctgcgggagtcggcggggacgatctcgaaggcactgtcaaggacaacggggacggatcctacacggtcacctacgtcgtccccaagcgcggcaactacatggcgcgccctccagtgccttccccagcctcctcggggccatgcctagttccaccgctgggtcctcgggcggagtcatcctgccaggggttggtgcttcactgggggagatatgccgggactacatgaacgggaggtgcacaaaggtggagactgactgtaagttcacccatccaccgcaacagctgctgatgtcgttgcttgctgccacgacttctgtcagtgctctcgggcatgcgcccttggcgccctctgcggctgccatggcagctgctcaggccatcatggctgcccaggcactgcaggcacatgctgcacaggccaaagctgcaggtggaacttcaggctcaacaaacaaagctgatgaagctgatgccctgaagagaacagttcaaattagcaacctgagtccacttcttactgtggattatattaaacagctatttggattttgtggtaaagttgttgattgtgtcatgacagatacaaagcagattgtgtatgttgagtactccaaacctgaagaagcaactgcagcattggagctcaatagcaagagtgttggtggtcgtccattgaatgtggagatggctaaagctcttcctcctaaagcaaataataacttgcctatgatgatgcagcaagccgttcagttgcaacagatacaattccagcaggcactaatgatgcaacagtcaatagcagcccaacaggctgctgcacgtgctgccaccatgaaatctgccactgaagcagctgcagcaagggctgctgagataagcaggaagttgaaggcagagggctttggtggggacaacatggaagaaaaggatgccaaagggaagtcaggatcaccatcttcccctactcgtagatcaaaatctcggtcaagatcacctatcaagtaccgtaggagcagacgatcccgctcctactctcccccagttggacgctcaagggagcatcgatcacgatcaccatcaagatctcgccactcaaagcatggtagtgatcgatcacatagggatgataaggatatgtatagcaggtccgggagaagggagagtgaacgatcccgtgatcatcattcatctcgttcaaggaggaacagaagcaaaagtagaagtccaaggcataagaagccctccagagttgactctaggtcacccaagaaacaaagactcgaaagtttaagcccatcaaaatcaaggtcggctcgggctggttcaaggtcaccacgacatcataagggaagcaaatcatcgccaactagtgatcgtcattctcgccatagcaggcattcaaggtccagatctcttgacagaaagcatcatcacagtgataaaaaggacagcagaaagtctgagattcaggacgacagaagatctcatagaggcagcagacgcgacaaagatgaaagttcagtgaaggatgatggggaaagatctcatagaggtagtagacgcgacaaagatgaaagttcagtgaaggatgatggggaaagatctcatagaggtagcagacgcaacaaagatgaaagttcagtgaaggatgatggggaaagatctcatagaggtagcagacgcgacaaagatgaaagttcagtgaaggatgatggggaaagatctcatagaggtagcagacgcggcaaagatgaaagttcagtgaaggatgatggggaaagatctcatagaggtagcagactcgacaaagatgaaagttcagtgaaggatgatggggaaagatctcatagaggtagcagacgcgacaaagatgaaagttcagtgaaggatgatggggaaagatctcatagaggtagcagacgcgacaaagatgaaaattcagtgaaggatgatggggaacgatctcatagaagcagtagaggtgacaacgatggaaggtctgtaaaagatccagtggaagataaaagggtggatagtaatgctgtcgcacataagaggagctctgaagatgaaatcctgaacaacaatagtagtaaccataagaaacatagacatgaagttggtttggaagttgatgaaggaaatgatgtgtgccctgctgtagcagaccctaatgggaaacatgaaactggaggcatgaagatcttcggagaactcgagtgctgttcggagcgctcatctgatatattaaaatgcttatgattccatgaagagttgttggagcacatttctgggatgtcggttgaagatacaaggaagtacacactcaagtaaagtccatatacaagactataaacaactcatattctaggctcttgcatttgaactggaatgctttggctagtaaaattgtccaaatatgcttgtccgccttctgacgcactttgtttgttagaagtcctgtttttgtatcttgtatcaggaatggttcaaaaagtttgacctgatataccatacttgtacactgtcttttgacagtcacatggaattgtgaattgtgatgtaagttttatatatcttgtcttctgcttaa

SEQ ID NO: 17775 - DNA, 2415 bp, Zea Mays
tggcccatgagctccaggcatctagtcgcaacttttttcctttttttccctttaaacctttcctttttcttttttaagaaaagacaaaattggaatcctcgtgtcgccgttcagccgttgggctttggccactcagccagcgctcaccaactcaccgagtgtccgagtcgttggcttggcttggcttggctccgcccgttggcatcgtctactcgccgaaaacctcgccgagtccctgccctccctgggcggtgggcgcggaaacccttcgtctgttcgctaaaccttggcggccggatctcccaccttcagaatccatctggtctcctctataaaagcgctgggaggatctgccgactttgccgtccataggcggcgtctctccggtgtcctgcgtctgcgccgcacacatcccccactcttcttccagtgaaacagttcaggcaaaaactctcctggaattgattgttgaggcatcacagattgcatttgccagtgcaagcaaatttcagagataaggatggcagcacaactacttttctccaatgcttccagttgccactgcccattaggcatttcaaggataaacgttgggaagacacttcttggtgaaagtgcaagttttcagagaaagaagtcgttttctggtggttcctatcgcttttctcgatttgattgctctgcgaactcccgccgagctgggccaaggcgcaccaaggatactttatatgaccttcaccctgagatctccttgctttatggagaagataatggtgcagctaccttatccagcaaagagcagggtattgacactacagctgaaagattggtggacacttctccctcttaccgctataatgagcccaggattaaagtcataggggttggaggtggtggctccaatgctgtgaacaggatgattgaaagctccatgaagggtgtggaattctggattgtgaacactgattttcaggctatgcggatgtcacccattgaaccagaaaataggttacagattggccaagaattgacacgtggtcttggtgctggtgggaacccagaaattggcatgaatgcagccaaggaaagccaggagttggtagaacaggcagttgctggtgccgatatggtttttgtgacggctggaatgggaggtgggacaggcactggtggagcacctattattgcagggattgcaaagtccatgggtatattgactgttggaattgtcacaaccccattttcatttgagggaagaaggcgggctcttcaggcacaagaaggaattgcatcgttgagaagcaatgttgatacactgattgtaattccaaatgacaagttactgactgctgtgtccccaaatactcctgtgacagaagcattcaatttagcagatgatattcttcggcaaggtgttcgtgggatatcagatataatcactgtgccaggtctggtgaatgtggactttgctgatgttcgatcagttatgtcagatgctggctcatcattaatgggcattggaacagcaacaggcaagacacgagcaagagatgccgcactcaatgccatacagtctcctctacttgatattggtattgaaagagcaactggaattgtatggaatatcactggagggaatgatctaaccttgacagaggtgaatgctgcagctgaagtaatctatgatcttgttgaccctggtgcaaatctgatttttggctctgttatagatccgtcatacactggtcaagtgagcataactctaattgcaactggtttcaaacgccaggaggaaagtgagagccggtcttcacaggctggagaagacagcaaccgcggtcgctcgggctggttttctcccacttcccaggaggaaggtcatgcattgcagatcccggagttcctacagaggaaagggcgtccagggtttccacgagtctgaacacactttggttcaatgtttttcttgtcatagtttggtacgatgtaggtttggtttctgggtctcttagttagcaaggtagagcagatgttcctgaaccgcatactaatctgtgtgcaaacttcgtcgcctgagtacattggctgggctgctttgcttctcaggaacctgcagtaggtctcaatttgctagttattatgattaaaagacatcgctgagaccaaattataacgttccgtgtgaagaattactggctcactgccaatttcctttcctttgcggcatacattgtttcattagtcgttattttggtttcgttcaatgttatgacaccaaaataggattataagggttagtttggaaaccattttctcaataaatttctatttttcgagggaaattagttcattttcctttgaaaaataggaactacttgaaaaaatggagtttccaaactagctcttagatggatc

SEQ ID NO: 17776 - DNA, 299 bp, Zea Mays
gtaaaaaaaaaaaaattggggtcctccgcctcccgcaatgcctcccccttccgcctccgcctcccgcttggcgacccactggatagctgacgccctcgccgacgacgagtccctcgacttctccgtgctgaaggcttggaagttttggagaattggaggatttgctttccacctttcagtcaagacatccaggaaaatatatgtacaaagaaatttacactaccagaaacttctttccagttggcacccccgaatcccctgcgtccagcacctcatccaaccatcccggtaatggttat

SEQ ID NO: 17777 - DNA, 3139 bp, Zea Mays
actcaacacaagcgcccccctcgtcgcagtcccgccgttacatggcccgctctgttcccctttccggcgcccgcgacggactgcgacgagcggatagatagatctgtgccccgtccctgtctcgccatcctcctttctcctcctccactccctatcgactatcgagcagagcgaatccttagcggggaagtctttccgagctcagggagtggggtttaaaacgcggctcgacgaaaggaaggccgcactcgctgctgctgctggtcgcttgctttcggtggcgagcgtctcggtaaagcggcgtcggcgtcggaggcggcggcagagactggacttgcttgctccttgctgcgcagtgtagtgctgtgctaccttggagacaggatcctgccgcagggactcataattgatcagtgtgccccaacataagagcgaaacgtgactgagtttgccagctcccccttcatccactgtggtcgctcgtctgctaatgcccgcatcggaggattgctcacggatatgcttctggtgatgggcaacccggggcgctcgcggcagttgtcagcgctggttgcttccgccgccatcttgctgtcactgtccgcgttgccaatttgtcggccctacacctacgagcaagatgtgtttgcgataaacggcttgtacacggcacttggagcaccacagctgcctaattggacttcaaatggtggtgacccctgcaatgaaggctggcaaggtgtttcatgtgtagcgtcaaatataacctccataattctcagcggtgcaaatttaggtggacagctgggcaacactttggggaattttacatcattaatcacctttttcctttcagctaaccaactaagtggtagccttccaagtacattgtcatcccttacacttttgacaagcatgtcactcaatagcaatcatttgactggagcgataccagatgtattttcagcactcactggacttgcaaatttagatttttctgataacaatttgaccggtccgttgccaccttcaatgggaaatttgacatcattgactagcctacatattcagaacaatcaaatatctggaactcttaatgtgttgcaagatctccctttccaagatttgaacgttgaaaacaaccttttctctggtcccgtgcctgtgaaattactgaacttgccaaacttcaagaaggatgggaacccattcaatacaagcatagctccatctgcgcagcctcccatcgcgccaacaccattaccgtctatcccaccttcgtcagggcatgtcccctcaaaagaacctgcacattcttctagtgttccaggtggtagtacttcaggatcaggaaaacatactacactcaaattagttggatatattcttattggagtggtattagcagtagttcttgtgctaattgcaatgtactgtttatccaagtacaaagaaaaaaggtcgagagatgatatttatatgaaaaacaagataggaagggtacctcagaagcttggagagcctaaaatcaaggagccaccattaaaactcaagaatgatgctgagaaagctccgaatgttgtttctgatggaagagaggagcataagttaaaagtgccaacatcagaaacttcaaatgtggtttatgatccaagtccaagggatggggcagaacttagattcatcaccgacagctgtacctttggctgttacaatgaataaaaaagagcatgtgattgatatggaaaaggctgataattttgttgaggaccaactgcatcctccgcagccgatggcactgcggactgaaaaagtcactgtcaatcccagtgtacgtacaagaaggggaagagtaccttcagttgaaaaggtggaatcgacgactactgtcaagtccttttccattgcatcccttcaacaatataccaatagtttcagtgaggaaaatatcataagagacagcaggtttggtaaggtgtatctggcaaagcttcctgatggagagctactggaaattttgaagattgactcttctaactcaaaagtgccagtagatgcctttcttgagctagttgtgaggatttctgaactgaggcatcctaacatacttggtcttgttggatactgtgcggagtttgagcagcgattacttgtctatgagtactgtagcaagatgaccctacatgatgaacttcgtcatgtggatgactcaagcaagccattatcgtggaatgctcgcctccaagttgcttcagaggcagcaaaagcattgcaacatcttcatgacggttgccaaccaccagttgtacaccagaattttgaaccctctgttgttctgctcaacagcaccttagttgtgcatatttctgaatgtggccttgcatcactagcatcaaaatcagtttctcagttgtctggacacaccttattccattatgaagcacctgaagtgcatgaatctggatcagtaagcgatcgaagtgatgtttacagcttcggtgtagttatgttggagcttctaacaggacgtaaaccttatgacagttcgtatccacgagctgaacaacatctagtacgatgggccacttctcaactctatgatattgatgccataacgaagatggttgatccttccattcgaggacaatgttctgataaggcattatcccgttttgctgacattattagccgctgcattcagcatgaaccagaattcaggccaccaatgtctgaagttgtccaagacttaactcgcatgatgcctttgacgaccattgatgcggtagtaggatattttggccaatgcaaaatgggtggaacacagtggcaggatgcagagactgcaccacgttttgtccactgccagtaatgctcctctgaatctctggtcaatttatagttcaaagctattgttgtaattctgtagtctgcactctgcacaatatatttcttagtgcccagttccagatcacgtggtgtgattatgcgtggttatctagaccatatgtaaataccaagaagttaaacaaatgtattatagcgtgcttgtttgaggaatgagaaagtacatcttcttactcctcactttattatttgatttgttaaatgaaatgagttggtccatcatatttcattcttt

SEQ ID NO: 17778 - DNA, 2987 bp, Zea Mays
atgccgagtgataaagcaaaagctccaaagaagaagggcgaagaggatcctggaatcccgccagctccctgtgaaggagaaattagccatgagccacatagacaacggtcactcaatgggaggaccactggtccgacccggcgttcaaccaaaggaaattggacacccgaagaggatgctatattgtcccgtgcggttcagacataccaagggaaaaactggaaaaagatagcggaaagttttccagacagaaccgatgtacaatgtttgcacaggtggcaaaaggttctaaaccctgaattggtcaaagggccatggtccaaagaagaagacgaaatcatagttcagatggtaaacaaatacgggccaaagaaatggtcggccatcgctcaagctttgcctggacgcataggaaagcaatgccgggagcggtggcacaatcatcttaacccagccataaacaaggaggcatggacgcaagaagaggagattactcttattcatgctcataggatgtatggaaataaatgggccgaacttacgaaatttttacctggaaggacggacaatgcaattaaaaatcactggaacagttcagtgaagaaaaaggtcgattcgtacatatcttctggtttactttcacaagtcccatgcctctctctgattgaatgtcctgcacaatgtgactctttatcggctatggaccaacaaaacaacggaggtactgattgcaatgaccagaacactagcgtggtcttaagctctgatttacaagtaaatgtggatgccaacaagaaagaagcacatgactctcactcgtccttgtgtcaaggggtatgctatccttccacagagactgtaggatctgttttgcctgatgacctggagatggatatggatgaaggatcaggaaactctatttttgcagacgatcaaactctttgtagcacatcaaatcaagaacaatctatggtgccatttgttgttgcacaggaaatgcctgtctctgtgctatcaagtgtttctagcgctgagcagaaacggcacttaatctctgatgccaaaagcttgaaatccgaactttggaaagatgtttgtttgcaaactcttattacaggagatacagatgaccctgatgcttcttcaagattaaataacccagattcttctaaaatggacaccaattttttgaaagaggcctacccattacacacaccaaatccatccagtgtgattgaaactgtatatgaaccgatggcgttggtgacaatctctcccccttttatatgttcagatggtttgtctttcgcacccgaaaatagatctaagccaggagaaatgtcagactgtgaagcagagatggtcacatgctcaaacaatttttttggtaatgccgagcaatctgctaaacttgccagcagtgatgacaggccagaggctttcacaatgactgagagcactacaaactgtgggggtgaacaattgacagatgccaaagaacctgtggccagtacagcaaaagaacggttatcgaaagacatcgagactatgccagataaaaagaagggtgagggggctctattctatgaacctcctcgattccctggtttggatgtcccgtttatcagttgcgatcttgtaacttctgctgatctgcaagaatttagtccccttggaattaggcagtggatgcggtcgaccatgaatgtcccaactcctttaagattatggggctctccaacacatgatgaaagcccagatgcactaaaaactgctgctgaaagcttcccatgcacaagttcaataatgaaaaaaagacagagaagtctattgtcccctactccagatgaaagaattgagaagaaatctgggattgcaaagggggtgacggacatctcctatatgataacggccacatgttccatgaatgcaaccaatgatgaagacattgttactgaatcagctgtgtgtgctaagcaaccttctttgaaacatctagacaagaagcttgagttctctgacattaacaaggaaaactctgatggagcatctgaacaggccaaagatgcacaaaacacacaactcgtggatgagcaacattcctcaccaaatgttgtgaatcctaacactgatctacaagacaatatacaacctgtacagattcttgtagagcaaagcagcaataaccttatttcctctgatcatggtgcaaagccatcctgtaaggaagtgattagttcaaaatcaaagcctacaaaactacttgttgaaaaatcatcaccatgtatcaacgtggattacgaatatgtgaatttattggctgataccccaggtatcaaaagaggactcgaatctccatctgcatggaagtctccttggtatatcgatatgcacatgcactttcagggttttgtcagcccagcagacagaacttatgacgcgttaggattagtgaatcgtttaagcaagcacagtgctgctgctgcagtggaggcctgtgagatgctagcaagtggcaacacgacttctgataaggaaaacaaggataatacggatggcaaggaactagtgacaagaaaatcacagattaagatcatggccgaggcgcgagtcctggatttcgacgaatctcccgcacctgcaagaacagcagataagaaacttggcagctgtcaccggagatctgttagctcacccattcttccttcccccaaccttagaagtttccgataggtacaccatatatggcatcatcgtacattacccacctgcatgtattggtgaactctattgttattatgtctccttagagcgcgttgttgaaactattggagcgtttcctttctttcgttactctattgttattactattattatgtctctcagcccggaaacaggcatcagtaccagtgaactgttgaaactaccctaatcattcaaattaaattattatattgcccgatgcatgtagcttcttgtgacaacaa

SEQ ID NO: 17779 - DNA, 3489 bp, Zea Mays
tctcattcaggcacagggatgggatgtgttcgagccattatagttttggagtgccctgtcacctcatgcacgacatgagctgttaagacttgataaacagacccttattgagcatgctcgcaagaatttgtactgttcaaggtgtaatgggttgcttttggaaagtttcacacaaatagtcatgtatgggaagtctctgcttcatgaaggttcatgtgagccaaggattcaggaagttgaagcagaagttcaggaaccttcagttcatccttggggaggtctttcgacaacaaaggatggcatcctaactcttcttgattgcttcataaatgcaaaatctcttcatgtgatccagaatgtatttgacaatgcacgtgcgagagaacgtgaacgtgagatgctttaccctgatgcatgtggtggcggtggcagaggatggattagcccagtgatacctaactatggcaggggccatggaacacgagatacctgtgctttgcacactgcacacctttcttgtgatactctggtggatttttggtcggctctgggtgaagaaactagatcatctcttttaaggatgaaagaagaggacttcattgaaagacttatgcacagattcgacagcaagagattctgcagagactgcagaaggaatgttattcgcgaattcaaggagctcaaggaactaaaacgcatgcgaagggaacctcgctgcactagttggttttgtgttgcagataccacatttaagtgtgaggtgttcgaggatgctattcttgttgattggcatcaatctttattggagcaagatggaatataccatcatttcgagtgggctattggaacagatgaaggaaaatctgatattctaaactttgaaaatgtgggcatgaatggacaagtccacaggaaaggcctcgatcttgatcactttgaagactattttgttacactgagagcatggaggctggatggtcgctgtactgaattctgtgtgaaggcgcatgccttgaagggccaatcatgtgttcaccggaggctaattgtgggggatggatttgtgacaattaccaaaggtgaaagtattagaagtttctttgagtatgctgaagaagcagaggaagaggatgaagatgatgtagtggacagagacagcaatgaccctgatggtgatatcgctcatccacagaagcatgccaagagccctgaacttgcaagagaatttctcctggatgctgctgctgttatcttcaaagaacagattgagaaggctttcagagaaggcacagcgcggcaaaatgcacatagcgttttcgtgtcccttgctctaaaactgttagaagaacgagttcatgttgcctgcaaggaaataattacattggaaaaacagaccaagcttcttgaggaagaagagaaagaaaagcgtgaagaagaggagcgcagggagaggaggagaacaaaagaaagagaaaagaagaatagaagaaaagagaggctgaaaggaaaggacagagataaggaaaaaacactggttcggtcaaaaaaaccagatctttcaccattttctctgtgcagccaagcaacaccaagtaataatgagtctcaggatgttctagacttgagatattcagatagtgaagaggaagacaatgttgtggtcggggaacactatcctgattcctctgctgatcaatcttcaagcaaggacagtgatgaacgaagcaatgggcatgaatgcagtgtaacaatagaatttgttccctcagattgtgatagctcattcttatgtgatgagcctaaatcatcaagaaacctgagatttagaagagacttccctgaagagaaagatgctagttattggcatgagggttgctgtgatgattctggagatactcaatggcagtctagagagaggaccagaaataacactagaaattataactctgtatttaatacaaataaccgtacaagagacaggtacaacccctgcagctgtagccatcaagaagactacagatattttaccacagcaactagatcaagtagggagacaaagatgcccaggaaaacagtggctgagaagcccaggttgcaataccgcaggtgctatcctccggatagctttgctgtgtcaaatggaggacgtgttggtggtacaccaaacaaaaacccaggtccaaaacaagtatgggagccaatggatgcaagaaagaagacagggaatgggaatagtgctactggggctgctgatggttcagatcaagtagaatgctcaaataatatcagtgaatgtgaaaagcttgaggcagtgtgtgactctcttgttgaaatttgttctgagatatctgcggaaacctgtaagtcagacacagatcaaccatggagacaaggtgagaagaatcagtctgcttgcagcgatgaatctaaatgcgtggataagccaaattgctccaaggacactggtaggacgacaaacttaaccacttcggatagctcctcgtgtctaagtgagggagatagagacagcagcatgacctcactgagtgttcagaatgtagaatcttcatctgcatctgattcagaagagtcttcagacaggaacaatagcagcccaggcgatataccagcgaagaatgtttctcgtacattacttgagatgtgtgcaggaaatggtttcagagagtaccaaccaaaaggcttgaaccctcctaatggtaaccaatttggatttatggtggccccttcacaggagcagatgttataccaacagaaggtccatgcaccgccgtactcgtcaccattcatggggttccacaatcaccccttggcagttccaacaaatgggtacttaccatatactcagccaggtcacttctaccctgcttctatgacccctgttggatatggagttgctggtgaccaatgtgtcgacttctcgatgcagtacagaaataacattcatccttactcgggtcctgaatttggttttctgccttcacagccagttcacaagacctcagtgaacttccatgcggtaccagtgacaccactgaccccgttgtgtagccgcggaatgccagtggcgacaaatcaagagaggcagcagagtcctgccctcttccctaaattaaaacaggcagtgctggtccctgagaccgtctgtgcaggagacaacaccttcaaacagaaaggcgatgacgtagacagcacacccttctccttgttccagttcaacctgccgattgcccctcccaccctggcaacatccaaagagcgaagtggggaactggcaccagctcagatagctcgagtccagccgtgctcgagggaggagaccaacgtcaaggaatacaacattttctctgggtgtgacggggtgatgtttcagctcaactagagacgaagaaaattgagcagctattcaatatacagcgttacatgacgagcaagtagccgaggaaccaggagctcagcaggttgaggagg

SEQ ID NO: 17780 - DNA, 127 bp, Zea Mays
gcaggcctcgtccactcccttcctccatcggtgcggcatcggcgagtttgcttacaggctatctcagccgagcctgtctcgtccatgccgccttccctttctcgtcccaaaccctagccctagcgcc

SEQ ID NO: 17781 - DNA, 632 bp, Zea Mays
aacaatggattgttttggtttccacttgatcggtggaggtgggctcgcttataccatcctgattgcattgggcagggaactggcccgagtcggacattagcgaacctgatgccgtgacgcgtagaaccaaccccaccgtgaagaaacctttacaggctgtacgtagggccgtgccgtcgcccctccttccttcgtcgatctctctctcggcgacgactgggcgaccgctgcctcctgttgccctggtctccattgggccctttgccagattttctttcgcctctccgccggcgacgaacaccaccaccaggaatgggcttgtggacgttgctggagggttttttgcttcttgcaaatgcgttggctatattgaatgaagaccgctttctcgctccaaggggatggagcatgtctgaagtatcaggaaatgggcaaacgaagtcgttgaagggccagatcgtggggctaatctatgctacacaatttctgaggatgcccttaatagcactcaatgttctgatcattgttgtgaaactggtgtctggctgaggctcattatctagttttcactgttgtgttggattgatatctgttccagcatgatgtaaaaacactttgcactttcgttaagg

SEQ ID NO: 17782 - DNA, 646 bp, Zea Mays
caaaggccagacctcctcgttgccagttgtcgtgacctgaagctagggcctaccgtgcgttttacattctaaactggatttatcgttatttcacggagggtcatcgcagcagatggatcccttggcttgctggtttggtgcaaacagctctgtatgcagatttcttttactattatttcttaagttggaagaacaatgtgaagctcgagttgcctgcttgagcatgcttcgttttgccagaaagcgtgcaagctacgtgactcaagttttatagaatttagttgattatatgggcatggagagacttggtaatgacgtgagcagttgcagttgatgccaaacccttgatcttgtctgcgaaaattggcatttgtgtttcccatggccaagacgatacgattccaaagctaacagatgctgctgcacagaagtaggctagttcctttttgtacctcaatacttttgatatggaaaatcatatacagttcagttggtctgtttaacattcgatttcacttgctccaaacgaaaaatgcgatccaatgttcgtgcgatttctgtgtaaaactgttacacttttgactgtcctcaacaatccattttttatatataatgtcttggtgttactttggcctagtcttcagct

SEQ ID NO: 17783 - DNA, 1665 bp, Zea Mays
aacctgatccgtttttttccaaacaatcacgacaaaaggtccacggcaacaccaacacttgctgccagttggagagcgtgcccacacacccagatcggacggtgcacactgctcagggcccaccacgcttcaaagcggcgttgccggagtgtgagctcaccatgtcaccacactcgcggccgcggagctttatatagctcagcgcgcgcgcggcgccgactccctccctccgtcactcaccgcaccggccctctctcccacgccaggcgcacgtgcgcgcacgccatggacgccacgcgagttcgggttcctcttcccccgtctctgccggcgtggctcgctgtgctactgctcctcgttcaggtgacgcccggggtcggcgcggcggcagcggcgggcgtggggtgcgattgtggcggcggcgaggcggcggcgatcaaggaggaggacgcgcgcggggcgctgcggctgaagctcgtcgcggtggcgtccatcctggcgtcgggcgcggcgggggtgctggtcccgctgctgggccgctccgcctcggcgctgcgccccgacggggacgtcttcttcgccgtcaaggcgttcgccgcgggggtcatcctcgccaccggcatggtgcacatcctgcccgcggccttcgacgcgctcgcgcccccctgcggcggcggcgccagggccggcgggttcccctacgcgggactcgtcgccatgtgctctgccatggccaccatgatggtcgactccgccgccgcgggctactaccagcgcgcgcacatccgcaaggcgcgccccgtcgacgacgacgccgtcgacggaggccagggccgcgcggcgcccgcggacgaggagggcgccgccgccgagcccgcgggccacgtgcacgcgcacacgcacgcccacggagggcacggccacgccggtgcctcgcctcaggatgcctccgccgtcgccgtgtccatcaggcacagggtgatctctcaggttctggagctgggaatcctggtgcactcggtgatcatcggcgtgtccctgggcgcctccctgcggccgtccaccatcaggcccctcgtcggagccctcagcttccaccagttcttcgagggcattggccttggcggctgcattgttcaggcagagttcaaggcgagggcggccgtggtcatggcggccttcttctcgctcaccgctcccgcgggcatcgcgctgggcatcgccatcgcttccggctacagcaggcacggcgccaccgccctggtcgtggagggcgtcttcaacgcggccgccgcagggatcctggtgtacatgtccctggtcgatctcctcgccgcggacttcagcaacccgaggctgcagacgaacgccaagctccagctggcggcgtacgtcgccctgttcctcggcgcggggctcatgtcgttgctcgccaaatgggcgtagaacagaacagattcgctacccgtcagttttttttttctgccgaatcaccgtcagcgagaatttcggtgcgcagaggaagcgaggaaagaaggcccggatgtgatagaacacatttaatgacttcacaaaagaagcagacttcgtttctcagagggaaggggaagaaaacgaggatggaaaccaccgacggggctcaacgctattttggtcgtttccatg

SEQ ID NO: 17784 - DNA, 873 bp, Zea Mays
atcgcgacaacgagcagagaggaagcgagaggcgaggagagagaaagttctcgagctagacgagcgccgtgcgaggagagaagcgagatgagcggtgaggcggcggccgtgggcggaggcgaaggagaggcgaatggcatcccgccgaacgtcaccatctatatcaacaacctcaacgagaagatcaagctcgaagaacttaagaagtccctaacagccgttttttcccagtttgggaaaattcttgatgtgcttgctttcaagactttgaagcataaaggtcaagcttgggttgtcttcgaagatgtcgcatcagctactgaggctctgaagaggatgcagggctttcccttctatgacaaaactatgagaattcaatatgccaagaccaaatcagatattatagcaaaggctgatggcacctttgtacctcgagaaagaagaaagaggactgatgaaaaatctgaaaagaagcagaagcgcgagcatcaccatgatgctggtgctagtcaaattggcatgggtgtaactgcttaccctggtgtttatggggctccacagctcacccagatacctatagcaggaggacaaagggtcatgatgccagagattatcgtaccaaacaacatcttgtttgtccaaaacttgccacacgagacgacgcccatgatgctccagatgctcttctgccagtaccctggcttcaaggaggttcggatgatcgaggcgaagcctgggattgctttcgtggagtatggagacgagacccaggccactgctgccatgaacaaccttcaaagcttcaaaattacaaaagaaaaccagatggtcatcacatatgcgaagaaaacgttctgttcgacctgatctagg

SEQ ID NO: 17785 - DNA, 542 bp, Zea Mays
gagcagttgaagataagataggatgttgctaggggtgtatcagggtgtgaccggaatgtttctagtggtcgagccgtgagattcacgctgtaaaaatctgaagcgtcgtagttatccatggagacctcccctgcctgcatgtttcctgcctgtgcgacaccgaccaatgtttttcaatgagccatagcctgggttgtgcgtggagccttggcgtggaggccgcgtgtccaacccatgcagctgtcgaccgaaacacgaataacaatcacgtgtgaacatgctcgacgtgctcatgtttctttgtttccttgatactgccttgcttccctgctcggtggagtgctctggcgccttgctgttgcttgtagagttcgacgagagttctccgtgtccatgctctcgcgtctgcgtggaactgcgttacctcgttcaactcgcctgaggccggggctgttgccgttctctctgagcaggtgaccacgccggccgtagctccgcctcaccgtggccagagtgaagatttaagataaagtggttgctga

SEQ ID NO: 17786 - DNA, 6376 bp, Zea Mays
acggcgcctctcatttcgtgacggagcaccgaaatggaggaggatcactcggtgatactaatatctgaaggtgctattaaaagcatcaaacttagcctctctaccggagaagagatatgcacatactccataaacgagtgcccagtgacccatcctagccagcttggaaatccgttccttgggttgccacttgaagctgggaagtgtgaatcctgtggtgcctctgaaaatgacaaatgcgaaggccattttgggtacattgaactacctgtacccatataccatccatgtcatgtcactgaactgaggcaactattgagcttgatatgtctgaagtgccttcgaatcaagaaagggaaggtgaaacaaagtaatggaaaaggaaacgcggcaccaactttgtgctcttattgcagggatattccagccctgtctttgaaggaaatcaagacaacagatggtgcaattcgtttagagttgagagcacctcataataaacacatgacagaacgttcatggaactttcttgataaatatggatttcatcatggtggatgttctcaccataggacactgcttccagaagaggctctaaatatattgaagaaggttcctgatgatactaggagaaagctagctgcacggggatacattgttcagactgggtatgtgatgaagtaccttccagtacctccgaactgtctatatattccagagttcaccgatgggcagagcattatgtcatatgacatttcaatagctctgttgaagaaggttcttcagaaaatagaacagattaaaagatcaagatctggttccccaaactttgaatcacatgatgctgaatcatgtgatttgcagcttgcgattggccagtacatacgtctaaggggcactacaaggggccctcaagacaacaccaagcggtttactgttggcagtgctgattcagctgcattgtcaacaaaacagtggttagaaaagatgcggacactgtttatcagcaaagggtcaggtttttcatctcgcagcgttctgacaggagatccatatattgggctaggtgttgtagggcttccttctgaagttgcaaagagaatgacattcgaagagcaggtaactgacataaacattaacagattgcaagacgtggtagacaagggactctgtttgacctacagagatggtcaagctacatatgccatcactgttggatcaaaagggtacacaacacttaaagttggtcagactatcagtcggaggatagttgatggggatgttgtgtttcttaacaggccacccagcacacataagcattctctccaagctttctacgcatatgtgcatgatgaccatacagtcaaaatcaatcctctcatgtgtggccccttttctgctgactttgacggggattgcgtacacatatattatccacaatcgcttgctgcaaaagctgaagccttggagctttttagtgttgagaggcaactcattagttcgcacagtgggaaggttaatctccagctaggtaacgactccttggtagctatgaaggctatgtctcatacaaccatgttacacaaggaattagcaaaccagttggcaatgtttgtgccattttcacttcttgctcctgctgtaatcaagccagttccatcttggacaatatcacagatagtgcaaggtgcatttccagctaacctgacttgccaaggggacacacacttggttagggacagcacaatcataaggctggaccttggcaaagaatctgttcaggactcattccctgatttggtgtcctccatccttcgtgagaagggtccaaaagaagctctgcaatttctgaatgtgttggagccattgttgatggagtttttacttcttgacggtttgagtataagtctgcgggattttaatgttcccaaggctttattggaggaagcacaaaaggacattcgaaatcagtcccttattcttgagcagtctaggtgctctacaagtcaattcgtagaattccgagtcgaaaacaatttgaaaaatgtcaaacagcagatttcagattctgttgggaaattctctgaccttggtctgctgattgatccgaaaaaggaagcctcaatgtcaaaagtagttcaacaagttggttttgttggcttgcaactgtatcgtgaaggcaagttgtattcaagacgcttggtagaggactgcttcacaaactttgttaataaacacttggccattggagatgagtatcctccagaagcgtatggtcttgtccaaagttcatattttcatggtctcaatccttatgaagagttgatacatgctatatccactagagaagctatgatccgctcctctagaggtctgtcagaacctggaactttgttcaagaatttaatggccatcttgagggatgtagttatatgttatgatggaactgtgagaaacatttgtagcaattctatcattcaacttaagtatggggaagatgatgaaactgattcttcaagtgttgtacctcctggtgaacctgtgggtgtcttagccgccacagctatctcgaaccctgcatacaaggctgtcttggattcctcccaaagtaacaatgcttcatgggagtcaatgaaggaaattcttcagacaagaacttcctataaaaatgatgtgaaagatcggaaagtggtcctattcctgaatgattgctcttgcgcaaaaaaattctgcaaggaaagggctgcacttgcagtacaaagttgtcttaagagagtcacacttggggattgtgctactgatatctgcattgagcatcagaagcaaataaatttagatggaacatctgaagctgccccaactcttgtaggacatattcaccttgacaaggggcatttagaaaggataaacattagtactcaagacattctccaaaaatgtcaagaagtttctgggagatttggaaagaagaaaggacacctttgccacatctttaaaaaaattacttttgctacttgtgattgttcattcactcagatgccaatcgatggaaagctacataaggttccatgtgtgcagtttgctttttctgatgacattgtactatccgagtctattgagagagcagtgaatgtgatagctgactctgtctgctcagtgcttttagatacaattattaaaggtgatcctcgaattcaagcggcaaaagttatctgggttgaatcagatgcagcatcttgggtaaaacacacacggaaggtatcaaagggcgagtcagcattagaaatcattgttgaaaaagatgatgctgtaagcaatggtgatgcctggagaacagcaattgatgcctgcttacctgtacttaacctcattgacacacggaggtctattccatatggcattcaacaagtgagggaacttattggcatctcatgtgccttcgatcaagtggtgcagcggctttcaacgactgtaaaaatggttaataaaggagttcttaaagaccatttgatacttgtggcaaacagcatgacatgcactggaaatttgattgggttcaacattgctggctacaaggcaactttccgttcattaaaagttcaagtgcctttcaccgagtccactttgtttacccctatgaaatgctttgagaaggctgcagaaaaatgtgattctgattcattgggatgtgtggtctcatcgtccgcatggggcaagcatgcagcagttggtactgggtcatcttttcaaattctctggaatgaaaatcagctgaaaagcaacaaggagtatggggatgggttgtacgatttcttagcattggtcaggactgaccaagaaaagacagactacatgttcttggacgatgttgactatcttgtagaggagaatgcagcagatgacatgtgcttatctcctgagccagatgggacccttggtaagcctacctttgaggataattttgaagagcaaaatattcagaaaggcagctcatgggaaattggcataacaacgaactcaagttgggaacagaatgctagtgttgcgaatgattctggtgactggggaggctggagtagtggaggtggagctgctgcaaagccagcagatcaagataattcatgggaagtgcatgctaaggtgcaggacaattccaccactgattggggaggctggagcgttgagaagccaacaggtgaggcaactgtatctggagaaccagctgaaacagatacttgggctgataagggtgctaaaatggaatcagatgcaggtgatggtaattgggaaaagtccagcactcctgaggcatcaaagaaaaatgactcatcagaaaatacatgggacaaaagaaaaggagatggaggtgatggtgcgtgggggaacaggtctgatgatggccatggcaattgggagcatcccagcaattggaatgggcagagtttggatgtagatcaggacacatggggaaacgccaggggaaaaaagaaggcagatggtaactactgtcaatgggaggagcagccaagcaattacaaacagaagaagacaaatgctgatcatgattcctcctataacaatgtgatgccgtcatcagaaattgcttggaatgctggagatggaactggaagaccaaatgccaagtctaatgcagaatccagttggggtgaggaagataagatggagtctgacgatcatccgaaagtcccaaaagaatcagacacatggaatacagggagatcaaatgaaagtccatgggataacactgatgcactgcaggattcctgggttaagagcgcagctcgcaataacaacactcaggatggttcatgggataaagtagtatctatgaaggatcttgattcactccaagattcatggagtaaggcgacaatccagacgaatgatgcacagaatgattcttgggacaatgtggcaaaaaatgccccggattctgccgcagaagactcctggggggctgcaacaccagcggagacaactgattctggtaacaaggagtggaaatcagatggatggggggcaaagtctggtaactggagcagccaaagaaataatcctgggagacccccaaggagaccagatgagaggggtccacctccaccaagacaacggttcgaactaacagttgcggagaagaacattcttctagaagttgaacctattaaattacgtgtgagaagcatcttccgtgaagcatgtgacggtgttagacttaatccagaagacgagaagtttatcctggagaaagttcttgagcaccacccggaaaagcaatccaaggtgtctggtgaaatcgactacctaacggtcaacaagcaccagactttccaggacactcggtgctttttcgtggtctccacagatggatcccaggcagatttctcctacctgaagtgcctggagaactttgtgaggaagagctacacggaggacgccgacacattctgcatgaagtacttaaggccccgtcgcaggcaggcaccaccagctgatgttgggacagcatcaggcgccccggatgaggttccaccgtcaaccgcagctgagacagagcaaggcactcctccagcccctcaggcagaggttccacaagagacttggggttctcccgcagtgcctctggaaggaggaactcacatcgccggaccagactcaacaggcgacgctgtgatcctaggggagcagcacgatctgactccggcttctccagctgtggcaccacaagtggcttctgagccagacacaaccgacggcacggggcttctaggaaaggctccgcaagctgactggggacccagattcgacgctgactgatatttaggctgtgtgaagctgccgcatgtaaaagccagacctgtgctctgagcaagggagcattcccttgctaagtcgtcagttaactccccttgacttcatctggagaggtggacaggtagtagcggcaaacattctagcccttagcggccgcttgctcgtcctcgtccgtttcgtctcgccctgatgggaaccatgtaaatccttgggaacaaagctaccccctgctgcctttaccgtatctagttggaccttccccactgttggaatctgtgagtccgtctgctgttaaatttttgatggtttctgggctgtggcttgccagcggtgatgccaaactctggaaacctagggatttgtttggtgcggtcgtttggttgtcaggtcgatcagcaaatgtatgcctttgtcctccagatatgtgcttgttgagctagtagatagtgttacattgcgtgcctttgttcaatggaagcccagtttgagatggagcacgtgttcgaaaatactcggtatcacttatgagcgtaaatgcgaaataaac

SEQ ID NO: 17787 - DNA, 269 bp, Zea Mays
agatttttaagattcaacggggaattcatttcagaacataccaacgttgcagatctccgatcaaaaagttggatgtccctaaatcaccgatttggcaacatggtggaggcaaaggacgagagcgatatagtggattcaaccaaaaggtccagaaatgcgctgaaaaaaatctcgagaaattgggggatagtttctggctacaaagaggaggcaaaatagttccccctctctcggtgtaggattcgagagggggcagatgcccgccgtct

SEQ ID NO: 17788 - DNA, 1695 bp, Zea Mays
atcctcgcccgcaacaccatttccgaacgggtcgcgcccgagcccgatatgcccgcgaagcccaggcccagccagacccaaagcgatgcgacggagatcgtgagatcgcgcgccgcagcctcctcccccgcccccgccgccggcgatgacctccgcagtcctcgccggccggaatgaggtccaccaggcgcatcagcaccaccgccaatgggctggcgcccgcgtcccgctcatgcccaagccgtcctccaaccctaaccctaggcgccaccgcgcgggcccaaaccctatccccagtggctcgccgccggagccgcgggccgctccggccgtcgcggccgagccctcgccgtcgccttcggggcacctgaacttcaggccgtcggaaatgacccccgccgaggcccggcacctccgcgcgcggctcaccagcgagctctgccgcgtccgcgctttcctctcccgcatcgactcgtggcaggacgggcagcgccggcgccggggccccgagccccccgcgcgcggcccgtccccgccgccggcgctggtggaggcgatgcggaagcggtgcgcggacatcctgatgcggctgcggaggtcgaagaagagcgtgtggttcaactccccggtcgacgtggagggcctcaagctgcacgactaccgcgccatcatccggagccccatggatctcggcaccgtcaagcagaacctcaccgccggccggtacccctcgcacgaggcgttcgctggcgacgtccggctcaccttcaacaacgcgctgcggtacaacccgcccgaccaccacgtgcacagattgtgcagaagaggaacagcgatccagcgttcactggggaggttgtcgagctcgatttcgacgagctggatatggagaccctctgggagctcgatcggttcgtggtcaattggaggaaggctctgaagaagagccagcggaactctatggtgaatggcgatgctgccgcggcggtgaatggagacgccatcgatgtgacagttgttccggacgacgacgacatggtcgaggttgctgtcaatccgtccgtggcggtcgagatcggagagtcggctgacgttccagagaaagaaatggaggccgagatggtcgacgattacgtggatataggcgacgagatgccgacagtgaattaccagtcagtggagatcgagagggattccccggcggctgccagcagctcaagcggatcaggaagtggctcgtcttcatccagcgattccgactcggactccgattctgacggggacgatgccagcgccccgcactaggtgtggctgttgttgctgttttatctgactgtactgtaggattagcgatgagtaggtgactgaaaaggttccatttgatgaggcgttttgaagaacggtatagagaagcctgtagggaactcttgttcatgcaatgcaagtggttgtgttcgtctgtgtatgtgtgggtgcagcatttaggttgtcggtacttgggtgatgggtaggtggtagatgcttgggtagattgggaggcttctgtaaagaggggaatataagctggaacaaagaggaaaagtagcaatgccggccggggcatttcttcatgacgtctgctgctttctttgtactactactctctttgttctaaagtataatttattctttttttgggggtggggggagtcaaat

SEQ ID NO: 17789 - DNA, 1273 bp, Zea Mays
gtattcactactcaagccgctcaaaactctagctagctagcagggggggaaatggctccacttctcgccgcagccatgaaccacgctgcccatccagtccttagaagccatctaggacccaacaatgagagtttctcacgacaccacctatcttcttcaccgcaaagcagtaagcgaaggtttaaccttagctttacgccacgatctgcaagagtaggcaatcaaaatggagtccaattgttgagcccttcggaaatccctcgaagggactggttcccctccgacttcatctttggtgccgccacttcagcgtaccaaattgaaggtgcttggaacgaagatggaaagggggaaagcaattgggatcacttctgccacaattttccggaaaggataatggacgggagcaatgcagacattggagcgaattcgtaccatatgtacaaaacggatgtcagattgctgaaggaaatgggcatggacgcatataggttctctatctcttggcctagaatactgcctaagggaacggtcgaaggaggtattaaccaggatggcatcgattactacaaaaggctcatcaacttgttgctagagaatgcgtatgggcctgacgggaaacccattggtcctcctatgggaaatccgtggatctacttatacccagaaggcctaaaggatatccttatgatcatgaagaacaaatatggaaacccacctatctacatcactgagaacggaatcggggatgttgatacaaaggagaaacctctacccatggaggctgccttaaatgactacaaaaggctagattacatccagcgccacatctcaactctcaaggagtcaatagacttgggagcaaatgtgcatggctacttcgcttggtctctgctggataactttgaatggtacgccggctacaccgaacgttatggcattgtctacgtcgaccgcaaaaataactacacgcgctacatgaaggagtcagccaagtggttaaaagagttcaatactgcgaagaagcctagcaagaagattattacgccagcttaaaaacatgggacctcgtgatgtgggtacggtgccacccatgaaataaaaacctagtgtgtggtttgaaacctaaatttttctttttcttttttgcaccatgagagaggtagtggagtcatattctccagcaccgtggctaataatgtattgttgcagtacaatctagcattgtcgtcatgcaataaataaagtgactggtttccctatttcaattatt

SEQ ID NO: 17790 - DNA, 3008 bp, Zea Mays
tgcctgcctaccgagtcgctcgcgcgcggcgggtccgtccgtcgctggcagacgtatatatcgcccgcccgtgtaacagctacagttttcctttagctgtatgtagccgtgcgcgcgcgagcacgtctccagccagctaggtaggcgaggtgacgatggagtcgacaatggagaagccggcggtgatggacgcggcgcgcggcggcggaggggtcgggcgggccaagtcggaccacctggcgccgtcgctgtcgctgagccggacggcgtcggcggagacggtgctgggcacggcggcggacgcggccaagcccgccgggttcgggaggaagcggcgctccgcgtcggtcggcggcggcaacaacaacagccacatccgcaagtcccggagcgcgcagctgaagctggacgtggaggacctcgtcagcagcggcgccgcgctcagccgcgcctccagcgccagcctcggcttctccttcaccttcaccggcttcaccccgccgctccagcacatgtgctccgccgacccgccttcattcagcgacgacgagaacccagtggacatcgaagccggcacacggcgcaagaaactggtgaccgagccgaccctgccgatatacctcaagtttgcggaggtgaagtacagggtggcggggaagggctcgccgcgggagatactgggagggatatccgggtcggcgtcccccggcgaggtgctggcgctgatgggcccgtccggcagcggcaagacgacgctgctgagcatcctgggcgggagggccgccgccggcggcgccgtcgacggctgcatctcctacaacgacgagcccttcagcaagtccctcaagcgcaggataggatttgtgactcaagatgatgttctctttgcccatcttactgtgaaggagacattgacttacgcggcactactccgtctcccaagaacaatgacacagcaacaaaagaaagagcgagcgatggacatcatacatgagcttggccttgaaaggtgccaggacacaatgattggaggatcgtttgtacgtggggtttcagggggtgaaaggaaaagagtttgcattggaaatgagattttaatcaatccatctttactgtttctggatgagccaacatctgggctggattcaactacagctctaaggatcgttcagcttctccatgacatagctgaggatgggaagacggtaatcaccacaattcaccaaccatctagcaggctgtttcataagtttgacaagcttattctcctgggcaaaggaagtttgctatactttgggaaggcatctgaagccatgccatacttccagtccattggatgcgccccacttattgcaatgaaccctgcagagtttctactggatctcgccaatggcaacactaccgatgtctcagtcccttcagaattagatgacaaggtgcatatggaaaatcacaatttggagaacaataattccaagattgactacaggccatcagcacaagatgttcatgagtatttggtagatgcctatgagactcgagtggcttttaaggagaagaagaagcttctagcaccactgcctatcagtgatgatctgaaggcaactataacatcatcgaagcgagagtggggcacatcctggtggcagcaatattccatcctcttttgtagagggatcaaggaacgacgacatgattacctgagttggatgagaatcacccaggtcatagctacatcggttatcttaggtttactgtggtggcactctgatcccagcacactaaaaggtctagaggatcaggctggcctgctgtttttcatcgctgtgttttggggcttctttccagtgtttactgcaatctttacattccctcaagagagggcaatgctgaacaaagagcgcgcagtcgacatgtacaagctcagtgcatacttcttggccaggacgacgagtgatctaccacttgaccttttcctcccaatcatattcatggtgatcgtgtacttcatggcaggcctcaaagcaactgccacacatttctttctcagcatgttgaccgtctttctcagcataattgctgctcagggactcggattggcaattggagctactctgttggacatcaagaaggcgacaactctagcttcagttacagtcatgacattcatgctagcaggaggcttctttgtaaagagcgttccaccattcatctcctggctgcgctacctgtccttcaactaccacacgtacaggctcctgctgaaggtgcagtacgaccccgtgccggacatcctgaccaccacgaggcacatggacagcggtggcaccgaggtggcagctctcgtcgccatggtcatcgggtaccgggtgctggcctacctgtccctgagaagggcgaaggccctgggcagctagcgcatcccttcaccgcagtgactgaagcctgagctcgtggagcgggttgggtcattgggtgtgtagggaagtttgtgctatattgcgctgtgaaaagatggaagtctttttttttaacttttctgtctttttcaactaagttctgagcaagtaccaacactgaagaacaaggatctgtagcgagtgtaccagagacaagctgtgctgtaatttttccttcacaacgattgcgtggttaaagtgattgagtataagcgtgagtttagattgccggcatattcttaggatgggtagctctaggacaaattctgttcatactcccaagaacgcgtacatttcatcaatgacattatacgagttcttcgcgatggacagaagcacaggatgaaggcctgatgtcccataggtcagagggaaggtatgatcagtgtttgattcatctacatcacccttatacggtcccatttctgcaatgttcatatgttctaaaattctgggctccatcgatctttccaatctgtgactaaagctcttcttttttttaactgctattaaggtaaacacgcacacgcacaaagaacttttttgcca

SEQ ID NO: 17791 - DNA, 1132 bp, Zea Mays
gtactcctagtagttgtgaaagatgtttagtgaactgtaattagaaagaaagtttgcactctagtttagcccttacaatagcattacattatattatattgctgaactttcgcttgttgagaaaatgcagaatagttttctggcataatttgaatgttgtaattaaatttccatcttgctgttaatgttacatatagcgtattgctgaactttcgcttgttgagaaattgcagaatagtattctggcatatattgaatgtagtaattaaattttcatcttgctgttaacgttgagcttgaaatgtatatctatagagaaccaaatgctttggcatatgctatcaagagatcatgtgaaaacaaagctgaagtggtggcacaagatgagaaggaaagtggccttcgagcaacactaaacctgggtcacacatttggccatgctattgagactgggacaggatatggagcatggctccatggggaggctgtcgcagctggaacagttatggcaactgacatgtctcaccgcctggggtggatagatgactccatcagaaaacgtgtggttgacatactaaagcaagccaaacttcccattgcacctcctgagaccatgaccgtagagaagtttaaaaacatcatggctgttgacaagaaggttgctgatggtctgttgagactcatccttctgaaaggaccactagggtgctgtgtatttacgggggattatgaggggaatgcactcgatgaaaccctacatgcattctgcgacaactgagacatcccagttttggacatcacttctgtatgctagtactaggctatgtatcaatcagagaaaatattgtggtgtacattatcttcactgcctcattggtatatttttgtcagaaataatggtatattgttttaagtgctggtttgagtttgtagagaaccatggctaatcaactgcggtgcggtcagttgttctctagtaataatagtaaagaagcttcactacatcccttctgtctgttactgtcaagtaacaatactcgtagagatttaaacctgtatttgtgtcaattaaatcattacctcgtcacttctaaattttaatacggagtagttcactttgactttgtcaaac

SEQ ID NO: 17792 - DNA, 1647 bp, Zea Mays
cagcatttgacgcttcgttctttcgtgggcggggggaaagcccagctgcgaaactctggccgcgaactctctggcatcgccgtcccggcctcgagccatccacgttccacggtctcgaactcgaagcccagcaccacgcgaccacgagccgcccttctccggcggcgtcgcagtgagcccggcatggccatgctactccgccgccgactcccgctgctccgcctcctccggccgctgcatactggatcgatggcttcgatctcttcgtcctccacacctccccctccccctccccctcctcttcagaaacctcacgccgccttcgtggggccaagatcacgccgcctgcggttccccaatgccgcgcccgttgagtcggggcggggggctgggaaatcatctcccgctgccgcctatctcgctatgggcgcggccgccgccctcgcgtcactgccggtggcctacgcagacagcaatgagcagggagcggtcgacacagtagcgagtgccgatcccgcggttggggaggatttggcccgcaaggagaggaagaggatattggagcttgtccagagccgagggatgcagcgcgggtcatacccgaagtttgatgttgcagtgaagggccagaaggtggttgttaaattcaacatgccatctaattgcaatgtatcacaccttatcgttgatcttgtaacacatattggacttgaggcagaacaacatggtggtggctcagaggttttagtgcgtgcttgggacagtccagctgcacgtcaaatcacactgaaccctcccaagaagactagcactggagatcacaatgaagatggtctctgtgttctgatatttgaaccacttattggatcagattattctgaaattgaattcatcaagcctgggagttttagtttgaaagaacttgaggctttgataagtgctttaaaaatagcctctgaaaaggggtcatcagggaaaaacacaccaagaaaaggaaatggtcaaagatccaagcatttgccctctttggagaaagttgtatctgatttagaggctatgggtgttagagtctatggatttgatgaaacatcaagtgttccaatggatggcactgtaatctgggagaaccttgcaggatatgaacctcagaaaagggaaatagaggatactgtactcttagctttacagagtcctgaagtgtatgatgatattgctcgcggcacgcgctgcaaatttgagacaaatagacctcgcgctgttctttttgagggcccacctgggacaggcaagacatcttcagctcgagttattgccaaacaagcaggaattccactactatatgtgccacttgaagttgttatgtcaaaatattatggcgaaagtgagcgtctattgggatctgttttttcacttgcaaatgatcttcctgaaggaggtattatattcctagatgaggtggattcttttgctattgctcgagacagtgaaattcatgaagctacacgaagaatcttgtcagtaattctgcgacagatcgatgggtttgagcaggatagacgggtggtagtcattgctgcaacaaatagaaaggaggaccttgatccagctctcatcaggaggcatatatctcaaatgtttaagctgttg

SEQ ID NO: 17793 - DNA, 346 bp, Zea Mays
aatccatgatgtgtatttatacacagccttttatttacaaagactgaataatgcctcccttccaaccagaacagctgcatctgaaagctctgacaaggcgacaaccagacatccttaaaaaatagaccatttgtcattcacttaaaaaagagagatcacaacattagggtaacataaaaacaactacatttagtctctatagtacttgttttaggttaaaaagattagcattacagcctccttccttaaacacctttaaatgatgtaagtactcccatgtcatatatgtcattcctatagtttcgaccagtgctgtattttttatatataacaatgtagtctagaa

SEQ ID NO: 17794 - DNA, 888 bp, Zea Mays
tgatatctcaattgagatttaaggtcccgcatgaaggacctatgtgtgatcttttgtggtctgacccggatgacagatgtggatggggaatttcaccaaggggtgctggatacacatttggccaagatattgcacaacaattcaaccatacaaatgggctaagtcttatttcaagagctcatcaacttgtaatggaagggttcaattggtgccaggataagaacgttgtgacagtgttcagcgcgcctaactattgctaccgatgcgggaacatggctgcgatcctcgaaattggcgagaacatggatcagaacttcctccaattcgacccagctccgcggcagattgagccggacatgacgcgcaagaccccagactactttttgtaatcagcatgctggctttctttcaacttgtctactgcagcgccagcacctgtagatctccttagaaaatggtgtttcctctagccgccttgtacccccatcattcttttggtgtggagattttattgccgcttctcagaacattgaggttgttgaaagtacatggcattgggtcttcctttttttttgccgtcttgtatctccattttgtatgattctgagacaaaagagaagagaagctgcaatagaattgtctcgaaatatattgtcctgtccagaagaacaggtgtggctccaaaaaaaaaagggaaaaaataaaagagagacaacaaggaaagatgcaggaaatggacccgatgttccgttgtgtctgttgtgatgcttcatgcttggctaggggagttctttcagtgctgtttgactccgaattgaaggaaccttggttgttcaacctacatcatcagctcaccgtcgaatgtctgcccagaccgatgaggacagg

SEQ ID NO: 17795 - DNA, 3020 bp, Zea Mays
cctgtccgctcgctgcgtcgtgcgcctgccttcctctcacggtcggcctcgccgcgcgtttgctttcccgcccacgcagggatcttcgcgagcggggagttgaagcgcgagatttgcgcggctacgattctgcgttgccgagggagcaagggaaccaatggctgcagcggtggcgatgcgagggggaagcagcgacagcggaggatttgacaaggttcccgggatggactcggggaaatacgtgcgctacaccccggagcaagttgaggtgctcgagcggctctacatcgattgccccaagccaagctcctcacggcgccagcaactgctgcgcgagtgtcctatactctccaacattgagccgaagcagatcaaggtctggttccagaaccgaaggtgccgcgataagcagcggaaggagtcttcgcggcttcaggctgtcaacagaaagctgacggcaatgaacaagcttcttatggaagagaatgagcgtcttcagaagcaagtctctcagttggttcatgaaaatgcgcacatgcggcagcagctgcagaacacttcattggccaatgatacaagctgtgaatcaaatgtcactgcccctccaaacgctataagggatgcaagtaacccttctggactccttgcgattgcggaggagaccttcacagagttcctctcaaaggctactgggacagctattgattgggtccagatgcctgggatgaagcctggtccggattcggttggtattgtggccatttcgcatggttgccgtggcgttgctgcccgcgcctgtggtttggtgaatctagaaccaacaaaagtcatagaaatcttgaaagatcgtccctcttggttccgtgattgtcgaagtctggaagtgtttacaatgtttccagctggaaatgggggaacaattgaacttatctacatgcagatgtacgccccaacaactttagttcctgcacgtgacttttggacgttgcgatacacgacaacaatggaagatggcagccttgtggtctgtgagagatccttgactggttctggaggcggtccaaatgcagcttctgcacagcaatttgttagggctgagatgcttccaagtgggtatttagtgcgcccatgcgaaggtggaggttcgattgtgcatatagtggaccatctagatctcgaggcatggagtgttcctgaagtgcttcgaccactatatgagtcttctagagtagttgctcagaaaatgactactgtggcactgcgccaccttagacaaattgctcaagaaacaagtggagaagtagtgtatgccttgggaaggcaacctgcagttctacggacctttagtcaaagactaagcagggggtttaatgatgccattagtggtttcaacgatgatggttggtctgtaatggggggagatggcattgaagacgttgttgttgcttgcaactcaaccaagaaaattaggaataatagcaatgctgggattacatttggagcgcctggaggcattatttgtgcgaaggcatccatgttactgcagagcgtcccaccggcagtactggtccgatttctgagggagcatagatctgaatgggctgattacaatattgatgcgtatttggcttcatcactgaagaccagtgcgtgctcacttcctgggttgcgacccatgagattttctggggggcagatgatcatgccacttgctcacacagtggagaacgaggagattcttgaagttgtccgccttgaaggacaacctcttactcatgatgaagcccttctttcaagggacatccaccttctccagctttgcactggaatagatgagaaatctgtgggttcctccttccagcttgtgtttgcaccaattgatgagcattttccggatgatgctccattgatttcctctggctttcgtgtcataccacttgatatgaaaacagatggtgtatcctctggtaggacgctagatttggcatctagtcttgatgtgggttctgctgcaccccaagcctcaggggatgcacctccagatgactgtaatttgagatctgtgctgacaatcgcctttcaattcccttatgagatgcaccttcaggacagtgttgctactatggcccgtcaatatgtgcgtagtgttgtttctgctgtgcaaagggtgtcgatggctatatctccctcccaatctggtctaaatgctgggcagaggatgctttctggcttccctgaagctgccacacttgctagatgggtttgccagagttatcactaccatctaggtgtggaattactcaatcaatcagatgaagctggtgaagcattgttgaaaatgctctggcatcatccagatgctgttctgtgctgctcttttaaggagaaacctatgtttacgtttgcaaacaaggcagggctcgacatgttagaaacatctcttattgcgctgcaagacctgacgctagacaagatcttcgacgagtcaggaaggaaagcaatattctcagatatctcaaaactaatggaacagggctacgcgtacctgccgtcgggcgtgtgcatgtcaggaatgggtcggcatgtctcattcgaccaagctgtagcgtggaaggtgctcggcgaggacagcagcgtccactgcctggcgttctgcttcgtcaactggtccttcgtttgacacgccatcccatggcctgtgtgatgagcaggccaatttttttgtatggtgatcccaatatggggaaaccatcagctgtgacagaaggctttatgttgcatgcactagttgtacgtcttgaatcgagtgtatttatgaagaaattggatactgcgcaaagtctggtgccacttacgtttgactgcctgcccggcaacaggctgtttgtctatctcaccggccaaccgaaacgatgcttattccattcagatgttacttgctgatgttaaggtatggttcaaaccagacagcaacaaaagtcggctgtttccaagtggtggaatggcatagcgacgctaca

SEQ ID NO: 17796 - DNA, 246 bp, Zea Mays
attacaggcagttgatgggagaggatctttctgggctgaatgttaaagaactgcagtccctagagaatcagttggagacaagcctgcgtggtgtccgcacaaagaaggaccatctcttgatagatgagatccacgaattgaatcgaaaggcaagtttatttcaccaagaaaacacagacttgtacaataagatcaacctgattcaccaagaaaatgctgaattacataaaaaatctatgagactga

SEQ ID NO: 17797 - DNA, 2197 bp, Zea Mays
caggatcgtctcgtactacaagttctgtttggtcttcataaagtagagcactagctagaagacatattcacacgcatcagctatcaaattgcaagcttagaattgacctcaaagttgggacatgcttgtcttaccacaagcaactgatagcttggagttgtagtccggactgtctgcgctggaccagtatggctgacactccaacgtcccgcatggtgcacccctttggcgacgccccaaggcagactcccaagcaattcctgtattctggtaacccgcagcacctctgccatccgtaccagtcagctccggacacccatgtcgtgctccagcgccgttacaccgtgaggtctcagtctcactcaccaaataatgctggttctgaagaccatgagactcacaagcagtacacgctggagtcctcagcggcttctggttgttcaaggcatggttctccctccagccaaagcgtccatgccgggagtggcagccctgtgtctcacgacgacagccactccggctccacgaatggccatggatcacctgtgagcgcgtcgtgtgtcaccggcgaggaccctactgatctcaagcagaaactgaaggatcttgaggctgtaatgctggggacgtctgagactgaccccgagatagtcaacagtctcgagatctccgcggcaaaccaactctcgttggagcccgaggagtgggagcacatggtgagcatgcccagagggaacctgaaggagctgctgattgcctgcgctagggcagtggaacgtaacaacagctacgccattgatctgatgatcacagagctgaggaagatggtttcggtgtccggcgagccgcttgagaggctgggagcctacatggtggaaggtcttgttgccaggctcgcggcctccggcagctcaatctacaaggctttgaagtgtaaggagcccaggagctctgatctcctctcctacatgcacttcctgtatgaggcctgcccctacttcaagttcggctacatgtcagccaacggcgcgatcgcggaggccatcaagggagaggacaggatccatatcatcgacttccacatcgcgcaaggggctcagtgggtctctctcctccaagcccttgcagccaggcctggcgggccaccgttcgtgagggtcaccggcattgatgattcagtctcagcttacgctcgaggcggcggtctggagttggttggcaggaggttgacacatattgctggcctctacaaggtgccctttcagttcgacgcagtcgctatctcaggcagtgaggtggaggaggagcatctgggcgtcgtcccaggcgaagccgtcgccgtcaacttcacccttgagctgcaccacatccccgacgagaccgtgagcacggcgaaccaccgggaccggatcctgaggctggtgaagggcctgtcgcccaaggtgctcacgctggtggagcaggagtccaacaccaacacggcccccttcgcgcagcggttcgcagagacgctggactactacacggccatcttcgagtccatcgacctggcgctgccgagggacgacagggagcggatcaacatcgagcagcactgcctggcccgggagatcgtgaacctggtggcctgcgagggcgaggagcgggtggagcggcacgaggtgttcggcaagtggaaggcgcggctgatgatggccgggttcagcccgtccccgctcagcgcgctggtgaacgccaccatcaagacgctgctgcagagctactcgccggactacaagctcgccgagagggacggcgtgctctacctcggctggaagaacaggcccctgatcgtctcatcggcatggcactagtgttgacttcagagaatgttgacctgatggagaatgtttcttgtaaccttcgaagtacctcttagtggtttagatatgtttggctggtcactggaactatctataggaagcctatggtgatagatactgagttgtagtagaacacatatagcctaaatgcctaatgctgtgatggcagtcactaccagcctagcctagaacaggttgatgatgtgtagtagtaagtttgggtatatgtttcagttaatcagttttgcttgggtgcattctgaagggtggcctcttcaaaaaggacatcaaaccttctaacttgacccttcggaaatcttcactagtgagggccg

SEQ ID NO: 17798 - DNA, 970 bp, Zea Mays
ccattttggatcatatatgatgttcaggttgagaattgagataatcagaaggaagaagaacaaaccgacccctacaaaatcccaacaaagcataacatagggatggccatgtattggcttgtgcaaggttgtcaacctggagactcattggtgttccattattctgggcatggagcacagcaaagaaactacaatggagatgaggttgatgggtttgatgaaaccctctgcccattggattttgagacacaaggaatgattgtggatgatgacataaatacagcactagttcgaccacttcctcgtggagttaaacttcatgcattcattgatgcttgtcatagtggaactgcacttgatttgccttacctctgcagaatgaacaggagtgggcaatatgtatgggaagatcaccgaccaccatctggtgtctggaaaggcactagtggtggggaggctatttcatttagtggttgtgatgatgatcagacctctgcagatacctctgctttatcaaaggtcacttcgactggtgcaatgacatttggcttcatccaagctattgaacgtggacagggcaccacctacggtagtatcctgaactccatgcgttcgacaatacgcaacacagatgactcagcaggtgtaggtggcggtgctgttacatcactaattacaatgcttcttactggagggagcctatctgctggtggtctgagacaggagccacaactgacggcatgcgagccatttgatgtctatgcgaagcccttctccctatgacgcgttcatggtgctgctgctgcccacccatttcacgttatcaacttatcatcgtgtacatttcaccatcccgattgttaacagcgcgtggaattacaatccgtataaggaagctatgcatatatatcgtttgtttcacaggacgcctctgtatctggtgacgttaccgcggaagacgtgaaatcgg

SEQ ID NO: 17799 - DNA, 516 bp, Zea Mays
cctacactcagcccctacacgaggatccctcccctatagaatcatcctggaaacagatgcaaacaccattgctggtaaggttgcaaccaatgctgttgatggttctgtgcccttttctgagcagacgatatctcaggcactagccacagctagggagcaccttgcaagatctctactgaaatgaacaaccagcaatatgtatgacatatatgtgtgttaaaggttgggctactgaatgttaagggtctttgtagtcgttattcatcccaaagtgctgctgtgacagagcctagttgaatatccgagggattggtcacatgctcgttattttttttgaaccagtgagtttgtagctgccatatttcaggtaaaacataaaataaagagttgtaattgggtgtaatataattttcaccatacaaaaaaaatcatctcaactatcaaaccatggtaaaaggttcaaaattatctatcaaatgattatccctccagaaaagcaaaatacaaagactcaag

SEQ ID NO: 17800 - DNA, 439 bp, Zea Mays
catcatcatctgattgaacctgagcagcatgacaggagagcagattcaggccccttcaagtcccagggatggcgaggatgttgcaattaccattgggcgccccaaggaaagtggacctaagttcggcaccatgatgggtgtctttgttccatgcttgcagaacatcttgggaatcatttattatatccgttttacctggattgtaggtatgtcaggtgtatggcagtcacttgtgttggtttcattttgtggtgcatgcacatttttgacctcgatatcattaagtgccattgcaacgaatggagctatgaagggtggtgggccatattatcttataggccgtgcacttggtcctgaagttggagttagtataggattatgcttcttcctcgggaatgcagtggctggatccatgtatcaccgtgaactcctcttctag

SEQ ID NO: 17801 - DNA, 2012 bp, Zea Mays
tgaataggcatccaaaggaaatagggaactttggtgaagtggtgaatgtggagctatcaatggaccgaatggttaaccttcctcgtggctatggatatattgaattcaagaagagagctgatgctgagaaggctctactttacatggatggtggtcaaattgatggaaatgttgttaagttgaggttcactcttcaaccacgccaaagggctgtatcacctatgaaagctccaccccctcctccaaaacgagatgttgctcagattgaaaaaggtcttagcagtgctgaaaaggatgcccagcagcgtcctagggaatcatctccacgaaggaagccagcttcaccaccgcggaaacgatctccaaatcgaagggctgaatcgcccaggcgtccacctgacccatcacctaggcgtcgtcctgattctccgcctattcgtcgccgaccagatccttctcctgtcaggcgtggtggcacacctcctcgcaggagaccactgtctccagttagaaggcgttctccttcaccacctaggaggcataggtcaccgatgcgtccttcacctaggaggggacgtggcagtccttcaccacgcaggcgctcccctgggcctcttaggcggcgctcgccacctccaaggcgtttgaggagcccaccaagaaggccaccacctccacgtcgctatagtcgatctcctcctcgccgaccccttcgctccagatcgatttctccaagaaggggacgagggcctctcttgaggcgtggtaggtcaggctcatcatattctcgatcacctactccaccgccaagaaaggggccaagaagggtatcaaggagtcgcagccctagaaggcctcccagaggaagaagcatctctagtgacagccgaagcagcagttctccttcccctagacgtggcaggtagaaggaacccgttgcattgtgtatccggcaggtaaagccttttatcccctgactcagatcaagtgttggtttgaggagaagataaaagaaccctacggcaatgcttccagtggatctgcttaacatgcctggtgggctcactggcttgtgatttgtacccgagacagaattatctgccatgtgacatctggctcatgtacttgattgtaccccaagtatgttgaacttgtttccgcacaggagtctggatcttttttttttgcattaaaccattgtgctacttggtctaaagcgttactgggtctttcgtttcaggagtctggatctttttttttttgcattaaatcattgtgctacttggtctaaagccttactgggtctttcgtttcaggtgttgaaaggtttcatctactttgttggaaggagtttttcaacattcccattgtattatgattccgttgatcaagcaatttgtgtatgcgcaggcgcacgcacagcgtacaccttttctaatctgaaaagagttgtcattttgccaaaccccgccctgcttgttgccctgtcccatcagtcattggtttactgacgcgacgcaacgccgtttcctacaacatcctcatcgccgcctactctcgcgcgggcctacctggcgacattcgcgcgctaggaacggcaatgtagggtattgggcgtacccacgtgacggcagaaaaacatattgatgttcttctaagggctcagtccctttgggaccaagggtaatgaatggaattttgaggggatcaaaatcccttactatttaaaattgaatattgagggattatggtcctcttaatcccgttcattacacatacacttgctgtcgaagaagtggaatgttgggacttatgactcatctatttgtaaaattgtctcaaatagttaaatgacacaagattatatttgacatttctatgctcgtaattgaaggagagtaaaattggtgtaactggatatatgtactgccttgccttgtgaaaggatcacgatgtacaaatggaatggagggacaaattagactttaattttttttgtgacaattaaattc

SEQ ID NO: 17802 - DNA, 3173 bp, Zea Mays
tcccacccatgtagccaccccccacccacccacaccacacacacacccaccgcgcgcagcgcagtccatccatccacgcacacgcgcacccgtccctctcggcgcccctctcccccctcctccactccgctgctgcctgcttgcctcctccttgccgccgcgaccgcgaccgccgttcgctgtcgaggccagaggagaggagtggtcaagtccgaggccacctgcccaggctcagacctcccccgccacaacgcgagccgcatcgcctcgtctcctccacgccatacacgcccgccttcccttccccggcgaccaggacccctcgcccgcggcgccagcgagctcccccggccagtcgtaggcctcccggagctcagcacgcacgcaggtgggtccagtgaggcctggttgtgcgcgttcctgcgggcgtcgtcggggcagatccatggaactcagccgcccgcagcgcggatagtactgcacttgtgcaccagccaccagcggatcgccaggactgcccacctgctgctgcttgtgtcgctagccatttttcgggcgtctggcttggaggatatggccgcggcgatggacgcgcccaaccctggagcggctgctggcccaggaatgcctagtgacgccctgtaccaggagctgtggcatgcgtgtgctggcccgttggtcacagtacctagacaaggcgagcgtgtctattacttccctcagggccatatggagcagctcgaggcgtctgcacaccaccagcagcttgatcagtacttaccgatgttcgatctaccacccaagatcctatgcagagtagtcaacgtggaactacgggccgaagctgattcagatgaagtttatgctcaaattatgttgcagccagaagctgatcaaaatgaactcaccagcctggacgctgaaccacaagaacgtgaaaaatgcactgcccattccttctgcaagacactgacagcttcagatacgagcactcacggcgggttttctgttcttcggaggcatgctgaggaatgtcttcctcagctggacatgtctcaaaatccaccttgccaagaactggttgccaaagatctccatggcactgaatggcattttcggcacatttttcgagggcaacccaagaggcatctccttaccaccggctggagtgtctttgttagctcaaaaagattggtttctggggatgcattcatcttcatgagaggtgaaaatggtgagctacgggttggtgtaaggaggctcatgagacaagtaaatagcatgccgtcatctgtcatatcaagccacagcatgcatcttggagtattggccacagcctcccatgccatctccactggaaccctcttttctgttttctacaaaccaagaactagtcgctctgattttattgtgagtgtgaacaagtaccttgaagctaagaagcagaaaatatctgttggaatgaggtttaagatgagatttgaaggtgatgatgctcctgaaagaaggttcagcggaacaatcattggcatcgggagtttgccggcaatgtcaaaatctctgtgggcagattctgactggagatctctaaagaatctcaccatgggaagtggagccactggatgcagctaatccacaatcccctcaacctccactaagggctaagcgtccacgacccccagcttcaccttgtatggtttcggaactgccttcaggttttggactctggaaatccccaattgaatcatcctgtacactctcattttcggaacctcaacgggctcgagagttatttccttcaatccccacgtcaaccttgtcatcttcatcaaatgtcagttttaattcaaagaatgagccgtccatgctaaccagtcagttctactggtcagcaaggcatacaagagctgactcctgcgctgctagcaccaacacagtcgtaattgaaaagaagcaagagccaagttctggtggttgtagattgtttggaattaatatatgctcagctgaggaagaagtattacctgaggttactgctccaggtgttggttatgagcagactgctgcctctgtagagttgaactcggataagctctcacagccatctgatgtcaacaattctgatgccctagcagctagcagtgaacgttcacctcttgaatcccaaagccggcaagtgaggagctgtaccaaggtaattatgcaaggaatggcagtaggaagggctgtagacctgacaaagcttagtggctacagcgatctttgccagaagctggaggagatgtttgacatccagggggagctgggttccacactaaagaaatggcgggtcattttcactgatgatgaggatgacatgatgcttgttggagatgatccttgggatgagttttgcaggatggtgaaaaggatttacatttacacatacgaggaggcaaagaagctgacatccaagtcaaagttaccggttagcagtgacagcagcaagctgagcgctgcgaactcactgtctgaatgactatgaacaaaaactgcagagtgctaacgtccctctaattttgttatttccatcatttgattatgggggtgaatgctcacggttgctccgtgggctgaagttgtggttggcattcaactgccttgagttttggaggcttttggactgccttgccagcatgagcctcctggaagaggcaccctggcatctgcgtgccatttcccatttgttcgtgccgtttggtaggagtatccattggcttatttagcaggtccctggtttgaagaaagaagcggtcagctgcaagatggacggtgccttgcctcttcttcgactacttagctagtaattaggactatgtatgtaatgaatgtatatagtgccattaagacgcccatgccctggtattgaggtcccggcatttgtatgaatcaattgttcggaaattgttacctttagcagcaacgaacctgagggtgtagggtggccaggtgggagaagttgtatgtttctttcagtaacaatctttgtgcaagtgatctgtatatagtctactgttttaataagcaatgttgtgcaacttgcgctcctacaccctacagtacagtggggcttttcttgtgcttactgttcgcttgatgactgtctacatttggctgtgcctttttgttgcccg

SEQ ID NO: 17803 - DNA, 1743 bp, Zea Mays
tggaaaaccactcgttgcttctggaacaccaccgcgaaagcaaaggaataacgagccgaggaaatggccacgcggtcactcacctccgcacttccgctctccagaaccccgcgcgtcccctcgcatcgtccctctctccgccgactccaaaccctaacccgcgcgcttacctcctcgtcccctcaggccatggcgtcgtcccctacccccaagaaggtgctggtcccgatcgcgaatgggacggagccgatggaggcggtcatcaccatcgacgtgctccggcgcgcgggggccgatgtcgccgtcgcttccgtcgagccgggggcgacgtccgtagctgcctcatggggcatcaagcttaccgccgacgcgctcctcgccgacctcgcggacgatgagttcgatctcatctctctaccgggagggatgcctggttcttcgacttttggagagtgcaaagttttggagaaaatggtcaaaaaacatgtagagaagggcaagctttatgctgcaatttgcgctgcaccagcaatgactctaggaacttggggtttgctcaatggcttaaaggcaacatgttatccttcgttcattgataaacttccttcagaggtacatgctgtggaatcaagagtgcagattgatgggaagtgtatgaccagtcgtggaccgggaacagccatggagtattctgttattttggttgagcaactatatggaaaggaaaaagctaaagaagttgctgggccaatggaggactgtctcattatattaagaagaaagaaggttatggggccagaaaacagcccaaacacaggagcctccttacggaggatgaaaacatgaaaacataaaaggactcataaggaacctataaacaacatcctcacatcaagtaagacagggagagagaaactagactgcagggtgccgggcagccaaggcccaagttgtttcgactaaaaaggctttgttgtgttttcttgcaactttcctgcatttgattcctgtttccatcatattagttttgaagtagtagtttttttgttgacatttgcaacatctcttgttctttgtttttttactatagttgatgtatttttgacagctgttaattctattcaactaagtgaatattacctttcaggttatgcgtcctcagcatggtgtggaattctctatgaaagaggtgaattcaactagttggaatgttggtgaaacaccaaatggcgaaagcaaatgttgtggttgcctccttggaagacaagctagagattgttgcatccaggaaggtgaagatgattgctgatgtgctgttggatgatgctcttaaggagcaatatgatctcattctgttacctggaggtctgggtggtgcagaagcatatgcaaaatctgataaactaatggatctgatcaagaagcaagctgcggcaaatagattgtatggagctatatgtgcctcccctgcgattgctcttgaaccacatggcctactaaagggaaagaaagttacatcctatcctgctatgtggaacaaacttgcagaccaaagcgaatgcaacaacagagttattgttgatggtaacctaatcaccagccaaggtcctgggacttctatggaattctcgcttgccatagtggagaaactctttggacgggagagagcccttgagctggccaaatccatggtttttatttgagttgaaatgcactccaggacacaagattactaccaagata

SEQ ID NO: 17804 - DNA, 1270 bp, Zea Mays
gccggccggaccacccagagccagaagcgcgtcgccagccaactatcgccgctgataaccaacccaatccaacctaacccaaccctgctctctgccgacgcggattcgaatccgaggacgatcgatgacggtgggcgccggcatcgccgtccaggacggcagcctcctggcgctgggcgccaagctccccgggaggccaaccagagactgcctcttctctgaccccgcaagggacggcaaaagcgttctcaagatatggaacctgaacgaacactccggcgtcgttggcgccttcaactgccaaggcgccggctggtgccgggtagccaagaagaacctcatccacgaccagcagcccggaacggtgagcggcgtcatccgggcgcaggacgtggagcaccttggaagggtggctgatcacggctggaacggcgacgtggtcgtgtatttgcacgtgggaggggaggtggtgtacctgccgaagaacgccttgctgcctgtgacgctgagatcgcgcgagtatgaggtgttcaccgtcgtccctctcaagcacctgccaaacggtacctcctttgcggcgatcggccttctcggcatgttcaactccggtggcgcggtgagggagctgagattcggtggtgaggatgccgacgtcgagctcagagtgcggggctcgggcacggtcggagcttattcctcgaccaagccaacgtgtgtcgccgtcgattccaaggcggttggtttctcctacgatgccacctgtggcctcatcagcttcgagctcggcattcccgaccaagaaatgtacttgtggacggttacagtagagtattgaagttacaactgagaattgagatagattttctaatgcgtcagagaacgcccggtggtgtaggtattctgatttattcagtgttgtactttctattgttagttatatatattctgtacacatcccgggattttatgacaaatctagataagtggcggtccttagattttaggagcccagaacgaaattttaaatagaagcccttgttaatattgtatattgattttacaaataaaaatcgaatgtgatcaattaaaaatcacaaccttgataagttctttatgctcccgcgagtgtgttgccaggtgtcttccgtcaccgtcttagctgatgtgatgtttttagtttgagaggtcactttattctagactagcaaagtatccatacattgttatgatttttatttgtacttaagtattgaatataaaaaacaaaggc

SEQ ID NO: 17805 - DNA, 1106 bp, Zea Mays
atagatccaattgttccttaaaattacgactcgcacccacggacccaccaaccacgccgccgccggccggccacctttctccattctccgtcaatcgtcatcctatccgatccccaactagagctgttgcggaggatgcttttgcggggataagaggcgcgccccttacacggccccggtgctgcgggagcctctctgtcggcgtcggcagctacgacagcgagcacactccagtatttccaagacaacaatcatgggatccctacaagcttcttggtgttgatcaagatgcatctgaagaagaggtccggagtgcacggaattttcttctaaaacaatacgccggatatgaagaaagtgaagaggccattgaaggtgcttatgacaagataataatgaatagctacacagaccgtaagaaatccaaattcaatctgaaaagcaagctaaaagagcaagttgaaggatccccatcatggcttaaggcactgtttggatattttgaggtgccatcactagagatcatttcaaggagatttgccttttttgcgttctttgccgggtggagcattgcaacttctgctgagactgggcctgcctttcagcttgcgatgtcactcgcctcatgcatatacttcctcaatgagaagatgaagaatcttgtcagggcgtccaccacagggttcggaatctttgtgggtggctggatcttgggttctcttcttgttccagtgatcccagctttcgtcatcccgcctacatggtcccttgagctccttacttcgctgacagcttatgctttcatgttcgtgggttgcactttcctcaagtgaaacttagcagcagttcaccaagtggaaattcctgcggtcatcacgaaggaaattgctcttgctaacatctccacagcagatcccaacttactgataagcggcctgcttcacaatttttttttgtccgagagagtatgatgatctttacgttattgttgttgttgttacatgtataatataacattttagcaaccagacaatttcgatggatattgaaaagggatacacgttggattcttccacatctgccgtacggaatccttgtttgtggcc

SEQ ID NO: 17806 - DNA, 355 bp, Zea Mays
acgccatcagggtcttcaaccaggggagcagtttggcaagtttgacagcgtgcttgagccaggatgccactgcatgccttggttcgccggcaagcgtgtagctgggcatctcacactcaggctgcagcaacaggatgtgccctgtgagacaaaaacaaaggacaatgtttttgtgaatgtgatggcatctattcagtaccacgctctggctgacaaagcaagtgacgctttctacaaactgagcagcacaaggtcccatctgcacttcaatacagaaagaagaccattctcatcttcaagcactccaggaagacagaagtttgccataacaggaggtggttctaagcgcagataa

SEQ ID NO: 17807 - DNA, 3137 bp, Zea Mays
atggagaggagctgtttgacccgcgtgtcgcacagggctaactccaaagctcaggtcaacgagctgctgctggtctggaggacagcaactgatgcctttgccgtgccatggaaagaattgaaaaggtatcaaccatctgctggcctggaaaaagcttggagcaggaagagagaaatggtggcatggcaatatggcatgcattcccatgcgcagtgcacaacacaatgcctggactggattcaattcaacggccgaggcgctgcctccgcttccctccaaatgttgcgctcccgagctctcctcggcagcctcccacccccgagtcgccccgacaactcctcccagcctccaaccaccgagagcgtagaactcgtaatccaaggccagcgcgcgcacgccattgcctcgccccgtcccgctccggcgcccccccaccgccagcatgcacaggctcgccccgccccggtcgtgctgagacgacgtacctatactatacacatacacacggacacaccaaacgacgccaacgtggcgacgtcggcgaggaagatgagccagctccccgccccggccagccggctgtgggaagcgagcatccgcaagctccagaccatccgccgcgcgacgacagccacagggcccgcggccgacggcgccgatggcggggccgccctcacgcccagtctcctctccatcaattcctcctccgcgtccagcactatctaccagtaccaccacgaggacggcgaggacagcgacacgagcaccgatggcggcaacgattcggaagccggcgaggacgaggacgccggcgagcccacgcacgcggagcagctgctgcccagcggggacttctaccagggcgacctgcgcggggaccagccgcacggcgcgggcaagttcctctggaccgacggcagcatgtacgagggctcctggcgccgcggccgcgcgtccggccgcggcaagttctcatggacctcgggggccacctacgagggcgacttcgccggcgggtacatgcacggccagggcacctacatcggcgagttcggggacaccttcgcggggctctgggccaacaacctccgccacggccggggcacgcaggcgtacgccaacggcgacgtgtacgacggccactggcgcgacggcctgcaggacggccacgggcgctacatctggcgccacggccacgagtacatcggcacctggagggccggcgacatgcacggctgcgggaccgtgatctgggcggacggcgaccgctacgacggcgcctgggaggacaccaggcccaagggccagggcacgttccgctgggccgacggcgggatgtacatcggcacctggtgcgaggaggccggcgccgtgcacgccgacggcgtctactacccgccgtccggtggccccgcggtgcccgtgccccgcgagccctgcgaccccatcacggcgctgctccaggagctagaggtgtgcgagggcaagacggcgtcgctcatgccgtcgcagaaggtcctcacgtggcccggcgtggaggccgtgcagaagaagccggtgtggcgcccgcccaaggttagccttgaccaaggcaggaggtccagcgtgagcaggaggagcagcgcgtcgctggacctggacatgctgcagccggccgccgccgagggtggcgagaccgaggaggtgcgcgcggacaggtcgtgcctgcggacgtcgtcgtgcatgcgcacgccgccgaggccgggcaagaagcagggggagaccatctccaaggggcacaggaactacgagctcatgctcaacctgcagcttggcatcaggcacgctgttggtaggcagtcagcgccaaatacgctggatctcaagtcatcggcattcgatccaaaagagaagatatggacaaggtttcctcccgaaggatcaaagcatactcctcctcaccagtcctgcgatttccggtggaaagactactgccccctggttttcaggactctgcgcaagctcttcgacgtcgatccagcagactacatgatctccatttgcggggacgaggcgctccgggaactgtcgtctcctggtaagagcgggagcttcttctacctcacgaacgatgacaagtacatgatcaaaacgatgaagaaggcagaggttaaagtgctccttaggatgcttccagcctactacaaacacgtccgctttttcgaaaacactctgatcactaaattcttcggcctgcactgcgtcaacgtcaagcttacaggagctatccagaaaaaggtccggtttgttataatggggaaccttttctgctccagctacgcgatccacaggcgcttcgacctgaaagggtcctcgcatggtcgcatgactgacaaacccatcgatcagatcagcgagcacacaacgttgaaggatctcgatcttaatttcatcttccggctgccagggacctggtttgaggaattctgcaggcaagtggacaaagactgcgaattactggaggcggagaggatcatggattatagtcttttggtcggtattcacttcaaggacagatgcaaagacagcagcaatggtgacaatgggacgtcacagaatgctgaagattctgaagaaaacagaaaaggaccattgagactagggatctgcatgccctcgagggtggagaacgtagtgaagaaccctgagagtgaatctccgctcattggcgagcccacaggcgagttccaggacgtcatcctgttctttggaatcatcgacatcctgcaggactacgatatcagtaagaagctggagcacgcttacaaatccatgcagtacgaccccaactccatatcagctgttgacccgaagcaatactgcaagcggttcagggacttcatttttaaggctttcgccgacgatgtacagtaactagctaatttgacagaacagggagccgtttaactaaggcaattaacacttcttaatttggctggtgttcttttttcccacacaacaacagtgttccttttaggtaaaatcgttgatgcaatctgttgtagataaaaacacttcaatagtgcagcaatttcaccctttttttctttcttgtagcatttgtaaattttaaacattttttgtgtaattaaaactag

SEQ ID NO: 17808 - DNA, 1310 bp, Zea Mays
atgggcaacgcgggtagcaacggtggaggcgctgccgctggtcaccgccgtcggagctccggccacggccaccaccaccaggcgccgccgcctcaccagccgcaggagactgcggccaaccgctacgtgttcgcggccgccacgccgtacccgccccagtaccctaaccccaacccgccgcagtactacccgcagtacgggaactactacccaccaccaccaccatccgtgccggtgccccttccggcgccgtacgaccaccaccacaggccacccaccgccgcccccggcgagttcccgcccccgcccctcacccacccccaccactaccctggctgggctgggcggtatccctcctacggacaacatctgcctatgcccactccctacgttgagcaccagaaggccgtcactatccgcaacgacgtcaaccttaagaaggagacgcttaggatcgagcctgatgaagagtgccctggccacttcctcgttgccttcacctttgacgccacggtcgctggcagcatgactgtttacttgtttgcaaaggaagagctcaactgcaatctaacagcagtgaaagaagacctaatgaagcccgttactgttagcttcaaagagggtcttggtcaaaaattcaggcaaccttcaggaacaggaattgacttttcagtgtttgaagaatcagatttattaaagcagggggacatggatgtatatccacttgcagttaaagctgaaacaacattgcttgttgatcacccaccagaaggggatgaccaaaagatgaaaactcctaactcacagatcacccaggccgtgtttgaaaagaaagaaaatggggattatcatgtaagagttgtttgccagatcctttgggtcaatggaactaggtatgaactgcaagaaatatatggcatagggaactccgtggaaggtgatgctgatgcaaatgatccagggaaagaatgtgttatttgcctctcagaaccaagggatactactgtcctcccatgtaggcatatgtgcatgtgcagtgagtgcgccaaggtcctgaggtaccaaaccactcggtgccccatctgcaggcagcctgttgagcgtctcctcgagatcaaagtgaacaacaaatctgaagatcagcaacagatgccccaatcgccaccgctcccagcactggatccgcagcaggaagaggtgtagccatgatcaaagtcagttctgaaacattatatggctctcgtttgcggaccttcaggccttccctaaagagcttattcatcattctcttctccatggcaagggacatg

SEQ ID NO: 17809 - DNA, 2927 bp, Zea Mays
atacccgactccgatcttccaccccgctgccgcctgccggcgtgcgtgacccgggtcccattccatatccggtgccattttttaatactactagtctcgttcgatcggaatcggcttcccgtcttggctgcatttttctatccccgcgtggccgcgtgtagtcctagtctctcgccagcaccatcatcatcaatcacggcggcgaccccgccccgcctcgatcgcccacgctgcccgactggaaccggacgctgctgctgctgctgctaggctgacagcgacgacgagggggccatggctcagatcttgctccacggcacgctccacgccaccatcttcgaggccgagtcgctctccaacccgcaccgcgccaccggcggcgcccccaagttcatccgcaagcttgtggaagggattgaggataccgtgggtatcggcaagggcaccaccaagatatacgccaccgttgatctggagaaggcccgcgtggggcgcacccggatggtctccaacgagcccgtgaaccctcgctggtacgagtccttccacatctactgcgcgcacatggccgccgacgtagtattcaccgtcaagatcgacaaccccatcggggcctcgctcatcgggagggcttacctgcctgtcgaggacatcctgggcggagacgagatcgacaagtggcttgagatatgcgatgagaagcgcgagcctattggggacagcaagatccacgtgaagcttcagtacttcgacgtcggcaaggaccgcaactgggccaggggtgtccggagcaccaagtaccctggtgttccttacaccttcttctcgcagaggcaggggtgcaaggttactctgtaccaggacgctcatgtcccggacaacttcgttcccaggatcccgctcgccgatggcaagaactacgagccacacaggtgctgggaggatatctttgatgccataagcaaggcccagcatctgatttacatcactggctggtccgtgtacaccgagatcaccttggttcgggacaccagcaggccgaaacctggaggcgatgttactcttggggagttgctcaagaggaaggccagcgaaggtgtccgtgtccttatgctagtgtgggatgataggacttcggtcggcttgcttaagaaggatggcttgatggctacccatgatgaggagactgcaaattacttccatggcacggacgtcaactgtgtcctgtgccctcgcaaccctgatgattctggcagctttgtccaggacctgcagatatcaactatgttcacgcaccatcagaagatagtagtggtagaccatgagttgccaaacgagggctcccagcagaggaggatcgtcagcttcgttggcggaattgacctttgtgatggaaggtatgatacccagtatcactccttgtttaggacacttgacactgtccatcatgatgacttccaccagccaaactttgagggtgggtcaatcaagaaaggtggtccgagagagccatggcatgatatccactcacggctggaagggccaattgcttgggatgttctttacaactttgagcagagagatacctggaatgttcagctctttagatccattgacggcggtgctgcttttggcttccccgagactcctgatgaagctgcaagagctgggcttgtgagtggaaaggatcaaatcatcgaccggagtatccaggatgcatacataaatgccatacggagggcgaagaacttcatctacattgagaatcagtacttccttggaagctcatatgactggaagccggaaggcatcaagccagaagatatcgattgtcttcacttgattccgaaggagctctcattgaagattgtcagcaagattgaggctggggagcggttcactgtttatgttgtggtgccaatgtggcctgagggtgttccagaaagtgcttccgttcaggcaatccttgactggcaaaggagaacaatggatatgatgtacactgacatcacacaagctctcgaagccaatggaatccaagcaaaccccaaggactatctcactttcttctgcttaggtaaccgtgaggtgaagcaggagggagaatatcaacctgaggaacacccagaacctggcactgattacatccgggctcaagaggctaggaggtttatgatctatgttcatgccaaaatgatgatagtggacgatgaatacatcatcattgggtccgccaacatcaaccagaggtccatggacggtgccagggactccgagatagccatgggcgcgtaccagccgtaccacctggcgactaggcagcctgcccgtggccagatccatggcttccggatgtctctttggtacgaacacctggggatgctggacgacgtcttccagcgccccgagagcgtagagtgcgtgcagaaggtgaacaagatcgccgagaagtactgggacctgtactcgagtgatgacctggagcaggacctcccgggccacctcctcagctacccgatcggtgtcactgccgacggcaccgttactgagctgcccgggatggagaacttccctgacacccgtgcccgcgtcctcggcaacaagtcggattacctcccgcccatcctcaccacataggctgcaggctgcaggcagcgccatggcttctctgtttgtgtttgagatactgaaagttcagatagcagtgtttttatagttattgagtgataataagtgcattgtgcatggtgggacgataggagttagagttgttcataaatcataactactatgtactgcaccagatgacgagattgtgttgccccttgtctggtgtagcttgtgtagctttctgcgttgcagtgctgtttgtaaaggcgacttcagagttcagaattaaaacatggttgttttttcaaaaaaacaga

SEQ ID NO: 17810 - DNA, 2214 bp, Zea Mays
cccgcccccaccgtctcgactctcgactcctctttcccctccccgagcgtgcacgtctcgtcatcgccctactcgctcgccccatcccggagtctccccggctcccaaaccctagcgcctcccggacctcgcaggtgagggaggcggcgatgttcttctccggtgacccatcggcgcggcggcgggtcgacctcggcgggcggagcagcaaggagcgggaccgcaaggtgctgctcgagcagacgcgcgaggagcggcgccggcgccagggcctccgcctccagaacacctccgccacgaagatccagaaattcttcagagggaagaaggctttggaattggcccgctcagaggttcggaagaatttttgctcaacttttggggagcattgcgagaggatagagtggaacatctttggcactaattctgactttcttcggcaattactgttcttcttcaatgcaaatgaagacaatgacatagctatactttgtcatgtctgcaatttgctgctgcaatatgttaaacaaggcggagatgttgtaactctcttcactggtgtgaatggctcctcgctgcaacctcttgttgctcaccgagtaaaaaaatttgccctcatctgtgtgcaagcagtctatcaaaagaggcatgattggggcagccaacttttaacaacacctggaaccacatcagtgccttctgtgtcattactggaaactgtaggttgcttgataaatccaaaatttctttggaactgcaaagtagttggttatcttcagcagagaaagatctattgcttatttcgtggcattatcgtatctgtaccgcaaaatgtcagaaattctggtcattttgatagtgcatctgtgctggagcaagtgcttatgcttgttgcttcgcatgttggccatcatccctgttgttgtctgaaagtggatccaagatggagtttctcgtctcagcttctgtccatcccttttctatggcatcgtttaccacaactcaagaaggttttctccgttaacgggctcaacaaatattatatccatcaaatagcttgccttttgcccagtcttgttgatgtccttccaaacgatatatcagctaatcatccaggatatgcgtgcgtccttgcaaatgttcttgaagctgcaacctggattttgtctgatgcaaagttagcttctgattcagcggctgacatcattgctgtttgtacctcgttgttggatacgttgccagcagtcacaacacctactgaaagggcagatgacgatgatgagatgcccatggatgtcaatattaaaattaatcttgatgttgatttggaaagacagataactgcagcaattgattcaaagctacttcaacatttggtgaatgccctcttcagaggtacattaagcacaaatgattctgatctgtctggaccatcagatgctgaagttgatgctgtaggatctatttgtgcttttcttcatgttacgttcaatacatttcctctagagcgaattatgactgtcctggcataccggactgaaattgttcctgcactatggaagttcataaaacgttgccatgcaagccgaagatggccattttttttgaagtttgcatcttcattacctgctgattctcctggttggctccttcccatgtctgtattctgtcccatatacaagcacatgttgaagatcattgataccggggagttctatgaacaggagaaacccctttcccttaaagatttgaagtccttggttctcattttaaaacaggcattatggcaacttctgtgggttattccatcctcttctactcagaaagtgtcacccaacccttcaggccttaaaaagttgtcagtggagaatgtcaagactagagctagggttgggttatctgaacttctcacacagttgcaagactggaacagccgactaccattcactgctgcaagtgatttctattctcaagaagctacgagcgaaaattttgtgtctcaagcaatacttggtaatactcgagcatcagagatcataaagcttgctccttttttggctccatttaccagtcgagtcaaaatattcacttcccaattaacgtgttctagacaatcaacatcacattctgcattgacaagacagcggttcaaaataagaagaagtcgacttttggaagatgcttttgatcagctaagtttgctttctgaagaag

SEQ ID NO: 17811 - DNA, 1030 bp, Zea Mays
atggggagcaagggggtggcgctcgcgctgctgctctgccttagcggcgcggccgtgggcgcgtgggctcgcccggtcgccaccaaggacgctgctgccgacgagaagttcctgtggctcaagaagcactttggcaagggtggtggcggcttgggaggcggcggcggaggtggcggcgggctgggtggtggtgttggccacggcttcggaaaaggtggcggccttggcggtggcatcggccatggtcttggtggtggctatggtaaaggtggaggtcttggtggtgggatcggccatggcattggcggagggtatggtaagggtggtggctttggaggaggaatcggccacgacattggtggagggattgaccatggcatcagcggtggctatggaaaaggcggtggccttggtggtggatatggcaaaggtggcggactcggaggcgacattggccatggcatgggtggaggccatggcaaaggtggtggaattgggcatggcatgggtggtggattcggcaaaggcggtggtggtcttggcggcggtagtggctacggtgctggtggcggcgggggccttggtggtggaagtggacatggcatgggtgccggattcagcaagggtggtggtcttggcggcggcgatggccttggcggtggaagtgggcatggcatgggtgccggattcggcaagggtggtggtcttggtggcggcggcggcggaggtggtggcggtgggtttggcaaaggatttggctttgggtttggcaaaggcagcgggttcggtggtggtggcggcggtgggggcggcggcggcatcggtgatcaccattgatacgtcagcatgcagcatacgtctcctctcgttctatcacttacttttgtattcgttcatgcttcgtaccttgtcatgactatgggtgatggtgatatccttcacagtagtattatgtgtgtactccatgtaatgctcgctccctaaaagattcgagaaatataaatgaagttaatgcttcgtttgaatttga

SEQ ID NO: 17812 - DNA, 2233 bp, Zea Mays
cgaacttcccttcactaggagtggagcaccgcgccgcaggggatgatttggacgggaaggcagaggttcttttggatccaaatactctaagcaaggatgggacggttgctctttcaacatattctatcagcgaggatggaaactacattgcttatgggctaagtgaaagtggtagtgattgggtctctattcatgtgatgagcattactaacaagcagcctatgcctgataaattatcctgggtaaagttctcatctatcagctggacgcatgacgggaaaggttttttctatggtcggtatccagcacctagaggaggggaagtggatgctggaactgagacaaacatcaatcttaatcatcagatatattaccatgttttgggatctgatcagtcagaggatatattgtgctggaaagatcccgaacacccaaagtattcctttggtgcctcagtcactgaagatggaaagtacatcatattgggcatctatgaaggttgtgaccctgtcaacaaattatactattgtgaaatttcttctcttcctcaaggaatagagggctttagagggacacaggatttgcttccgtttgtcaagcttattgacaattttgatgctcaatatcaagttgtggccaatgatggtgatgaatttacatttttgaccaataaaagtgcccctaagaataagctggtaagggtaaatatcaaaaatccagagctgtggactgatgttctctcagagcatgaaaaagatgtgctcgaatcagccgacgccgttaacaataaccaacttttggtgaattatatgtcagatgttaagcatattctgcagataagagaccttagaactggaaactttattcatcagttgcctttggagatcggttctgtttcagagatctcgtgcagacgagaagacaaggaagtatttattggcttcacaagctttctttctccaggcattattttcaggtgtaacttagcatctacaatccctgaaatgaagatgtttcgagaaatttcagttcctggatttgatcgcacaagttttcaagttaagcaggtttttgttcctagcaaggatggaaccaaaattcccatgttcataatgtcgaagaaagatatcgatcttaatggatcgcatccaactttgctatatggttatggaggattcaacataagcataacaccttcatttagtgttggtcgcgttgtgctatgcaagaacatgggctttgttgtctgtgtagcaaacattcggggtggtggagagtacggggaggagtggcacaaagctggagcacttgcaatgaaacaaaattgttttgatgactttgctgcctgtgctgaattcctcatttctaatggttacaccagttccagacgtttatgtattgaaggcggaagcaatggtggtcttctggttgctgcttccattaatcagaggcctgatctctttggatgtgctctcgctcatgttggcgtcatggacatgctccgttttcacaagtttacaattggtcatgcatggactacagactatggttgttcagataaggaagaagagttccagtggctcattaaatattctccccttcataatgtacggagaccttgggagcaaagctctggtaataactgccagtatccagcaaccatgttgttgacagctgatcatgacgatcgtgttgtgccattgcattcactgaagttattagcaactttgcagcatgtcctgtgtaccagcactgaggacagtccgcagacgaatccaataattggtcgcattgatcggaagtcagggcatggagctggcaggccaactcaaaaaatgattgacgaagctgcagacagatatagctttatggcaaaaatgttaggggcttcgtggactgaatagtgaattttgtccagcttagtgtggagatggtgagcaagattactctatgcagtcaaagtaaagtggctgtaaaagttatattgcttatgttttgctcttgcttggatgatcatccaccaaatagtatagtgtttatgcttcggtttgagataagggttcagggagcattgtcatgcttggcgttggtgcaccatttctttcatatatatcttttgattgttaaattttatacgttactacttcattgattctaaattataagatgttttggttttttcagatatattgtttttgttatgctatattgctatgtatactatatgtctaaa

SEQ ID NO: 17813 - DNA, 401 bp, Zea Mays
cctgtactgcgagcagccggtcacagcgcgcagcgccgtctcctgcgattcccggctgcctccacctcttctcccacagcgccggcgtgctcctctcctttcacgctacgttccctccggccccggcgtcgacggctaagaaacccttaacctaggaacgagttcgcaccctcgggacctgtggcgatgcatctcactctcgaattcgggggcgggctggagctgctcctggagaactccaccaaggtgcacaaggtggaggtcaccacgcccaaggacggccaaggcaaggtgacgatgaagttcttgctctcttgggtcaaggagaatctgatcaaggagcgaccggagatgttcctcaaggctgattccgtttattcaattgggagcccaggctcaat

SEQ ID NO: 17814 - DNA, 1958 bp, Zea Mays
gttcctcctccccacacttttgacagaagaacctccttcctggatttgattccccaaacctcgagagcacaatatgaggattagggttacatgggaattctgaagcagcagaggacgacgaaccaggagctccccattcaagaaccctacccgcaggagggaatcgacaaacccttttgtggagcaggccatacaattctccgtagcagctgctaaagcgaccattattgataaggagaggaaggatgtggtagataagttactgctgcaaggtctgaacattacaattattggtcacaatgatttctattcttatagaaagcagattgaagcacgtggtctccctcttactccggaggtactgctttcattgcctccattctcttcaattacatttaactcagaggttgctaatggaacaatgactggagagaaatgtaaacctgaagtagccaaaactggacttgggtcatcagctgccatgaccacatcagttgttgcagctcttcttcactatcttggtgctgttaacctctcatgttcaggacaatcttctggcgacaatgcaagtggacgagaacttgacttggttcacgctattgcccaaagtgcacattgtttagcacaagggaaaattggcagtggttttgatgttagtgctgctgtctatgggagtcaacgctatgtaaggttttctccagaaatactctcctcggctcaggctataggtgggactgtcttgccagatgtagtatcagatgttctaacacaaaggtgggatcatgagaataaacagttttcattacctcctctgatgacccttctccttggggaacctgggaccggaggatcatctactccatcaatggttggatctgtgaaacggtggctgaagtctgaccctgagaaatccagagatacatggagtaaactggccattgccaattcaacgctggagaaccaactgaggatcttaaaaggactttctgaaaatcaccatgaagcatatgagtccatggtgaggtcctgtagtcgtctcacatatgggaagtgggcagaggtggctactaaccaacatcaagaattaattataagatcattgttggctgcaagggatgcttgccttgagataaggcttcacatgcgagagatgggcatagcagctggtgttccaattgagccagattcacaaacacggctactagatgccactatgaatatggagggtgttttactggctggagttccgggagctggtggcttcgatgcagtgttctcagttgttttgggggatgcaagtaatgctgtagcacatgcttggagctctgttggcgttctgccacttcctgttcgagaagactgccgtggtgtttcattggaagacgctgacccgagaacaagggaggtgtcagcagctgtatggtccatccaaattaactgattctactgttaatagttctgtttatgcatggtgtaccaatatcatttattaacgatgttcgcattgctgcagttacaattcatagagacaacatagtataaatagtagaagccgttacggattaaagccaaactagcaggctctatcttttataagtacaaaattgtgccgaatgctctatcttttataagtacaaaattgtgccgaatgctaggaagagttcgaggtatgtggttaaataagtgctgcacttgcagcaagatagcacatgagcaaattagtgcagaaaataaggaattctatggatttccatggaattagtgcttctagttgtagctgtggaatatacgtgagcaaatgtcaaggtatcaacaaacttattttgcaccgtgtgttcaggtgacggaggaaccagatgagccttctcttttacataggtaagctggagtaaggcaatgatggaggaaattgagtctatcactcacctcattgacctttcgcccaattatcgagcgat

SEQ ID NO: 17815 - DNA, 2627 bp, Zea Mays
cagacatgccctttcctttcgtctgttttcctacggtcgtccattttgttctcccgttccgcatagcgtacgctcgctccctctctatctctctctctcggttctcccgttcccccgcgcggcgatctctctcgtggcgaccagcgggcgaccgccgcacgcccaggtcgtcattggctcctcagccaggtgctgttcgggcccctaaactgggcgccggcgacgagcacgcgccaggactgtaatctgatctcgtggtggtatggttcgtcctaggattctcgtggcttgttcatgctccgagactccgagttgtgctttacctcgaattgctgcagtatccgtagggggcatgattgatggtggaacatcctcaccagtgtcagaaatgtcaatgtagctctaacgttcatttctcagtttgctgaagtaaacgatttcgggatgggtttgcctcaaattcctgtggttaaggaggaagagcctactgaagtgagtacacctgccggttctagtttcagtgtcgatggcccctgcgattcgggtaaacttctcgagggaagctcaagtggaagttggtttcagaacccatccatcagcgacttcaagagaaaatttgcaccaggtgctgcttcgaatggattaaatagtcagttcagaactagacatgccgttgatgatcctgcgggctaccaaagcctgaatcctaaaccaagagatccaaattatagatcatgcactaaaatcaaatctactctacatatacctgcaatgagggttgttgggtttgattcaggaactgatggttctaccgggggccctgatataatggtatctcacaaaatgcattcatctttagtcattggtaattgtgattcatcagttgtacatcacgaagttcaggcaaggaaaagggtgttgtcaccattaactaatgcgcttcctgctggacagttctatgggaatgcgctgaatattggttccggcgatgaaaaagttcagaaccctcgttgtgttagacagctctcttattctggcttccatgacagtaaaaaagctaacactggagctcttgattcctttcagccatctactaggtcagaattgagatactccgattggagtacagggcaggggttctgtaagtttagttctaacacattcactgatggtcctttgcttgagggtagggaattattttcatgctcagatcaacctggagttgaagggattatgaaccttgcaaaggtgcctgcaagattgtcacattctcctccacccactctttctccactccgtccaaaatggatgcatagaatgaaggctgcaagagctcagagggatttgacgggacgaattgaaaatgacatcattgatttgaaggaaatgggaaggtcaaattttgacgattattcagaatatgtcggtacgataaggatgggtgatatactagaagaaaccagtattttgcatgatggatttgatacaatgatccctaagagaaattttcataggagataccggtgcttgggtccagaatctgcccctgtgtctacacacattgaatgtattaatagctcgaacctcctccctgtaaggaggtcattagttggctcctttgaggaatctctcttatctggtcgctattcatgtggaaaagacaatcagagtattgatggttttctggctattcttaatgtgactggcggtagtttttctcccccaactcagaagtttccgtttacagtgagcagcattgatgaagatagctccctgttgtactactcgtcgattgatcttgcggggaggttgcctacaaacaataccaaaggcccaaaacttaaaagaagcctcagtagcagtgattcacggtcaacaaatagccgattacgcattcccgtgaaaggccgcatacaactggtggttagtaacccagagaagacaccacttcacacctttttctgtacctatgatttgagtgacatgcctgctggaaccaagactttcatgcggcaaaagatcactctatcctctgcttctccctctcatccgaccagagaagaaagcaaggccagtgatgtaaaggtcgagtcagtccagtgtggaagtgaacttagagagttcggggctctattttctgaatgttctgacaatgggcatgagttggaaaagggacgttctgcagatatggaatgtttctccatggaatgtgacgttagagaaccaaatgaaaatggtacttcggggaattcagaaaatgatgctaatgctgaggggtgctgctgtcaaataaactcatgtgaaggtggaaagatatatttcaacagatctcccaaggtcaatgatattccagctggaggggttctgcggtatgctttgcacttacgttttctgagccccttctccaagaagtcatcaaagtcaaggtatcattgcaaattggatatgtcatcacaaccacacagtcgcagtaggactgaggaagagagaagattttatctttacaatgatattagagttgtctttcctcagaggcactcagactctgacgaaggcgaggaagcgaagaattataagaagcatatctgacagcaaagggacgaatgcgtcttatacactgaagaaac

SEQ ID NO: 17816 - DNA, 1498 bp, Zea Mays
actagcatgtaaatatagaaatatataggaatataatcttaaataggtttattgatttaatagagaagtaaaaaaaaagaaaaaaagaaaacagttaagattaaggttatatgggccaccagtttcccggtccatgctaaactcaccctgcagccgccacctcatgaactcaccctgcagcaccctcaggcctcaccgcctcagctgccaccctcaccctgcatccgagagagagagaggagagttgccgccggagggaggaggtcgccgcggaggggaggggctcgccggtaggggacatcgccggcgcctggagagctcgtggaggggacagccaccgtcaccgccaggagacaagcgccgccgccgctaggaatcaggagacaagcgagcgcgatggggatggtgagactatggacgaattcgaagaacggttgtttgggggcaaggacacagacaaaggatcactctacgagaagctcgatagggctgagaacactggtaggagatacaattttgggttgtccaagggtggtttcactaggttaagtgacagtagcagctctggtttccctgggtttcctgcatctagcgacaggagcagttcaggatggatggatggttatgattcttttaatgatggcttaaatgatacaattgctaatgcggcacgcaacatccaaatggaggaggacgaggacgtcgacggtgactgggaagatgactttgagttcaggcctgatgttcggtttaggcgaggttcaacgtattctgttcgggaccttgaccttagaaaacctgcagccgcaaagaaccctcctagacgacagtttgaaacaactacagcggaggtactgaagaaggctgattttaggacccgtataagtgcaaaagctcagcgtaagattgcaagagagatcaaaactgcgcgtgcgtttgggttaatgccttttacaacaatgggtagaagaccattcttctttggcagaagtgcggaggagcattattcggatgatggatattttggctttgtgaagcagaaggatggtgagcctgttgagaatgaggacgctgagccaaatgtggaggctgtgtaaacattctggagcatcctttttttgcaagcgctccgttcggtttcttctggtgccttcatgacaagtcacacaatgctcgttttgcgtcttcagatcatagcgtagctcagcttgaataaaactgtaacatcacgcctgttttgtgaaaactcgtgccttgctcaattgtgccactttagcagacatccccagctcacctcatcctggctggagatcatatcatatgcagatatgaaatggaacgttggatcagagttttagtggacgctcaattttttttgaggtagcagcactgatttcagtttctgttggataatgattgtttggctgcttaacgagaaaaatatagtatgcacgtacaaaatgttagattttttaataactaaaatgttttcttcaaa

SEQ ID NO: 17817 - DNA, 963 bp, Zea Mays
ctttagaatactggattttcataatgtgagaaggttgcccttcaggcactgaaagctagtgattggcacttggaaggagcttttgacttcttctatagccaacctcaggtttctgtggtcaatactcggcatcttgaagatattttcaacagatataaagaacctgatgctgatatgataatggtggaaggaatatctcaattttgcaatgatctgcagcttgtcatatcatggcacatgaaagccgccacaatgtgtgaatttactcgtcaggaattcattggtggactgcaatcaattggggtagattcaatcgagaagtttcgtggaaaattaccatcattacgagctgagctaaaagatgacaataaattccgtgatatatacaactttgcattcacttgggcaagggaaaagggtcaaaagtctctctcactggagactgctattggaatgtggcagttgctatttgctgaaaggaactggcctcttctggatcattggtgtcagtttttacaggtcagacacaataaagccatatctagagacacatggtcccagctgctggaatttgtgaagacgaccgatccacagttatccaactacgacgacgaaggtgcctggccctacctcatagacgaatttgtggaatatctgactgagaacggactcgtccagcgtaaaagatgaacaacggggagatgcatctccaaacaatggttgggctgtacaaacatgatttatctcggtcagctcgacgcccagggcctgatattggcactcctgctcaattcattcaccaaactgttggcatatcattgaatttgcttataaacgtggggaaacataacttgcctgggaagtggtggctgtcagcctgcgatcgtgaactgtaacttatcgaaaatgcaacggagtttgggactctactatatgatttgtttcagtttttcttagggcttg

SEQ ID NO: 17818 - DNA, 167 bp, Zea Mays
atcgaatgtcacatctttattatataataggagttctatacaaaataaataaataaataattacattataaggagacaacagtccagcaacccaaagttgactgggagacgacgacctagatctctcacgaacacatcacagcatccttcatgtgcctcatcctgcg

SEQ ID NO: 17819 - DNA, 676 bp, Zea Mays
ggaaggtgcttaagaagtggagattcctttagtttctgttggtgacgatggtaaattatttactgttggaggcaatgacggaaaaaacaaatttgaattggtaaacagagaaaagaggaaactgacacttggcgacattccattgtcccttacatgtgcacttcataaaggatctatactaacggacccaacttctgaagaagaatcaattatagagacctatgtgactgttgtcgttgattcttcagaccgcctagtgtcattacaaaaagttggaggcacagtgacatccatggcaactattaaggagtgcattagcttggcgaaagaaaggaggctgaggctaagagaaattctgatagactctgtcaaagccatggaagtcgaccatactgaataattctgcaaatacattcagttaatctaaccggattatttcttgatggttctctgtgcctcggctgcactgattgtaacagcatttttgttgggttagtccaagtatgtagctatttgtactccgcacatgatttttgacttaagtagccagacaattttatctgatgagcatgtctgcaatgcaccatttctcgcaagttgctatcttgtaacaccctaattcacattttgcagtattttaatttatttttcaagatttcattagaactaatgcata

SEQ ID NO: 17820 - DNA, 4529 bp, Zea Mays
ggcctctcctactgttgtgactggtgccacctctcctttcccttcttcctccgtgccccaatccctcttctcccctcgaccagccgagagagcgcccctaccgcagcagctgcagtgctgctctgctctgctctgttctgcccccacttcaccctctcgtctcaccccgcctgcagcttggtcgcttttctccccagtctcctcccctccaccctctcgtctcgtcgcacctcacctgcttggtcgcttttctcccccaatctcctcgtctcccgccggcaccaataccatcctctgtccgctcgctgttgctgttgctattcccgtccgtcccgtgcttctactcgctagtcgtttcgtattcgtatcctctctcctcagccgccctgctcccctcccgtcctctggtgtctggtcaaaccagcggctcccaagatttgccgctgcttccttcctggagaaatcaagcctgtgcggcgagaaatcaagaggaagggggaagagagggagaaagagagaggggcgggggtggaggaaagaaagcctgccccttgcggacgtgcctgctccctcgggggcattcaattggagccaacagtgggcgggtgggcggctgctacagcacggcggcctccataaattagctccccgcgttccggccccttccgccccctgtcgtcgcacccgccccgtgtctcccccgatcggtccgtcgatcacgcggacgcccgccggagcatgcgcgccgcgggcctcggccgccggagaagcagcatcagccgccgcgccgccgccggcgtccggaaggagatgtagcgctagctccccgacccgcgaggaaagggaaaggggaatgaccgttacggcgcgcgggaggagcggtggagccgggatgggggagaagggcggcgctcccgggctcggcttcctgagcctcgatcggatgcgcgtcctcctgccgccgctccgcctgccggagaagctgtcggccaggacgctgcggacgcacctcttcactaactaccggatgcgcaaggtgcgggacagctccagctggctcatcccgctctgggtcagctcttgggtcctcgtcgcctccctcatctacctttgcatgagctaccaggccgtcggcaagcgccgggagtctctcgccagcatgtgcgacgagcgcgcgcgcatgctccaggaccaatttaacgtcagcatgaaccacctccaggcgctcgccatcctcgtctccaccttccaccactccaagacaccctccgccatcgaccagaaaacgttcgcgaggtatgcggagaggacggcgttcgagcggccgctgacgagcggggtcgcgtacggggtgcgggtcacgcacgccgagcgggagcagtttgagcgccagcagggatggagcatcaagaagatgtactcctccaagaccaagaatcagtcgcagggacccgggaacgccgaggacgccgaggtgcgggagccggcggaggagtatgctcccgtaatcttcgcgcaggacgcctacaagcacgtcatctccttcgacttgctatccggcgccgatgaccgggacaacgtactccgagctagagaatctgggaagggtgttcttactgctcctttcaagctgctcaataatcgccttggagtgatcttcacctatgctgtgtacaagtatgagcttcctgcaaatgccaggccacaggagcgcattcaggctgctataggctatttaggtggcatatttgatattgaagctcttgttgataagttgcttcaccagctcgcgggcaagcaatccatcatggtgaacgtttacgatactactaatgagagaccaatcagtatgtatggttcgaatgatacaggcagtggcatgtgccaggtcagcacactgaacttcggtgacccttcaaggaagcatgtgatgcactgcaggttcattcagagcccaccttggccttggatggcaataacgacatcaattggaactctagtgattgctttactgattggatacatagttcatgctaccgcaaaacggattgccagagttgaagatgactttcaggagatgagtttgctcaagaagcgcgcagaggatgcagatattgccaagtcacagttcttggctactgtttctcatgagatcagaactccaatgaatggtgtcctagggatgctccaaatgctcatggatactgatttggacacaacacaacaagactatgttagaaccgcacaagccagtggcaaaactctggtatccctcatcaatgaggttcttgatcaggcaaagatcgagtctggtaaacttgagcttgaggtggtaccctttgatcttagaacagtttgtgatgacattttgtctctcttctgtgggaaagcacaggagaaaggactggagttggcagtgtttgtttctgatcaagttccacaaacactaattggcgatcctggaagaataaggcaaatcattacaaatcttgttggaaactctataaaattcacagagaagggtcatatctacttgacggttcatgtcgttgaagagattatgcattgtctggaggttgagacgggaactcagtatacaaataccttaagtggctacccagtggcgaacaggaagcgcagttgggaaaactttcgactttttagtagggaactgaactcatccgagatgccttttgcacccattgcatcagactcaataagcttgatgatatcagttgaagatacgggtgctggaatcccgttcgatgctcaatcccgtgtcttcacccctttcatgcaagtaggtccatccatcgctcgcatacacgggggcactggcattggattaagcatcagcaaatgcttggttggcctcatgaagggagagatcggattttcaagtaaaccccaagttggttctactttcaccttcactgcagtgcttacgagggtccattccagcagaaatgagaataaatcatcagaatttaaagagatcaatgcattggtggtagatcatagaccggtccgtgccaaggttactaagtatcatttgcaaagactgggagttcagactgaattgacaactgacctagatcagtatatttctaaaaataattgtggatcacagattgcaaagcttgtgctcattgacaaagaaacctggctgaaagaatcccactccatgcctcttttggttactaaattgaggaacaaagatcagccagactctacaaagttatttcttttggagaaccctaaaagttctgtcaagagcaattcacatatattcagggaatataacttgaatgtaattatgaagccacttcgtgcaagcatgcttcaggtttcgctacaaagagcattgggtgggatagataaactgcattgcaggaatggagtagtcggcaattcaacactgggcagccttcttcacaagaagcgaatcatagtggttgatgataatattgtaaatctcaaggttgctgcaggcgctctaaagaaatatggcgcggaagtaacttgtgctgacagtgggaaggaagcaatcacactgctgaaacctcctcacaattttgatgcttgtttcatggacatacagatgcctgaaatggatggatttgaagccacaaaaaggattagagtgatggaaagagatctaaatgagcaaatagaacgtggagaagccccaccagaatgcgtaggggttcggcagtggcgaactccaatattagccatgacagcagatgttatccaggcgacacatgaacaatgcttgaaatctgaaatggacggttatgtttccaagccattcgagggcgagcaattgtacagagaagtagctcgctttttcctaaatcaagaccaagttcagtaggtaggcttatatggagtgtaaaatagtggaggatatcagggttcacccatcgaggctgaaagaattttgtcagagatcccatgttcttgagagtgggcatcaatccccagagttaggggccctattaaaacgctagcaacgctgggatgtggcctccagttaggtggaaaacactttaggctggagatggaaccacctatgttcggttccttggtacatctgaccaagctgcaaaactaaatgtgcaatgtcttgaaatcaaggtgcatgtggagctatttactcgacaatctgaggtcaaggcgtgtgaaaaaaaagcccagctgcattcactaaccgcagatgtcctctgccactacaatatagagtagggagagaaattttccttccccagaaggtaccggctgtacatattaggtattggttgtttgtgcaggcatttgttggcattttgttgtgcatcgtcttcggtctgtattgtttgggtcgaagctgtaaaatgtaaatggcgttttcaaagatggaagttttgtttgacaaatacatcggtcgtcatcagcttgtcttcctgagtttctctcctgctactggttctctcccaaccagccaatcactatactgaaggctgcctgttggtgtggctttatctgat

SEQ ID NO: 17821 - DNA, 3518 bp, Zea Mays
tgacgtcttgcgagctcatcatgcttggagtgccaatgccaaacacgcagacgcagcagctccgaagcaaactccacgactcggtctcctcttcctagcaccatccggcccatccagccgccgccgccttgcatcctccacctctccggatcccgccgcgatggaggaagacgacgagttcggcgacctctacacggacatcctcatccccactcatacccccgcatccacctccgcgctatccaaccctgttctagtcgaaaccctacaccgcccgcctccacaccctaatcctacccccgtggcggcggcagcagaggaggtcgacgatgactggctcctaggagggagcgaacccatacccggggtcgacccgaccggcgattgggccgacgaggacgacgatggaggggagcccgcacctcccgcgaagcggtccacctctgcggatgatatcgatccgctcatggggggtggtgcgggggattccgggccggtcatccctgggctctcgtcatcatcggcagctggtgcggccgggagcgacgaatgggacagcgatagcgaggacgacatccagatcgtgctcaacgagaccgatggccgcccggggcttgtggaggatgaaggagacgacgaagacggtgaggacctcgtcatcgtcgccgacggaccagcgatggaggagcaggattggggagaggacccagcagcggcaggggcagaaggagagcgaaaggacggatgtgagcctggtaagacggtggcagcaccgaccggaaggatcgggtacagtggcggcggcccagggttccatcagcagcaccattccatgttcaagtatgtacgacctggcgctcctggtgcttcagtaggtggggtacctggtggtcctggtcaattccgccctcctgggcctttaggccctttctctggtcgtggcagaggtgaatggaggcctgctgctggtcgaggcatgaacaaaagttttcattcaggctatggaatcactccatggggtggttcagggcgcaattttggtggtggactagattttgcacttcctcctcacaagacaatatttgatattgatgtggaaactgcatttgaggagaagccatggaaattccctggtgctgatatttcagacttttttaactttggccttgatgaagagaagtggaaagatttttgcaagcagctggaccaacttcgactagaatccacaatgcaatctaggatacgggtgtacgaaagtggccgctctgaacaggattatgacccagatttgccacctgagcttgctgctgtgactggtcatccagacatctctgctgacagtcgcaataaaatggttaacgggcatacagattttagtgcccaaggaagaggtccggcaaacgtacggacaccattgatgacagggagacctattcaagttgaaactaattacacagaccggtttccatctgttgattcacgctcgcatcgaatgcgtgaatcagattcggttattgagattgtgtgccagggccgtgattcgatggatgatgagacagtggaccaaactgaaaaggattctcaaggaggtaacaaaggagcccattgtattgagggaaagccatattcatcagataagataaataattctgatcataactcaaattcagtgaaaaagacacagcataagggacagctaccagtttcatctgaaagtgatatgttatctatggatgccaatactcactcccctcccagctacaaaacaagaggttcacctcgtggagcatggccattgaaaggaagctcactgggtcagaactctattcgagaaattgaaagctccaatgaagtaattcctcgtcagtcatcttcaaagagatgccatgattcccagaaagagaaccttattgagggctcagaaaataaggctgattcagattcagaagggtcacttgctgctaatgatgacgtggcagataaactgagtacagaagatcattttgatgatgctggtggtggtggtggtggtgatgatgataagctcacattggttggtcgtgttgaaatggatgttgatgatgctacctcagaccccaacatgcctagtgatgcaaatcacgatgataacctggttcattctgatacaaagcagaaacacatatctgtggttgagcaacctactgaacacaatagcagtgaacctgatgaattgaggaatactgaaaatagtaaagggaggtctggtagcagcaaagatcagcagaaacaccttgaatctggtgaagaagttcttcaagataagcaattaaggagagtaaataatgtaagaatgcatcatgacgcggaagaacacaaacttcgccaaaaagatgagcattcacgagatgcaaaatcagatttggaaagatcacgtttaccctccagaggcagggaagatatccaccaatcttatgcaaacagagatagggttgacatacagggcaggagttataataaggtaagagagactgaaattttgccaaggagagatgatggtgttcacagccgacgtgctaaagaggaagatttgaggctagagtacaatgttgaaggtggtgcaaggcatagaaataaggtgaggcccattgataggaatgatagagatgaagatcattcacggaagcgtttggatgatggcgataggagaggctctcgacaaagagagcgtggtgatgtggttttgaatcgccgtgaaagtgatgattctcttataaagagaaagaaggacgatgagaacttgcgtaggttgaagcctgaaaatgaagacatggtcgcgacacatggttataaagcaagggatgacagtaacagaagaaaaaaagagagggatgatggaattgatcagaaaagacgagatgatagtggtagactgcgggaaaaggatgatgatcgttatcatgtcaaacagaaggatggcaactggagacaaagagaaagggaggatagacagaggcccaagcaagaaaatacattaaccgttcagagggaagaaggaagaggaactggtcggggtagtcggatgatggatgataagttagtcagtggtggtaggaagaaggatgaaccaagatcttcattattaagcaaagacactcaagagcgtacaaggcaaaatgaaccttcgaggagaggtcagggtgtggaagaaaacaacatgcagaataaagggcgttttgatgacaattcaaacagtgagaggaactccaggcaagaaaaacaaaacaataatcgtctatctggcagttctgacgctcgccatgcaggcagagataagcatagggagagcacaaggaagggcagaggttccgagcttgctgagcatgatctccacagatcgagcaaaaggaggtgtgaagaccatgaaagccatcgcagtgggaaggtttgcagttgcagcttaactcttctacatatgaactagcccaatggaacttctatcttacggtcttttacacctcagattagtagattctcta

SEQ ID NO: 17822 - DNA, 671 bp, Zea Mays
gtggacgtggttgacggagacggcgaactggtcctgcagcatgcgcgcgcgctcctcgcacatgctgacgagcgcctcctccgccttgcgcagcgccgcgtggcggaagtaggagtgcaggaacacccagagcgccgcggagcccagcacccacaccagcaccgccgcggcgatcagcttcgccttcacggtccacccgccgccctcctccgcatccttccccgcctcctccgccggcaccggcgccggcgccgacaccgcggcctgccctccgcctcctcccacgcccatcccaggctccaccccccagccgccgcagctctcacatgctctgcggtctgcgccgcaggccaccgaccactcctgctccttcgcgagaatccttttgacagagaagagagagagagagagaggaggtcaggactcaggaggatgcctcctcgctttttttttccgccaatcctctctctctcttctatgctctcccgccgctgctttgatgtgtttttgttggcttgcggcttttcgcgacgagggagaaagcagccgggattcgagtgaatcgaattttgctggatttgaagaggtgcgctgccactataaaaataaccccatggttttttttccctcgaccctgcgggcgacgcgcgacggcgcattcattggctccc

SEQ ID NO: 17823 - DNA, 282 bp, Zea Mays
cttttacagcatatgatccaggatcaacaacacaatagtgagctaatctattgtcggcatggatgtagtcactccacttcagaaaagagtcagttgcatggctcctggcgaacattggacatgtttattttgttacctttgctgttacaaatttggcactcatttattttgagcgttgcgtggtcaaagaaagaaggttgtttatttgagtggcatgaataaaaaagtcttattaactgagtgtgagtgttttgatgatgaacataaaatgacctccgactg

SEQ ID NO: 17824 - DNA, 1876 bp, Zea Mays
gcaaatgtgtctacccctttgagcatcaattcgtctgggaaagcaccactttctgaggttcctgaaagttccaggacaaatgttgttgggacaagctctgtagtccgttctttgttcagtgcttcttcgtcatcagtcagttcatcaccagaaaagcagccgacagagaatgaaaaaatggtcaatgaaatgcttcatgaggatgccagtgcttttgctggcaggtctgatagtgctagtactgctgaggaggagttccagaacaaagtgagagaaaccatggagaaagctttctgggatatggtcaccaactccatgaggggagaaagacctgattatagtcaattgatcaacctagtaaaggaagtgagggattcgttgcatgacctggctccaaaagaatggaaggagaaaattcttgagaacattgaccttgaaattctgtctcaggtacttgggtcaggttcccaggatgcacaatacttggggcagattttggagtattctctggatatggttcgcaagctctctgctgctgcaaaggaggatgagatgaagaaaaaccatgataaattattgagtgaattgtctacgaattctgaagttaacggcgatggcatcaactcatttgtcattgctgttatcaagggccttcgtttcatcctggaagaaataaaggaactgaaagcagaagtgagtaaagcacgtatccagatgatgcaacagatcataaaagagtcggctggggttgagtacctgcagaaggcttttgctgatcgctatggacctcctgagacagcaccagcttctcttcccctaactctgcaatggattttgacatcgaagaacattgcggaagaagaatggagtgaacattcagactgtctttcagtaatgccagcagcagggcaggctcctgctcttgttccggtactccgatctggtcatggagctccagtagggcaaccatctccttctgcaggagacacctctggtcaaccagagtgcaaggattaatctgctgaggctgagggctgtgcagagccaattccaacaggtgatcgtgatcgccacaagcatgctcgtcctgcgccaagttctgatgagcgagaactcgagggccactcctctggaactggaaaatgccatctcagaactcgtcaaggctctcgcggacatactgcacagctcacccgattccggcacggaagagattgtgcaggcgatggtcaatgcatcagcctcagttggctcaccatcagaggagaaggttcaggccaggatgcagatgatcacccgggtgttcctcaagagcctccagcccggtgacgtggtcttcaagaaggtatcccgtgcggtctactgcgccttccgtggcatcatcttaggtggcagtggtcccaagggccagaagctggcggacgctgcattgcgccgcatcggcgccaccaatgttgtcgacagggtgttgaaggctgctgaggtgctgatcaaggtggcaacggtatcagagaaggtccacggcccctggtacaaagctctgatagtctgatgtgagcatgaatgtgaatggtttggcttttgtgaatacagacggtgaaagtgtaaatccttgttccactgggtgggatgggagatatggtgttgtacagcaatttatagttgttggtcagtaggcagttcaggatgtgaagaattctggtgagctgggcgaatatggatgctctttcaccaggatttagtcaggctcgatggatggatgctaaaacgcgtctggaaatgtaaattgtggcaccttgtttgattttcgaactgaaataatgtaaataattgattgcaagttatttgtgctctgcacatattggttgtttcggcc

SEQ ID NO: 17825 - DNA, 65 bp, Zea Mays
cccgccgttctacctacttgtgctcgcccctgcgtcaaccccatcgtcgcgccggctccctgctc

SEQ ID NO: 17826 - DNA, 1965 bp, Zea Mays
aaaacgccggtgccagtggctgcctcccgtctccctcttctcctacgcgcacggggagggaagaattggttcgttggcgttggccttggcctcggatccagagcgcggaacgcgtgcggcgttcggatcgacccgctcgaaggccggggggcgcgaggtaggggccaggatcggcggcgatggtgaaggccgtggtggtgggcgcggcggtcgtggcgtgtgcggcggtcggggtggcggtggtgctggagcgccgccggcgtaagcgagacgccgacctcctggggtccgcggaggcggagaggaggaggcgcgcggccgccgtgatcgaggaggtcgagagcagcctcgccacgcccacggcgctgctgcggagcatcgcggacgccatggtcgccgagatggagcgcggcctgcgcggggacatccacgcgcagctcaagatgctcattagctacgtcgacagcctccccaccggagatgaacatgggctgttttatgcactggatcttggagggaccaacttccgtgtgctgcgagtccagctaggaggaaaggagaaacgtgttgtcaaacaacagtatgaggaggtgaagatttccaactcccagagggtaggcagagagaacttggtttcactttttccttcccggtgaaccaaacatcaatatcatcaggaacactcatcaagtggacaaagggcttttccatcaatggcacggttggtgaagatgttgtttctgagttgagcagggccatggagaggcagggactagatatgaaagctacggcattagtcaatgatacagtgggcacattggctggtgggagatatatggataccgatgtagttgcagctgtaatattgggcactggtacaaatgcagcatatgtggagcatgcaaatgcaattcctaaatggactgggttactgcctaaatctggaaagatggtaattaatacagagtgggggagcttcaaatccaacaaacttcctctttcagaatatgacaaagccatggactttgaaagtttgaaccctggagagcagatatacgagaaaatgatttctggtatgtatctcggagagattgttcgaagaattttactgaagttggcacatgaagcttctctatttggggatgttgttccacctaagctggagctgccatttatattgaggacgccagatatgtcagccatgcatcatgactcctcacatgacctcaaaactcttggagctaaactgaaggacatagtcggggtcgcggacacttccctggaagtaaggtacatcactcgtcacatctgtgaccttgtcgcagagcgtgcagcacgcctggccgccgcaggcgtgtacagcatcctgaagaagataggccgggacaaagtaccaagcggtggcggtaaaatgccgaggaccgtagttgccttggacggtgggctctacgaacactacaagaagttcagcagttgcgtagaagcgactctcacagacttgctcggcgaggaggcttcttcctccgtggtcgccaagctggccaacgacggctctggcattggagctgcgcttctcgcagcctcacactcccagtatcagtatggcgcgagtgactagtagtcctgaaatgggcgcggatcgagattttgagtgtagctctcatttatcttttcttttttcccttttcaaaacatctttttggggatttttttcggcttccttttgttggctattccgtggatgcacttacggctctgcattgggatgtagctagtatagagccaatgagtttggaggttatctaatggcacaaggcaggagcatggaaatggaagcagagcaatgacattcatgctctgcccattcttttttccccttgtatggtgttgtaaaccaataaaaaaatgttaacccttttttttgtgtgtgttggcaataaagagaatacgataatttgaccatgt

SEQ ID NO: 17827 - DNA, 2514 bp, Zea Mays
acgccggtacgccagacgccacgcccatttcttctccacgaagcctttgaagtcccaaatcaactcccgcagacgcctccaaacacccagaccagaccaccgtcggccgtcgctagcctgcgcaacatctccaggtccagggtccaggccacagctcgagcccgacgaccgacgcctagacgcggctgggcggtcggcctcgcctcgtctcccccctccacgcctcctttctcctgctccgcgtctcgatctcgcctcccccgccgcgtggcgcgacccggccaggtatcgcccaccctgcgctgcggccatggataacttgatcaccctcgtcaacaagctgcagagggcctgcacggctctcggagaccacggagaggagagtgcactcccgacgctctgggactcgctgccggccatcgccgtcgttggaggacagagctctggtaaatcctctgtgttggagagcgtggttgggaaggatttcttaccgaggggttcaggcattgtaacccggcggccgctggtactgcagctccacagaattgatggtgacagggaatacgccgagtttatgcaccttccaagaaagagatttacagattttgctgccgtgaggaaggagatagctgatgaaaccgacagagaaacaggccgttcaaagcaaatatcacctgtccctatccatttaagcatattttctccatatgttgtgaatcttactcttattgatcttcctgggcttactaaagtagccgttgagggccaaccggagaatattgttcaggacattgaaaacatggttcgctcatatattgaaaagccaaattgtataattctggctgtttccccagccaatcaggaccttgctacttctgatgcaatcaagatatcacgggaagttgatcccaaaggtgaaaggacctttggtgttctcacaaaaattgatctgatggacaagggtaccgatgctgttgatatactggaaggaagatcttaccgtctccaaacaccatgggttggtgttgttaatcgatcccaacaagatatcaacaagaatgtggacatgattgctgctaggcgtagagagcgagagtattttgcaactacaccagaatataagcacatggcttctaggatgggatctgaatatttaggaaagatgctttcaaagcatttggaacaagttatcaaatcaaggatcccggggatccaatctcttataacaaagacaattgcagagctggaaactgaacttaatcgacttggaaaacccattgctaatgatgctggggggaagctgtacacgatcatggaaatttgtcgtatgtttgacagtatctacaaagagcatctggacggagtgcgccctggcggagaaaaagtttaccacgtcttcgacaatcaatttcctgtagctattaaacggttgcagtttgataagcaactctctatggaaaatgtaaagaagcttataacagaagctgatggataccagcctcacttaatagctccagaacaaggatatcgacgccttatagaatcttgtcttattagtatcagaggtcctgccgaggcagctgttgatgcggtacatgcaattctgaaggacctcgtccgcaaggctatcaatgaaacacatgagctgaagcagtttcccacccttcgtgtggaagtaggcaatgcagcttttgagtcattggatagaatgagggatgaaagcaagaaaaatacattaaagctagttgacatggaatgcagctacttgacagtagatttcttcaggaagcttccccaggatgttgagaggggtggaaatccaagccactctatttttgatagatataatgactcttatcttagacgaattggaactccatcccaaaatctattgtttattgccaagtgcgagaggccaagcgctcgctgctcgatcacttcttcactgaactgggagcaagagagatgaagcaactttccaagcttctcgacgaagatccagcagtcatggaacgcagaactaaccttgcaaagaggctggagctgtaccggagtgcccaatcggaaatcgatgcagtcgcatggtccaaatagccctgatggctaagatatctgttcttacatgttctttatccctcgtctggcgattgtctcccctattctggggcatatatagctgatttttgtctgttgtaggtcaggtcattctatagattaccgcagctgtacggtgtcgtttagttgtgcttttgttccttgtacttgagggtctaggggacaccaggctgctgtacgcttgcatcacggacaagttcataaattgtgtttttgttaccatgcattcttttattccatctatgtgcagctatatgaagcatgttcttctgtcagtatgttcaaagtcttgataggccttgatcggttgcaagaggaacgaggggattgagcaattttaattagcaagggatgtaatctctccaatctccttcaatccatccttaactgaacaagctt

SEQ ID NO: 17828 - DNA, 1581 bp, Zea Mays
aaatcactcactttatctcgatgcttttgaaggggcagaagtagttttccatatggctgctccagattcatccatcaacaacttccaccttcattatggagtcaatgtcgatggtgaagagactcatctatactagttcacctagtgtcgtgtttgatggagttcatggaatttttaatgcagatgaatcaatgccttacccagataagtttaatgattcatattcagaaacgaaagcggatgcagaaaagcttgtgatgagagctaatggtagggaagggcttcttacatgctgtatacgcccaagtagcatttttggccctggtgataagctaatggttccatctttggttgctgctgcaagggcagggaagtccaaatacattattggtgatgggaacaactactatgatttcacctacgtggaaaatgtggcatatggccatgtttgtgcggagaaaactctatcatctgaagatggtgcaaagatagccgctggaaaaacctatttcataacaaatatggagcctataaaattctgggagttcatgtcattgattttagaaggtcttggatatgaaaggccttcagtaaaaataccagtctctgttatgatgccggtggctcatgttgtagaatggacttaccagaaatttgccaagtatggaatgaaagttcctcagctgaccccttcaaggatcaggctgctttcatgtaacaggacattcagttgctcaagagcaaaggagcagcttggttatgaacctctcgtgtcccttaaggatggagtgaagagaacagtagagtcgtactcccatctacaagctcagaatcataggagtatatcaaaggcttcaattttcctcgggaatggaaatcttgcaaaaacagtactttgggaagatgcgaagcaaactgtgacagtgcttctactgttggctgttatctactaccacttatttacatgtggttacaccttcatcacagcgatggcaaagcttttgtcactaactgctctgttcttattcattcatggcatgctgccatcaaatctgttcggtcacaaggttgagaaactcgaggcctctaattttcacatcacccaggcttcaaagcgtatgagaaatgggaggacagcattgatagtatggtgggcgacgcctgtaccattcttctgcactttggttctgccaaggaatcatctagctagaaacaaacgtaggtgtagcttgcagactgccagttactttgtttactgatattatcttcagctccagctgtttctgggtttcgttgacctaaattttcttctgtattcatctgatggtgttgtagaattgcctagcggcacatatgcaagttttggactcttttcctcttgatagttgatgtacaatatgaaattgtacattttccccctttcccctcggagtggttctcttcccatcaacggtgacaataggctctagtaaagatcgaattggattatgattggactctatttctattcatttttgaactaaaatttatttagagtccaaagaaattgtgaagaaacatttggatcgcgatccattacca

SEQ ID NO: 17829 - DNA, 2782 bp, Zea Mays
tggccccggcccattttaaggcgtttcctctccggcgcagagcgggtagcgggacgaactcgtcactggtgtgggccgtggctgtacgccgcagagtgaagcgagacgagacgacgatgcgcaagtgggcgctctcctccgcgctcctccttctcttcctcctcaccaccctccccgacccagctaagaagctacaggtgaatgcggaagagagcagcgatgacttagctaacccacccaaggtagaggagaagcttggtgctgtccctcatggcctgtccaccgactctgaggttgcccagagggaagctgagtctatctctaggaagactcttaggagctccgccgagaagtttgagttccaggctgaggtgtccagactcatggacatcatcatcaactcactctacagcaacaaggatatcttcctgagggagctcatatccaatgcctctgatgcattggataagatcaggttcctttcccttactgataaggaagttctgggtgaaggtgacactgcaaagcttgagattcagattaagttggacaaagagaagaaaatcctctccattcgggataggggtattggtatgaccaaggaggatcttattaataaccttggaaccattgctaagtctggcacttcagcttttgtcgaaaagatgcagtctggaggtgacctcaatcttattggacagtttggtgttggcttctactcggtgtacttggttgctgactatgtcgaagtggtcagcaagcacaatgatgataaacaatatgtttgggaatcaaaagctgatggatcgtttgctatctccgaggatacatggaatgaaccccttggccgtggaaccgagataagattacatctgcgagatgaggccaaggagtacttggaagaggataagcttaaggatttggttaagaagtactctgagttcatcaacttccctatctatttgtggtcaaccaaggaggttgatgttgaagtgccagctgatgaggatgagacaagtgaagaagaggattcgtccccagaaactacagaagaagagacagaagaagatgaagagaaagagaaaaagcctaagacgaagacgataaaggagactacttctgaatgggaacttctgaatgatatgaaggctgtatggcttcgcagcccgaaggaggttactgatgaggaatactcgaagttttaccactcactagccaaggacttcggtgatgacaagcctatgggttggagccacttcactgctgaaggagatgttgagttcaaagctttgctcttcattccaccgaaggctccgcatgatctctatgagagttactacaacagcaacaagtcaaacctcaagttgtatgttagaagagtgttcatctctgatgaatttgatgaccttcttccgaagtatctcagctttttgaggggtattgttgactcagacacactgccgctgaatgtgtcacgagaaatgctccaacaacatagcagtctgaagactatcaagaagaagctgatccgcaaagctcttgacatgattaggaaacttgctgaagaagaccctgatgagtacagcaacaaggataagacagatgaagagaaaaatgagatggaggagaagaagggccagtacgccaagttctggaatgagtttggcaaatcaatcaagctgggtatcattgaagacgcaactaacaggaaccgccttgcgaagcttcttagatttgaaagtaccaagtcggatggcaaacttgcctcccttgacgagtacatttcaaggatgaagccagggcagaaagacatcttctacctcacgggaagcagcaaagatcagctggagaagtctccgttcctggagaggctaaccaagaagaactacgaggtcatcttcttcaccgaccctatggacgagtacctgatgcagtacctgatggactacgaggacaggaagttccagaacgtgtccaaggagggcctgaagctgggcaaggactcgaggctcaaggacctcaaggagtcgttcaaggagctgacggagtggtggaagaaggccctggagagcgagagcgtggactcggtgaaggtcagcagccggctgcacgacaccccctgcgtcgtcgtcacctccaagtacgggtggagcgccaacatggagaagatcatgcaggcgcagacgctgtcggactcgagcaagcaggcgtacatgcgcggcaagagggtgctggagatcaaccccaggcaccccatcatcaaggagctccgcgacaaggtcgcccaggacaacgagagcgaggagctgaagcagacggcgaggctggtgtaccagacggcccttatggagagcgggttcaacctccccgaccccaaggagttcgcgtccagcatctacaagtcggtgcacaagagcctggacctgagccccgacgcggccgtggaggaggaggacgaggccgaggagcagccggaggtggaagagaaggagccggcggccaaggaggggtcggagccgtccttcgacaaggacgagctgtagtcggcgtgctgtggtctcgtctcgtcttcgggatctgttttgaagtctagctgtagctcccgtttagttgagatatcggggagcccactcactgccagctttgtgtttaggaacgtgatacgggatctttttttttttgttgcctgtctttgtacttgtacaaacctcagttcagtgactcggtctaattaccggctccgattagtgaactgtttctgtctgattaaaaaaaaaaaaaa

SEQ ID NO: 17830 - DNA, 834 bp, Zea Mays
cgggtagccaaaaaccgcgcgccgtttgggcaaggcccaacccagccagccagagaggcgccccgttggaatcctgattgggagcgctgggacggaaccgaacgcgttgccattagctgtcgctgggacggaaccggaacgtttcgctagccctcgttcccgttcggccttgacaaccccaccccaccccacccccaagttcccaacgcagaggatcgaaccgaatcctccgcaactcgccgccgccgggaccgaccgacccggtcctatcgatcgaggatgtcgtacgcctacctcttcaagtacatcatcatcggcgacacaggcgtggggaagtcgtgcctgctgctgcagttcacggacaagcgcttccagcccgtgcacgacctcaccatcggcgtcgaattcggcgcccgcatgatcaccattgaaaataagcccatcaagctccagatttgggacacggctggccaagaatcattcagatctattactagatcatactacagaggtgctgctggtgcccttttggtttatgatattactaggagggagaccttcaatcatctcgcaagttggttagaagatgcaaggcagcatgcaaatgctaacatgactgtgatgctgattggaaacaagtgtgatctttctcatagacgtgctgtcagctatgaggaaggtgaacagtttgccaaggagcatggtctggtctttatggaggcatctgctaaaactgcacaaaacgttgaggaggcattcattaagaccgctggtacaatatacaagaaaatccaagatggcatatttgatgtatcaaatgagatgatgggagga

SEQ ID NO: 17831 - DNA, 404 bp, Zea Mays
gcccaattttccccgagcaaaataaaattgcgcttggcagcccattatcccggccgaatccacgggagaggaaggggctatctggcctagcctcacgaggtcgggctggaaaccctcgcctctcgcggtctcgcctctccaagacacccaggccgccgccttcgcctacaggcaccttgccgcctccgtccgctgcccgtggcttccgtccacctccacctcactcacccactacatcgccgaccaagcgcagcaccgcgcgtggaccagacaccgcccgtggcttccgtggaccagacgccgcccgtggcttccgtggacgcagcaccgtgcgtggaccagccgctgctacatcgccgaccagggatactaacaaataggttctaaaattgagttgataagga

SEQ ID NO: 17832 - DNA, 280 bp, Zea Mays
attgtttgtatgagcagtaaaaagaggcccattgcacaaatgcttagattagttttggttggggtgcgccaggcttaggcggtagtgcaacacctaagcgacgctctaggcggtagtgcaacacctaagcgacgctcgagagctccagtagcaagctactgttgcgagctctaccccacaaaaaataaatttaatatcgaaatagacatatagtctacatatcagatattaaactgataagaacagatactacacttgatcttagccaaaaggccgagaa

SEQ ID NO: 17833 - DNA, 498 bp, Zea Mays
tcagttcaatgaacaagaagaaacatgcagacacatgacacagagtcatttcaaactggtctatcaagcaaatcgaagccttgcaccaagtttttcagagttacaggcgtcaagctatccatccgcgaccacgagtctaaccccaacctaaagaacatcgagctggaaggcaattttgaccagatcaagcaagccagcgacttgttgcgtgatctcatcgcaaccatcagcgcaagcatgccagcgaaaaatccatcttctgctgtggcgccagcaggaggaggccaaggcagtggtccggggggcacgagcagcaactacaagacaaagctgtgcgagaacttcttgaagctatgcgagaacttccaacacgactatgtatgagatattatctcttattatgactggatgagatgtgtcttatggctatagatgagacttttgtggtgtaattgatgagactatagatttaaatgttgttatgtgattgtgtgtgag

SEQ ID NO: 17834 - DNA, 2289 bp, Zea Mays
cccattcatatgaacgtggcatgggcaattacaacgtgactgctggaatctttggttggcaacctggaagatgctgcattttccattgttaggcaggccccaaagtcaaaactgtcatccatacttcgaaaatcgaatgaaactgaatggaagcaagggaagctgctccatgctgttgacgctgtgaaggatattgagcgagaattagtacggatcagcactagtaggccacagtgggccaaccttgtcatggctgttgattctagagtggacaaaactctttccattctgaggcctcaagcactcacggattatcgggctctactagcatcactgggatggccaccttcattgtcttcaccagacacagagaaggataagtacccccaaattccgaatcctctagtcttgatgaatgagggaaataaagcgagatactctcaaagcttccaagcactgtgtgctctccaacatgtgcaggggaaccgtgaatcacgcctgtgtcagacagcaaaagtgactcctgccctggcagatttgaagtatttcactaggaccgcttgcttcgacaatgggctttgggcgattgatgaattagttcaccctattgcttcaaggatggaatatcattttgtcaaatggtctgaacagccggagttcattttcacccttgtttacaagataacaaaagattttatggatggagtggatgatgtactgcagcctttgattgatcaagcaaggctagtaggattaagtgccaaggaatcttgggtaactggaatggtgaaaattcttgtaggataccttgagcggcaaattttcccggcacttgtctgctcttatcaggatcatgctactgttggaaaacctgaagtagattcctcttggttgcacttaaatgacgtaatgatttcttttgataaaagaatgcagcttctagcggattcaggaatccagaaaatgacatcactttctgaaggtctgtctaggtccttgtctgtcttttcaatatatgctgagcaccctgactggcttcagatatgggctgatgttgagctttgttcagcacaggataagctgaaatctgaaatggaagatgagacaagttggtcatgtagtggtcagcatgaccagcgtggtcacatggaaaattcaacgaagtttcttctctctacaagagaagactacaaagctcctccggtgtgtgaatttgttaccaaaactgctttgtcaatggttgaaagaggccgtgttctgccaaacaggggaatgcagatccagtataacagatcctcttcggttaggttcctgaatggcttttttcttgtattgcgcgaacgatgtgaagcattgcaattgtcgaacacggcactagaggatcattctttgtcaaaaacttcgtgtgcaattaacgccgctcgttactgtgaaaacgtgcttcgggaatgggatgaagatactaccttcttggatatgggtcctcaaggatctctgtatacagatgaaatcggctttttagtcaaattagggaccgatcacctggaacagatactgtcttgggttctgcttgagtttgaagatctgtcctgggaatatgttcagagcattggatcatggagtggacagaccatcttagatgatgagatcctggatgaagaaaacacaggagtgtctcctggttttgttcccagtctagatgttctgatggacaggaccgctaagttgaaacgatatcttaactccaaggatttccttgatctgtggaggagtatagcggaaggccttgactactacatctacagcagcatacgatgggccgaaatgcacagtgcttgctggaaacactaatggatgacacgaagagtgacgattgcctaaagcgtgaaggattgcaccatgtaaatgctagccaggctgcaaagatcttaagcagcaggaagtttagtgggtaattttgttcgtacaaagtgtagctgagaatgaccttcagcgaagctcgatgtggagattaacaattccaggccacaacaaagacaggtgccactaaccaaggagccgtcgctattggcatacatggcacgcaacaacagctgctgcctacttggttacttcctggaattctttaggcgatatctaggagagggctgttcaccgagttttacttcgtcttgcaagcacaaagctgccatgtaatcagttcatgctgtttgattaacttgtagtcgcccttgtgcagaatgcctcgtgctttctaattaatccaaacgatgaaaaatttccccgcat

SEQ ID NO: 17835 - DNA, 1473 bp, Zea Mays
cgatgacacgatctcatgacggaagggccagtcacggcaccgcagcatcgcggtcgcagattgccgtgccgagcgaagcgaccacaacaaagcggccagcgaggctctccgacaccgagccgcgcgcacgcaacgatgcccttcctgctcacgccgggcgctcgggcggtgccctcaccgtcaacgctctcgcgcctactgcttccgctccacctacaaattactaatggccggcacaaccaccagcacggtcacgtccccgcctctcccctcctataccctcgcctccgcaaccgccgcagccgattcttcgcggcctcctcctcctcctcctcgcctcagatggcggcgcctgccgacgccgccggtggctcctctgacgcgttcgaggtgatccgcgttcaccaggcaaaagctgttcgtctttctccagttgaagaaatacggaccattatggaccgaagtgtcagatgtgttcttgctacccattctcaggatcatgctggttatccatctggttcaatggttgattttgcatgtgatcaggatggttaccccatattagcagtgagtagtttagcagtccattcaaagaatctctctggaaatcctaaatgctcacttcttgttgccaaagatcctgaggacagaactgatactgtaatcactgtatatggcgacgctgttcctgtttctgacgaagaaaaagattcagtgagaagtgcttacctacgcaggcaccctgatgctttctgggttgactttggtgacttcagtttcctgcacatcaaacctaaagctgtgcgctatgtatctggcgttgcaactgctctccttggttctggagcgtcaaaatccccagaattcaatgttgcagagtataaggaagcaaaagttgatccaatatctcaattctcaactcctatcacaagccatatgaacaaggatcatgccaatgatacaaagctcattgtgcaacactccactactgtcaaggtggattttgcttatatgctggacgtggacagccttggttttaatgtgaaggctggttatgatggaagtgttctgaagttgagaatccccttcccaagacaggcgcaagacaggaaggatgttaagacactaattgtggaaatgctccaagctgcaagagcctcatcttcagatcctgaatgatgtcgtcggtctggaatgtgaagaatcgtgcaaattgaagtaaacctaatgaataagagttattgggtttccgtccaatctctgcaccaactgaaggtggggccacagacactccatggattgatacacgaccttgtatataatataacaaagagcgcttgagccttgaagtacttgtagttgaatgaatacaaagcgatttcactatattgtacttactgacatgcataacaatttcaacggattgttcaccaaatgactgaactaattttaaccaaacaacttaattttttc

SEQ ID NO: 17836 - DNA, 1631 bp, Zea Mays
gtgctagggtttcccccgtcttatcgcttcctcgttcccgcagccgccgcccaaaccctagcaaacccgtcctccgccatggccgacgaccactactcgtccaagcggaagtacgacgacccctcgccgccgccgcggcgcacggggttctcttctggcccgccgcctgcctcgccgcccgctggcggcgccccgtcgtacaacagcgttgcgccgccccccgatgagatccagctcgcgaagcagcgtgcgcaggagatcgcggcgcggatctttaacgccgcagaggccaagcgccctcgcgtcgacaacggcgacgatgacgtcggcggcttcggtggaggaagttccctgggtggcagcggtggtggtggtggtggccgcatcgggggcgcaggacttggcttctcgtcctctgccggtggtgagcagtgcaccacagtactcatatggtggacatcagggtacaagcaaaaagattgaaattccaaatggaagggttggtgttattattggaaaagctggggaaactattaggtatatccaacttcaatcaggagcaaagattcaagttacgagagaccatgaagctgaacctggtgcactgacaaggcaagttgagctttctggcaatcctgagcagataagcaaagctgaacagttgatcaaagaagttatagcagaggctgatgctgggtcatccggtgctgtatctggtggccggaaatacaatgcaccacagccaggcgctgagacattccagatgaaaattgctaataataaggtgggattgattattgggaagggtggtgagaccataaagtctatgcaggccaaatctggagcccgcattcaggttattcctttgcatctgcctgctggtgatacttcaactgaaagaactgtgcatattgatggcactcaagaacaaattgaacatgcaaagcagctggtggctgaggttaccagtgaggtctgctttctttctcttgttgtgtctgatatctgtgattgctttgctctcttgtgctttaacctgtcatttaggttgcttctggttcgttctgtttattatattgttttatgattttcccctgttctttttgaaaatcttgtttcttttgcttctttgccgccgtacattgattatactgctgtgctaaccaatgtctgaaacatattgttcgtgggtacagccacaacatgcaaggagattgttatacgacttattccctttttctgaacatagcttattaatagttttgggcaaggttttcatgacttaagtattatataataaagcgaagagttgtatttgtaaactaacttgttctttatcaattagccactaccgtaggcctgttaaatggtattccatagaatctgcagctaaagttttgacaagtcttgatttgaaattcatatgattgttcacgtcatatggaatatggatgatactcttgggcaaagaccaatgagtccttgttgctcagtggttattgtttattcatttctccacaaagagccaattagtgtcaatagcttgccaggaggactgcaaactatcctggagagcaggtttgttactgtttaatgtcaatgtcctactggatagaacaatgtgttttcac

SEQ ID NO: 17837 - DNA, 2659 bp, Zea Mays
atttttatgcactgggctcacctgtcggccctccgctgcagctccagcccccagacccagaggccagatccccttccgtctcaactattccttcgcacgccgccggcacccgcagggccccacctgccagtgaaaacttctcccccgcagttccatctctccgtcgccgtcgtcgtcgcgtcctccgcgtctccggcgagtctagagagagagagagagagagagagaggaaggagggtggagggccgcgcccatggacgcggagcttctggagctgcagcggcagctagaggcggcgcagagcgcgaggtccagcgtgcgcctgtcggagcggaacgtggtggagttggtgcggaagctgcaggagcgaggcatcatcgacttcgacctcctccacaccgtctccggcaaggagtacatcacatccgaccatttgaagcatgagattaagatggagatcaagaagagaggccgtgcatctctagttgacttatcagataccctgggggtggacctttaccatgttgagaggcagtcacagaaggtcgtctccgatgatcccactctaatgctgataaatggcgagatcatgtcacaatcttactgggacaccgtgacggaagagataaatgagaagcttcaggagcgcagtcagattgccttggcagagattgctgctcagttacatattggatccgagcttgtcatcagtatcctcgagccgcggcttggaactattgtgaaaggaaggctagaaggcggacagctatacactccagcgtatgtctcacggattactgctatggttcgtggtgctgcaaggggtataacagtgccaacaaacctgccatctgtttggaactccttgcaacaacagcttcatgagatgcatggtgctagtggagtttctgtggaaggttcattcttccaatccattttcaatggtttgctaaaagaaggtgctgtactgggatcagtccgtgcaggaggacagtggacaccagctgttttcgcccatgcccaaaaggagagtgttgatgcttttttctcacagaactcttacattgggtacgacgtgcttcagaaacttgcaattcctcaacctaaacagttcttggaggcccgatatccagatggtattgcattggatgctgtctttgttcatacttctgtggttgatatgctcgatactgcggttggtgatgcaattgagaatggacactggattgattctctttcagttcttccatcatatattagtggaccagatgcaaccaaaattttatctatctgtccatctctgcagaaggctatcaagtcttctaaagcagtggtatttggagagtcatgtgtcttcagtaacatgtttattaagggtatttttgaccgacttgagaaagatatggactcgtttggtattagacttagtgttggtcaaggaagacctgtgaatacgaatctgggtagtgagcacaagacagggtctggtcagcactcggacacaaaagatcttggtggtaatggcactagcagtaccggtgcttcatcagacagagggtcaaagaagaaaagggggaaagggacagggtctaccaaaggtggatcacttgaaaaggatgatgacaatgaagaaagcattcctgttaagggcaagaaatctcacaggaaaaacaaggatgctggtgcatctggtgacataaaacatggtggtaaaaaaacgtcagagaaaatgatagaggagaatgcaaatatctttcctgatgaattgatagaagaaaaggttttggctgttgctccagagttagaagagttgggaggctctgatgactcaaatgccccccttaaattgttgtcttctcacctgaggccaatgcttgttgactcatgggcaaagaaacggaacaccatgctgtcaggaaatgctgaaagaaggcgacgcttgctcgataatctgcagaagcagatagatgaggctgtcctggagatacaactctatgaaaaagctttggatgtatttgaggaagatcctactacttctggtatactacacaagcatcttctaagaagtatgggcactccaatagttgacaaagttttgattacattggataaggacaacaaattgaagaatggaatggaggttgaggatagcgaagatcatgtccaattgagcactgctgaccgaagctctctggccaaggatcttcctagtgcattgtcattgaaggctcaagctttaattgaagcattagagggaaagaggtttgattcatttatggatgccttaagagatatactggaggaaagtggcttgacatttaagaagcttgataaaaggttagagaggacaatgctgcattcctatcgcaaggatttgacagcacaagtttcatcagagaatgatcctgttgcctttcttccaaaagtcgttgctttacttttcctgcaggcatataataaggctattcaggcaccaggaagagctgttggtgctgttatcacactgctgaaggataagctgccagctgcaacctacaaggtattgactgattatcacagcactactgtgaaacttttagcactacaagctgctgctactgacgattgcataatgttgaaaactttatagatcgccagttcgaatctatttggaaagcca

SEQ ID NO: 17838 - DNA, 2102 bp, Zea Mays
ctctacgctacgcctctggtgcagcagcagcacccaccgcaccgccactgggctgctgccttgcaaaaagtggggcgagtgaagaaagcaggcagccatgcttttcgggagaaggggaagggaaaagcagccagccagccagccaccacactaccacagcaaagcaaagctcgcacctcgctgcgcactcccactgcgcttctcttcctcgcaccagcagtccagaccaaggagggacgcggcgggggcagcacctttcctcttcctcctcccccagaaatcaattcctcttcccacacgatccatccggaggcgatccagctcttcgcgccctctcttccccaaacaggatacatgagtggggaggccgcggagagagctgattgatcgggaagaagaagaagaacatcgcaattcacttgctcctgcggcggctgtactagggtagccgagaacccgcccatacccatggcatcctcctcggggggcggcggaggccgtaggatgacccccggaggagactcctctgcctccgccggcggcaggaggatctaccgcacccagaccgccggcaacctcggcgactccatattcgacagcgaggtcgtcccgtcgtcgcttgtcgacatcgcccccatcctgcgtgtggccaacgaggtggaggccagcaacccgcgagtagcctacctctgccgcttctacgccttcgagaaggcgcatcgcctcgaccccacctccagcggccgtggtgtccgccagttcaaaactgcgctgttgcagaggctcgagagggagaacgatcccacgctcaagggcagggtcaagcagagtgacgccagagaaatgcagagcttctaccagctctactacaagaagtacattcaggcgcttcaaaaagttgctgataaagccgacagggctcagctcaccaaagcctatcaaactgcagccgtgctcttcgaggtcctcagagccgtcaatgtctcccagaaaatcgaagtcgataagtcgattctggagacgcacaaccaggtcgaggaaaagaagaagctataccttccttacaatatcctcccgcttgatcctgacagtgccaaccagcctatcatgctctatcctgagatccaagctgctttccatgctcttcgtaacactagaggtctgccatggcccaaggaacacgaaaagaagcgtgatgcacccaaggaacacgaaaagaagcgtgatgcagatcttcttgcctggcttcaggccatgtttggattccagaaagataacgtatccaaccaaagggagcatctcatactcttgcttgccaacgtgcacataagacagattcccaaatctgaccaacaaccaaagttggatgaccgagcactggatacagtaatgaagaagctatttaagaattacaagaggtggtgcaagtatcttggtcgcaaaagcagcttatggttgccgactatccaacaggaggtgcaacaacgcaaacttctctatatgggtctttatctgctcatatggggcgaggcagctaacctgagattcatgccagaatgtctttgctacatctatcatcatatggcctttgaactctatggtatgttggctggaaatgtgagcccgacgactggtgaaaatgttaaaccagcttatggtggagaagaagaagccttcttgaaaagagttgtgactccaatctacaaagttatagagaaggaagtagagaggagcaagaccatgaaatcaaagcactcacactggagaaactacgatgatcttaatgagtacttttggtcaagagattgcttccgattgggatggcctatgcgatctgatgcagattttttcaagactccaaatgttcctcttcaccatgtggatggagtatgtaccttgtgacaatgaatatacttacggcatttgtcaaatcaattaggtttgagctaggtaatattttgttacatgagttatgagtatcataatgggagcgttgataaaaactagagtactagacacctttatagctttccatagacctgatactataggcatttggcaaatatacgtccgttctaactatttctgagaagaaacttcat

SEQ ID NO: 17839 - DNA, 1317 bp, Zea Mays
gcctgcttcactggaaattttgagtcaaggaatccattgctacatatggacacagggatacatcgttctcaataggccatgggcatttgttcagtggctccagaaagcagacataaaggaagactatattttgatggcagagccagatcacataattgtcaagcctatcccaaacttgtcgagagatggtcaggcagcagctttccctttcttttacattgagcctaaaaaatatgagaatgtgttgcgtaagttcttccctgaagacaaggggccaatcactaagattgatcctataggaaactctcctgtcattattgagaaggaatctcttggaaggattgcaccgacttggatgaatgtttcattagcaatgaaaaaagatcctgacgcagataaatcttttggctgggttcttgaaatgtatgcctatgccgtggcatctgctctccatggagtgggcaacatcttacgcaaggactttatgattcagccaccttgggacttggaagttggtgattcttttattattcattatacttatggctgtgattatgacatgacgggtaagctgacttatggcaaaattggagaatggagatttgacaagagatcatacacggacaaacctccacctagaaatttgccgttaccaccacatggtgtagctcaaagtgtggtgacacttgtgaaaatggtcaatgaagcaacagccaacataccaaactgggactcctatgccgctgctttttaacctgttacaaatttggctcacaattttgtttgccagatatttccattccagctgactttgatacatgataattgcctaacatggaagatgagtggatgatacagtggaatgcataccaggttttacacaaggctgccggttccttacctttctgattgaatcctgataatatatggtgcaatgccatcccttttttctcctaattttgttaaacacatgcacatcagcacatgacacaatatgtcaaaacacactcacctttggtgaaagctgcaatgtagatgactgagagatgtgatgttcttatctggatctgaatgtgcttattagaagaagaaaaaaaagagtcaggcgctgctctgacaaacgcaaaacctcctgtgtactggttttcctaatgcttgatttactcgattattcatttggaatgaagctgtgaaaagttgcatcaatcaaactcaatgtgcaatataagccgaccctctggaggtaccaacaacttgtgagacatttatttgttgtttatttacgtaattatttgtttatttgatctcatacaaaat

SEQ ID NO: 17840 - DNA, 6311 bp, Zea Mays
ccttctgagaggcaaccacaatccccaatcacaaaccctagggaagccggtaggcaggcaccggcggccgacaagcgcaacgctgcgacggtgcaaccgcgttgccatcgcccagcgcgaggctgcgacaagcggacggaggcgaatgcgcgccaccgcctagcgtgcgaactctgcagcgcgccaacggaagtagagcaggcgggcagcatccagcgtcccggcctcccggggccgagctcgagcgccgcgcacacacgtccgactgacggtgtgtagtagcggtggctgggaatactcaatcacccaaatcctggtctggcactattccactcatagaatcagtatgtccgacgctgagccacctcctgcaatggaggtggccacgctgacaaccccggatgttatgctaggcgaggactacaaggatattgaggctattgagggtcagaaggattacgagacttgttatggtggaggtggcagtgttatagtggcaaatgagctcgtggggatttctgaagaccccaaccaacccgatattgctactgctgacgagccagaggagggtgctgatgtagaggggcaaactaatgacattagtgctgccgtgtcaacctccaagctggtggatgatcccatggaggttggcatgcaaacagaggttagtgctgctgcagatgatctcatagaggtcggtgctgctctggtatcatctgcagaggattgcacagcggtggctgcttgcctggttaatgatgactgcaatataattttccctggaggtgtgcataggtccgatgaccaaactgatcaggagtttggtggcaattcccttgacgctgatgaggtcgctctcttggtaaatgacatacaagatgacagtgcaaggatggatatggatgtttcagcccatggtgatgtgcatgctcaggatcgggaaagctcacagttggatgtggctacagctctgttaaatgaggtgggaacagagcttgtggaagctggtgaccatgctgtacaggaatgcacaaatatggatatgcggattcaagccggagataacaatgaggcagaacgtgttggcactattgctgacactgccacaaatgaggagcacagacacatgggtgaagttaccatgaccagagatgatagtgagaaacatgatgtggcaggtggtgttgatgtgcctgatgagaggatacaaatgggtaggggtggactgcctggagatgataatgagcaaaaggaagttgcaacagctgatgaagatcgtgtggaagatgaaggcatgcaggtagatgcagtaaacattactggagacatggttgaggaaggcagaattgctgttgaatacattgcaggtgaagctgtaattggcgagggtggtattgatgtccctgaagaaaaggctgctcagatagacagggcgggtaatgacattcccgaagaagagggtctccaaatgggggaagctggcttgattggcagtgataatgggctgaaagaggctgtgattgctgatcatgatggagtggaagtaaatgccataccgacggaggcaactggcacaactaacgatgatgatgaaaacaacacaattgttggtgaagatgttgcagaggctgtcaatgacataactggtgatgatgtccctgacgaagaggctgcacatatggaagatgatgacgacgacgaacctcctcctttagtggaaaagaaaggtggagggcgtcgtaagagaggccgtccatcttccaaggtccagggtgtggtcaagccatctgtaaagaggaaggatgaggaggaggtttgcttcatttgctttgatggtggtgatcttgtgatttgtgatcgggttgccctaaagcctaccatccttcttgtgttaaccgggatgatgacttcttcaagtcaaagggtcggtggaactgtgggtggcacatttgtagcaactgtcagaaacctgcccgccatatgtgctacacatgcaccttttcattatgcaaggcatgcatgaaagatgcaaagtttagctgtgtcagagaaaataagggcttctgtgatacatgcatgaacactgtgatgttgatagagaatagagaggaggctgcggacccaatggaggtggattttgatgacaaaggcagctggtggtatttgttcaaggactattggttaaatttgaagacaaacttgtcgttgacagttgaggaaatatcagcagccaaatctcgaaagagtggagagttacctgatactaatgatgaagttaattcagagagttcatcagggcgcaatctagaaagcaatacatcaaaaaagaggggaaggaagcgatctaaacaagctgccatcaatgagggttctgaaggaaaagcgagcactaggaaatctgccaaacgagacctgtcaggcattcatgatgttcagacctcgtcagggaaaaaggttagaaaactatccaggcgttctttgagcagccagcattcatcaaaagactctgaaagtgttgggacatctacatcctcagctgaagaggacagctgggcttctaaggagctcattaactttgtagctcatgtgagaaatggcgataaatctgtgatcagccgatatgacgttcaaccccttttacttgactatatcaaacgcaacaaactgcgtgatcctcgtcggaaaagccagataatttgtgattctttgctccaaagtctcttcgcgaaagaacgtgttgggcattttgagatgcttaagcttcttgaatcacattttttcatgagtgaggtttcaccaattgatgctgatgaaaatcatggtggtgtagtagatcctgatcctagtcaggatgctgatggtaacagtgaagcttcagttgttatgagttcagaaaaaagaagaaaatcacgcaagtatgacctgaggcaccagcctaatcttgatgattatgcggcaatagataaccataacattggcttgatgtacttacgtcgcaacctaatggaagaattgattggcgatgttgacacatttgatgagaaagttgttggatcatttgtgaggataaaaatacctggtacagggcaaaggcaagacatttatagacttgtacaaattgttgggactggaagatctgcagaaaaatataaatatgggaaaaggactactgatataactctagagatactaaacttagacaagcgggaggcagtaactattgacataatctcaaaccaagagttcactgaggaggaatgcaaacgcttgcgtcaaagcataaagtatggattcattccaaggctgactgtgggagaggttcaggagaaggcaagggttctccaaactctgaaagtcaatgactggattgaaagcgaaaagatgcgacttgggcatcttcgtgaccgcgcaagtgatatgggctatagaaaagatcttagggaatgtgtagagaagcttagattgctaagcactcctgaggagcgtgctcgtaggctgaatgaagaacttgaaatacatgctgaccctgcgatggatccatattatgaatctccggaggaacaggagcaggaaattgaaaaaagtagcttcaacaagtccagaggttctttcttgaggaaagatggtaatcctgtgcctccaggtaaaggagatggtagaaatgctgcacagcgagattcaaaaactaattgggaatctaatcgaaatacatgggccgaatcgagttctcatatggaatcaccccttccacggaggtccacattttcttctcaaggtgaaagtgctggttatacaagtaaatcagagagcccaaacactggtgcacaaacagttaaactggaaggcaccacacgcagtgctccacaagggtcacctggtgcctcttctggaattttagctaataacatatgttcaggggcaaaaactgcacctcaatcagccattaacgagtctgagaagatctggctgtacatggatccttctaataaaatccaaggtcctttctcaatcatacagctgcggaaatggaacagcaatggctacttccctcctagtttgaaaatatggaaagctagtgagaagcaggacgattccattctattgactgatgctttggcagggaagtttgagaaagaccttcctccatgggaaccgccacatgttagtttgtttcaaattaacaaaacccctcttgagcaaagcacaatagctggtgaacaaactccaaaatcagtagttgcaaagtctttctcaagtagtaatcaaagacatggttatagttcaacaaaccttggaacaaccatgatccattctggcacacaaggttattatggaatgcaaaattcccatgcagcatacacaagccaacattctcttactggaagttggaatgccacgtcaagtcagtttggggttgcggtaaatcctgtgacacctactcagcctgccatggggagcttttcaggacaaaacatagtgtctgcagaaaatatgggtcatctaactcctggaacggctcctgcagctgcaaatgcagaaatggttaattcagatttgacctcccagaagcaaatatcgtatttaccgcaaacagacggcatattagctgatgacattgaatccaaatcaggagaagatgtttcacatggaaaagtgagctcttcagccaaagcaattggaccactgggtgcacagcttggacaaggacaactgaacactcagcaacatgaagacataaaaaaccagatgtcatcaactgatgtctccaactcgacgatgccatcgcagatgatgtcaacaccatccgctgcatcagtacaaccttcattgtcaaccattgctggcagtgataatcaaagcagtgggtgggctgtacctacacaagtggtgaacacatctggccagtctcagataactggaaatctgacctggggaaatacacctcagggtgatgcaagcttaggttggggaatgatgggacagaacaatatgaatatgccttgggtagcatcagctcaaggtgcttcgggctacaacatgggtgcagccatgccaacccagccaaatgcagttccaaacatgggttggttaccaaatccaggaaacaccaacatgaacatgatctgggccgcaactcaaggccaggggattccaaatgcagctgctatgatgggaggtcagatgcaaggagtcgcagtggccccttggggtggtgttgcagcaggaaatgcaaattcttatcctgcctggggaaaccaacaagttggaaacatgaaccaaaacgttcgatggagtgctcctgtgcagggaaacccgagtcaggaaaataacaacatgaactggaatgcaccaaatggtaatcctaataattggaataatcagcagagagagaatgagggcaggcactctggacaccgtggtgcttttagtgctggcgactcaggcagaaagtcatggaagccacgctctggtgccgatggggggtcatgggggacatagaggagtctgctatacatttcttgaacgcggggactgctttaaagttgactgcaaattcgcccattcaacaaacacagagggatatccatccatccaggattcgggcaacgagatgcgatatgagaatcacaatgagagaaatgatcgacagtttgataggcagccttcggataatgaaaggcatcatgttaggcctgatgacaggcatggtggcagggatgacgataggcaggctgataggtctcagtcaagagagccgcgttagaactgatttctgtttcgtaccttccctttgttgtatgtgcagtagcaaactagcataatagcttccgtgcatgttttgaactttatgccctgtagcaagctgcaaacatgtgcaaatcgtgtacagcagttgtagtttaatgctgtgtgcgtcctagccccatatttaataatttacttgaataaatcgtagttgtctgatatctgatgtatagcaggggctacacacccaggtcctttatggtgatgactattgagtgttttcttataagcctcatgattgtaagtgaaggtgtttttggaaatcctatgacctaatgtccgatctgtgttcttcgttgtgcaatgatgccattgagcctccgtgatcaaatagtacttcattttgtttgactgttgtgggtggctgggtgctgtgtatgtgtatccacccagctggtttacctgttaagcatgtgcatcatctttcggctgatgtgtttaaaaaaaaaacaccttccacactccctcgtgctcagctgtattttaacttatttttgtaaaaaaaa

SEQ ID NO: 17841 - DNA, 726 bp, Zea Mays
ggctatgttcagaaggtgaatcccgggaatgctccattggtagtggggcaattacttgatgatgaatgccctgaagattttatcaagggtttgatcctctctgttcgttctctcctccctattgagcctttggttgatgaatgtgagaagagcaacaacaatcctgagcatttccttattaccaacccattttacgactctcgtgttgtgggtaaatattttgaaaagcgggatcctacacttgctgttgttgcttacagacgtgggcagtgtgacgatgaacttattaacgtcactaacaagaattcgttattcaagctgcaagctaggtatgtggttgagagaatggatggtgatctgtgggataaagttcttcagcctgagaatgaatatagaaggcaactcattgaccaagtggtttcgactgcattacctgagagcaagagccccgagcaagtgtctgctgctgttaaggctttcatgactgctgacctgccacatgaactgattgagcttcttgaaaagattgttcttcagaattctgctttcagtggaaattttaatctgcagaacctgctcatctcgactgctatcaaagcagatccatctagagtcatggactatgtcaacagacttgataacttcgatgggcctgctgttggagaagttgctattgatagcatgttgcctttatattgcttgcccaatattgctttcatgcactga

SEQ ID NO: 17842 - DNA, 4076 bp, Zea Mays
ctaggcctcgccggatgccggatcaccctaccccaccccaccaatgcgatgaagtgccactctgtggccgcgctctggtcgccgttgccgccgtcacaccacgtcaccgccgctgccacaaccccggtcgcgctcttcaccggcgccgccgacggcaccgtcctccactggccactggcgctcgcctcagcttccccatctccgcgcccgtcttccctcctctgcgcccacgctgctgccatcacctccctctgcccactcccctcaccggcctcccttcttgtcgcctgcaccgcgggagtgctctccctcttctccacctacgcacccctccgctgcctccgccgccgctccctcccgctctgggtcggctcaccctccctcatcgcctcgctcccgtccatcacctccgccgaccctcgagtcgcgatcctctgccacgctcccgacgacggccaccgtcacgtttcagcactcgtagtcgtcgacgcacgcaccctcgccgtcctctacaccgtcttccatgggattctctcggtcgggactccgaatgcgatcgcggttagtggcggcggtgatgatgcagtcagcgttgtgttggctgacgcgcagggtcgggtgcaggtgatgcccgttgccgagggcgcggctgtcgaagtggacccacccaggcgtctcatcgtgagctcggtggccagcgtcgcgtcggcggagttggcggacgagagggtggaagccgtggcgttgtctcatgatgggaagaacgtggcgttggtgctgaagactagatgtttgttgaaatgtgtcactgagggggttgtgctcggtgaggtatctctgctgggtacttctctttgcaaggacaaaaacacagtagacaaggtatgcactgctggagcttttttcctcagcagtgatgaatgggatgctcatgtttcagacgatggcgttgtggttaggaatttggtgttgtggagtaacaatggtgctgtcacaatgtacaggattgctcttggtagctcatactttgactctgagatagtgtgtgaaattcctagcaacttatctatgcaaggagagggactagaagttaaattttgctggtcaaatcagcatcttgttagggtggaatgttgctcctataaggtagctgggtcattgttgtggaaaccaacagtcgccatttggtgtatggatcagttcgaactgagtaaaacagtgaatacacaaaaaccacctatgaggaaaatgcttggagaaggtggtcttcagggagaagaatttagaccagagccttctcattctcaatacaatatcaaccgagggtcggaagtgatttcacagatgtgctcattagaaaggtatagagggacagtgtcttcgtcaatgttactttctgaggattcttatgctccatatgctgtagtttatggtttccataatggtgacatagaagttatccgatttctgaacttgtcacctgctgctgcaaaatttggtggtcgagggctttacccacatatttccgagaggttatttttggggcacaagggagcaattctttgtttggctgcacattacatgcatgcacaccctgactctagaaacttccaccgagcactcatatcagggagtttagattgtacagttcgtgtctgggatctagatgctggcactcttctttctgtgatgcatcatcatgttggctcagttaagcaaatcgtactaccacctccatggacataccacccttgggatgactgcttcctttctgttggagaagatggccttgtggcgcttgtttcacttcaaaccatgcgggttgagaggatgtttcctggccatccggattatgcatcattggtagcttgggatggagtaaaagggtacatagcttgtttatgcaagaatctccactcttgcaatgatgcaggtagtggattatatatttgggatctgaaaacgggtgctcgagaacgtgttatcaatggcactgcttctcagttagcgtttgagcacttctgcaggggtatatcgaaaaacacagttactggtagcatcttaggaggaacaacttcagcgtcttccttacttgttccaatttttgaagacatgagccacattcggtctcatgcagataaaaatggtcatgacatttcatccgtgtcaaccaaccttcacaatggatgtacagattctgtgactgtaaatgcccctacaacatatgattttaagggaaagacgccagctccagatgaagctcatgaattccatggagataattctgtatacaattcaggaaaggctgtttcttcccacagtatccataataaaaaaataaagtgccctataaagtgctcttgcccctatcctggcattgcaagtctgaggtttgacctcacggcaatcatgtccacacaaggcatgacaaacagcaatagtgataggcatttgaaagatcatctccatagtgagaatcctaaagaaatgttgcagcctggaactttagacagtccttctcgtgttcatgaaatggatagcccctctagagagtcattggaagggtgtttacttcgatttagcctctgttttttgcatttatgggatgttgattgcgagctagacaaattacttgtagatgagatgcaagtttgcaagccagaaggctgccatatagcaactggggtggtaggagacaaaggctcatttacattgatgttcccaggcaaagaagccactcttgagctttggaagtcttcagccgaattttgtgccatgaggtcactgtctataatatctcttgctcaactcatgattaaattatctcgttcttgtacaaattctagcagtgctttggcagcattttatacaaggcattttgctgaaaaggttccagatataaagcctccatccctacagcttttggtgagcttttggcaacacccttcggaacatgtgcgaatggctgcacgttccttgttccactgtgcagctccccgttctattccacaaccactacgagtaaacaaaaataaagtggtcaatgcccccttgtcttcatcagataatatgaatgttcttatatgtgctgtgcagactgcctctgtatccaatcatggagagttgaaggaagatgatgaaaatgttgataaagatgatattgacactgctaatatgatcttatggttggaatcatttgaaaatcaggagtggttatcatggataggaggcacaagccaggatgcagtggcgtcaaatatcatagttgcagctgctttggtcgtttggtatccaagtgtcgtgaaagctaaactttcaagtttagttgttagtcaactaatcaagttagttatgtcgatgaatgatcgatatagttcaactgcagctgaacttctagcagagggaatggaaaacacttggaaggcatgcttgggtgctgagatcactcattttatgagtgatatccttttccaaattgagtgcctaagcactgcaccttctagcaatgctatcaataaaactgcagtggccattacaatgcgagaagcattggttggcacccttttaccaagcttggctatggctgatgtaacaggattttttggtgtaatagagagccaaatttgggctacttcgtctgattcacctgttcatgtcgcttcaatcaaaaccattatccgtgtagttcgaggtgcgccgaagtccttggtcccatacctcgacaaggcaatcaactacattctacacactatggatccaagcaatctaataatgcgaaaagcttgtattatcagttcaatgatggctctaagagaaatggcacgtgtatttccgatggttgctctcaatgagtcaatgacaaagctagctgttggtgatgctattggagagatttatgatggtacaattcgagtctatgacatagaaagtgtcacaaagataagaattcttgatgcaagtggaccaccaggccttccaagcttacttgcaggatcatcgaatagaacaacaaccatactgatatcagttctgagtttctcaccggatggagaggacatgcctggtgcagaaataag

SEQ ID NO: 17843 - DNA, 1977 bp, Zea Mays
ttcctcagttaattgatgatccaaatgctgagtttcagccaagtcctttttttacggaacaactgacggcttttgaagtgtggcttgatcatggctctgaggacaagaaacctcctgaacagttacccatagttcttcaggtactgcttagtcagtcacacagatttagagcgcttgttctgcttggaagatttcttgacatggggccatgggcagttgatttggccctgtctgtcggaatatttccttatgtactcaaactgcttccaacaaatacaatagagttacgtcaaattttagtgtttatatggacaaaaattctctctcttgataaggtgatggaaatgtacgcatatggaaaaattttgcttgtaagggagggcagaaacttgtaactgctttttcatcagttcagggacatcgagctgctggtcgcagtattgtgattgactggcagcagcaatcttgttatctgtacgcatctggtgacatgtcttccatcttggtatgggatcttgacaaggaacaacttctcaacaccattccgtcatccgctgatagtgccatttctgccctgtctgcatctcaggtccgctctggatactttgctgctggttttgctgatggttctgtcaggatatatgatgtttgctctcctgatagtaggcctgtctatgtggccaggccgcatgccccaagaacagaaaaggttgtgggcatagggtttcagcctgggtttgatccatacgagattgtaagtgcatctcaagctggagacattcagtttcttgatgttagaatggcagcagaaccctacctgactattgaggcacacaggggttcacttacagcattagcggttcatcggcatgccccagttgttgctagttcagccaagcagatgattaaagtgtttagtcttgaaggagaacagttgaggataattcgctacctgccatcttttatgggccaaagaacaggcagtgtaaattgcctttcttttcacccatacaaatcactcctggctgccggtgctggtcataatgctcttgtctctatctatgctgaggaaaattacaagtaagatcgaggcctatatctcatgctcatgataatgcagacacagtgcgatcgacaggccttacatttttggccaagtgatgctccacagcatggtgcagcttcaagatccaagatgatggtaagctttgtcacagagaaggtgttgatggctccatggctttcggtgcatattgcctgttggacggcgtgtgcaatttgtatgatacagtcaagaactcaagattcattaggcctccttgcattgtgaaccctaccctgatcctgccgttgaacttggaggccccatcaacaaattaatcatacctaagttaaccaaaatgtaaatagccagtgcattcgggttgtactttgtcagcattaatccctttttcaagtgtaaaaaggtctgaaggtgcttgatatgataaacatggcttggtagtggctgctgactgggcaagtggggttgtgcatatgggcctggtcgcacatttctgctcacagatgatgttgaatagatagatgtctgctcacagatgaggttgaatagatagatgtctgctcacagatgttgttgaatagatagatgcatttgtccagctaatatagcgctagatgggggtagcgttggcctgcatgaatgaaggaaagttgtcgagtgaggagtgaccttcattgccattctgtgccgcaacaagtctccatgtgttatcagatggccctgtagataatacatatatttgtagatgtgttttgttcggtgaattgtgctgaccgctgagtaaaatgtattgtgaacgttgttgataaatgctattgtaatgaatttgcaacaagaaaaaattatatgctattgtagtgtatatcacaactctggttgctttttatttttatttttttaaaaaaagatctttc

SEQ ID NO: 17844 - DNA, 1636 bp, Zea Mays
gccgcctcttgcgttggctggaaacagcttggtagtataaccactgaagatggtcagtgggaggccgcatggtgaattggactcatggttcaagagcctcatggtgacctctagcagcgagagggggcaggctgggagtggtggtccagcgccaacattaacaggatggaaggaccttccgatggagctcctggtgcggataatatccacagttggagatgataggatggtcatcgtggcgtctggtgtttgcacaggctggcgtgacgcgctgggatggggggtcactaatctttcacttacatggtgcaaactgagcatgaataatttaatgatatctcttgcccacaagttcacgaagttgcaagttctcactctccggcaaaacaaacctcagcttgaagacagtgccgtagaggctgttgccaactactgccatgacctacgtgagttagacctcagcagaagcttcaggcttagtgaccgctccttgtatgcgctggcccatggatgcccacggcttacaagactgaacattagtggatgttccagtttcagcgacactgcgttgatttaccttacctgccgctgtaaaaacctcaagtgcctgaacttgtgtggatgcgtgaaggctgttactgacagagctttgcaggctattgctcagaactgtgggcagctgcagtctttgaacctaggctggtgtgatgatgttacagataagggagtgaccagcttagcgtcaggatgccctgatctcagagccgtagacttgtgcggttgtgttcttataacagatgagagtgtggttgctcttgccaacggatgtccgcacctgcgctcgctgggcctctacttctgccagaacatcacggaccgcgccatgtactccctcgcaaacagccgcgtgaagagcaagcgtgggaggtgggatgcagtgaaagacgggctcgcgaacctcaacatcagccagtgcaccgccctgacgcccccggcggtgcaggccgtctgcgactccttcccggcgctgcacacctgccccgagaggcactccctcatcatcagtggctgcctcagcctcacgtcagtccactgcgcctgcgccctccacccacaccgtgccgggagagccctgatggccaaccatgcgtactaataaacatgttggtggctttgcgctgatagttctcgcgaatggggacgcatgcctggggggtgatggcgtcgtccaggtgtagaggaagctccctgtgtacataaactcgaaacttggcggtgtgataaggcactgctgtggtaggactttgtgtgataatcatggagtggcgaatttctagagaatggcatgtactccagtgctacctggacattgaccagaaaaaatgtggtatctagttgccttctgtgtaagggcggacgtgttgggatgttcatgcattttcattaatctgataccttaatctgactaaaatctagattaagttacatatcaaatcattactttaatctcataacttaatctttatttagattcttgaattgagctgaaagatctaatgtgtacttattttatggactgcctaaatgttgatgccaaatgcctggctctgttgaaaattttgcataggagaaaata

SEQ ID NO: 17845 - DNA, 164 bp, Zea Mays
cccatatccaaatcgcgcagaagctgtcgtccctgcgcatggcggttccagattgcgatccatttccaagcttcgaggaatcgaggatcaagcgttggcgaccaagtgatatagctcttcgagttctacagagttgaagaccctaagcatctgtttggtgaagg

SEQ ID NO: 17846 - DNA, 1301 bp, Zea Mays
ggggctcatcatgctcacggagtcgtggtttgctttgccaaggctttgatcccagatggggatctcgtcgggtgcagacttccaccagcagcccaccccacaggccgtgctgccgccacgcccccatggccgtgcgccgacgctgcagacgtctctctccctggctggttccgcctcgccggagcaggtcgggtcgcctccggacacacaggagccgctgtcgaactccgacgcggggcatgactccgccacagagagcgccagctcacgggagacttggcctggggagcccggcaagagtggtggcggcgacgctcctcccgtggcatcagcaccgataactgcactgaggatagctgataataaggagaaggaggtggttggtaatggcgtcgccgagctgcaggcctttcggagtaggatcccgagtgcaggccggatgactctcagggaggttgcttgggacagggtggacctcgttgctgagaagatgaagggtatgagcgatgagctgctggacgaaaccaaagccgagctgcagtcgattctggaagggactggcggtcagcaccagattcaggagttcatgtacctgcagaagcttcttcagggcagggttgatctcaccctgcccatccttttgatggctcaccatgtgcagctggagatcctggttgccatcaagactgggatacaggcgttcttgcacccgagcgtcgacataccccagatccgcctcgctgagattttcctgtacaagaggtgccgcaacattgcttgccagagtgctgtgcctgctgaggagtgcaagtgtaacatatgcagtaacaggaacgggttttgtaatctctgcatgtgcgtgatctgcaataagtttgattttgaggtcaatacgtgccgctgggttgggtgtgatatctgctcgcactggactcacacagactgtgcaattcgtgatggaaagattgggactgggcagacgattaagaacggcgttggccatgcagagatgcttttccggtgccaggcctgccagaggacatctgaactgtttggatgggttagggatgtctttcagcaatgtgcacccaattgggacagggatgccttgctgcgtgagcttgactatgtttgcaagatattccgtctaagtgaggactcaaaggggaggaaattgttcagaaaatgtgctgagctagttgaaagattgaggggtggttctgctgaatcaatgactcctagaattctgctacaagcgctgcaaggttggacttagctgcagtttgtgcataggcatgcat

SEQ ID NO: 17847 - DNA, 1209 bp, Zea Mays
gcaggtgccagcgccatcgccgttcgcctcctctccacactccgccagatcccatccctctcgcccacgcgcgggtatcggagtcggagcatggcgtctgcagtggtggtggacgccggcgacgcgccggagcccacggttcgtaacctcctggaccaggagtccctcaagtgggtcttcgtcggcgggaagggcggcgtcggcaagactacctgcagctccatcctctccgtcctcctcgccggggtccgctcgtccgtgctcgtcatctccaccgaccccgcgcacaacctcagcgacgccttccagcagcgcttcaccaagttccccactctcgtccgcggattcaccaacctctacgccatggaaattgacccaaaggtagaaaatgatgatttatccaatgaaggaatggaaggattcctgtcagaactgacaaatgcgattccaggagtagatgaagctatgagttttgctgaaatgctaaagccagtcgattgtttggtcttggtgatgagctgaacgaggatgcaatgcttgggaaacttgagggtatgaaggatgtgatcgaacaagtgaacaggcaatttaaagatccagacttgacaacttttgtatgtgtttgtatcccggaatttctttcattgtatgaaacagaaagattggtgcaagagttagcgaagtttgagattgattcacacaatattattattaatcaagttatatttgatgaggaagctgtcgagtcaaaactgctaaaagcacggatgaaaatgcaacaaaaatacattgatcagttccatatgttatacgatgacttcaacatcaccaagcttcccttgctttcagaagaggtttgtggtgttcaagctctccaaaacttttcccagcacttccttacaccatacaagtctactcttaaaaggggcaccgtcgaggagctcgaacagagaataactatattaaaatctgcactgcaagaagctgagacagagttagatagggttaggaaagggaagcagtcagtgtgattttttttccacaggtcaagtgtgtaaaaccagagagacgatcaattttttcgtgtcattacactcttgttgatttcactatcatgtttcctcatcgaggagtttagacttgtaatagctatcggcagagaagtgtttgattcacacaagatatatagatccattctttttgccggtt

SEQ ID NO: 17848 - DNA, 4311 bp, Zea Mays
cattctcctccaccgcaaatttccgtccgaatcctaataaattccgattccacaccgcaaaattcaaaattcccacactcctagtccttccccccatctccagtcgagtgctctctccagtccccacgcccgatctcgcccccatcccatggacgccgatgagatggacctcgactccccatcctcggcctcccccgcgcccgcctccggctccctccccaccgtcctctctgagctcgccgccctccaccgccgcgcgtcttcctcctccgtcacctccccgcccttgtccctgccctccatcacattcctctcctccagccccgcagccgtcgcgtccatcttccctcgcctcgccgaggccggcgtccccgcatcctccttgctgcccccgctcgaggcctcgctctccgcgcacccgctccccgcagccgtcgcctacctccgcctcctcctcgccccggcctccccgcttctcaccctcttctccccgcttccattcctctccctcctcctcgtcatccgcaaggccgcctcctccttctccggagccggcagcgccgcctccaaccctagctccgtttccggcggcgccgccaacccccgcaagcgcaagaaccagcgccaaaagccagcagcggctccgccggcggcgccgtcgctgctcccgaaggcgctctccctgctggcggacgccgcggggaggctgccgctcggggcccacccggacgcgcggcggtcgctcgtcgataccgccgcggagctcacggcgtttgacgtcctcaccgctgtccttggatccgactaccacgccggggcggtgcaggacgtgatacgagcgctggcccctgtggtgctctcggccgcgaaatccgcagcacgggtggctgcggtgcagttcattgtgaggaacttggtgcctttgggcgccgaggaaggagaggaagcagttaggaaggcagtggggtaccttcctaggtacttggccgtaaaggcaccggacaaggcggaggccagggcactggcggtggaagcgatagtcgaggtggtgcgggcattggaggcagatggaagggagggatttgcagggtatgttgtggccatggcaaggggcaaggcaaagggacgactgcttgctgtggatttggtccttgccttgctgccagtgctgttaccatttgaaggggatgcctgtgatatggaggagggctcttgggggctgaagtgtctgcgggtgttggtggagaagtgctcagatagtgtgggaggggttcgagctcgggcattaataaatgcagcccaggcgcttgatattttgtctgagagaggtgtggaggttgaccggttgcaggaggtgatgaggattggggacatgaagcttggggaattgctgagacgacgctgcaccgatgataaggctgctgtgaggaaggctgcgcttgtgctcatcacaaaggcgattggtttgattgggagacccatagatgactctcttctttgtgcaatgggtgctgcatgctctgatccattagtcagcatccgcaaggctgctcttgctgccatctcagaggtgtttaggaaatttcctgatgagaaagtgatgaaagagtggcttcaatctgtgcctccactggtgattgatagtgagacaagcatccaggaggaatgtgaaaacttgtttcttgaactggtgcttaacaggatctgccaagctgccaatgtgagcttagatgatgatttcatcaccttggaggaagttttccctgaagggacactagatttgctgaaaagcatctgtgatggagaggttgctccatgcataaagaagatatgtgcaagccttggcaagaagaggaagctgaaaccactacttgctagttctctgcagaacatcataacactatctgaatccttgtggttgagacgttgtaagccaatcgaaaattggactgcacctattgggtcctggtggcttctttccgaggtctcatcattcgcgccaaaatcagttaactggaagttcctctcccaccactggaaactccttgacaatgttggcaaagacgaaagaggtaaagcttgttctcaggtggaaccaaactctgcgctctgggcagttaatcgtgtatcactcttgcaaaccatttcaaatgtctccatggagctgccagtggaacctgctgcagaattggcacacagcttgctcacaaggatcgaggattttgatatgaaccttagtgaggttgatgcacatgtaaaatcactgaaaactttgtgtaaaaggaaagcaaaaacagctaaggaaggtgatgcactgatcctgaagtgggcgcagcaacttatccgtagtgcttttgacatccttgaccagtacataaaagaggcatcagaatcagccaggggtcacagtttcattactcctatgactggtaaatgcaagggaatgaaacagacatctgcatcgaagtcaacatcacaagcagttgttgctgtgttcactgttggatcactgatcctagcttgccctattgccaatgtgaaggacatcacccctttgctacacacaatcgtaacttctggaaattctgagccaaggccaaaaaaccttgttggcgggaccatttctttcaaagagttagctccatcattatatatacaatcctgggatacattagcaaaaatatgccttgtagatgaaaaagtggccaaacggtatattccaatttttgttcaggagcttgagaggagtgatatggctacccttcgtaataatatcatgattgcgatggcagacttctatgtccgttatactgcattggttgactgttatatgccaaaaataacaaaatcactacgtgatccctgtgaagtagtacggagacaaacatttatcctactctctaagttattgcagagggactatgtaaagtggagaggggttctcttccttcgatttctgccatctttagttgatgagtctgagaagattaggcatttggcggactacctcttcgggaacatcttaaaagctaaagcgccacttcttgcatacaatagtttcattgaagctatatatgttctaaacgattgcactggacatggtgtatatagcgactctcagtctcagggaagtttagacagaagacctgccctttttgcaattcgtggcactgatgaaagcacgaggtcaaagagaatgcacatttatgtctctttgctgaaacaaatggcaccagagcatcttttagccacgtcggccaagttatgtgctgagatcttggcagctgtttgcgatggcttgctcagtgttgatgatgctggtggaagggctgtacttcaggatgctctgcagatactggcttgcaaggagatgcgcatccaccccaacatcttatcagagaattccgagatggacgaggaaggcggtgagggcggaggaacagccagcgcgctcctggcggccaaagggagggcggtgacccaggtcgctaagaagaacctgatccagatcgccgtcccgatcttcatcgagctgaagcggctgctggagagcaagaacagcccgctgatcgggtgcctgatggagtgcctgcgcgcgctgctcaaggactacaagaacgagatggaggagatcctggtggcggacaagcagctccagcgtgagctcctctacgacatgcacaagtacgaggcaggcaaggggaagggcaaggctgcggcgcaggccgaggccgaggccggggccggggccggtcttagcggcatcggcaggtccccggctgtcaggtcggtgctgaaggaggtgaaccggaagacgacgccgacgcaaccgctgcactcgatgagtgtgcccaaggtgaagtccattctggggagcgccgggccgggctctggtcgccccgatgtcctccagtcggtcaggcggcttcagccgtttgaatcggacgatgagagttagcctgcccccacttcgatggcagtttatttcggctgttgcacttgggcacgtctgctctagaggtctggtctggtccggtaagctcattctctcaatgaggttttcgccgatttgcagtgtatataattacatattctgtaaacgaacaacgagaagaactactcttctatgtcctcagatataatgggtccagagtttcagatttgtaccaaggtacaatatattctagatccttactcttctctcttgtgtttttaacaaaaatactctcttgacttttttttgtcatgtttgaccggctcgtcctattcattttttcgaaaaaataaaaaattcaaagctacatttaaaat

SEQ ID NO: 17849 - DNA, 795 bp, Zea Mays
ttggaacaagtgttgcatggctctgatattaacggagatatgaatctggcaggcaaggtcattctggagtctgcaattctgacaacagtggtcgtgctcagccttaccgcatacactttctgggccgtgaataggggcaaagacttcagcttcctgggtcctttcctgttcgccgccatcatagtgctgcttgtgttcgcactcatccagatcctgttcccactgggcaagctctcccagatgatctacggcgggctggcgtcgctcatcttcagcgggtacatcgtctacgacacaaacaacatcatcaagcgctacacgtacgaccagtacgtctgggccgcagtctcactgtacctggacgttatcaacctcttcctgtccctgatgaccctcttcagggcagccgactaggcgctctgctctcatcctgtctatctacgagtcggtgcctgaatgctcccgtggttaagctccggtacccagaattccagttccaagaatagagttgtatatagctacccgcgttgcctttctactagtatggtcttattcggcttgactcggttcggtcagagtcttgatacgtagttggatcgcgaacaaatgaaccttgcatgggagtatggagagccgtctgctttatgatcctcatttgcctgcccaccacgttgtatcagctgaaagctgaaaacaacatgtgggctgttgtctgccaagaatagaattgtgaaccactggagaaccgtataaaacgggccacctaccgcctgccctatacaccgtccgaactgc

SEQ ID NO: 17850 - DNA, 1377 bp, Zea Mays
ctgcctttaaaactattggttggagtgtgtaatagtcgtggtttcagcttatccatggaaatcaagaggccaaaaatggattggatttcaaactaggcagaaaaggaacctattttgagtagcttcttgtatgccagtgtgctgtctcatgattgcctagagcgtgcattgagcttcgtccttgcaaataggcttgaagatccaacattgcttgctactcagctaatcgatatttttaacgatgtcatgctgaataacaaagatatatgccgctccattcgccttgatgctcaggctttcaaagatagagatccagcttgtgcccaatatagttgggcactgttatacttaaagggctaccaatcgttgcaatcatacaggatagccaatatattatggaaccagggacgcaaagttttggcattggcactgcaaagccgtattagtgaggtctttgctgtggatatacatccagctgccaaaattggcgagggaatattgttggatcatggaacaggtctagtcattggtgaaactgctgtagttggaaactgggtttcattaatgcagggtgttacacttggaggtacaggcaaggaacatggagataggcaccccaagattggtcagggagctctaattggagccagtgctactatcctcggcaatattaatgtaggcgaaggtgccatgattgctgctggctcccttgttttaaaggacgtacctccccacagtatggctgtaggtaatcctgcaaaggtagttggttatacagagaaagaagatccttctttaactatgaaacatgatgcaaggagagattattttgagcatgctgccatcagattgagatgattgatacacctaatgacgagtcttctttctattcgtctgtggaatactgtggagtaaaaaaagttccaaatcgccttattggcaagaagttttgtggagttaaaaaaaggtttcgtcgtcttactcgcaggaaaccttgtgaagttaaaaaaaaaatgtttgacgaaacgcatacggatgccattccggacatttcgtcacaggcacaaggctggatagtcgatgagctctgtgtttccctttctgcccagacaaccaaatgaagatggaaaagggtcacccagggctccaaaatctagagtgtagacaagcatgtccttaatgcgccttaaattggtctggatggcacttttttgtgataaactatctatctaaaccattgactaatgtctactctactctcaacaagatcaattaattgtatatttgatattaaagttggaatgtttagtatgacaaatttaatattttaaaatagatatgcatgaaatttgatcttgatctttttctattatcaag

SEQ ID NO: 17851 - DNA, 266 bp, Zea Mays
cataaataaaagggacgcgttggctggcgtcggtccgccgcccgcactaccacgcccccgctcctctcgtctctatcttcgcctcttccatcgcaggattcagcggccatgggcggcggcaacgcccagaagtccaagatggcgcgcgagaggaacgccgagaagaacaagggcggcaaaggcagccagctggaggccaacaagaaggccatgaacatccagaagaactgcttgtatagcagtcattgccgaagaactgcttgtat

SEQ ID NO: 17852 - DNA, 1649 bp, Zea Mays
gttttctaccctcttgagatcaagcaagagaatgcccttcattatgggaggacatatttgttggtaagggacataacacttcacatgcccatatgactttagaagctcatggatccttttagtgtctcctgaaattgaggtatatgaagggatgatagtttgatgccatccacgtgacagtgaccttgaggtaagatgatcaaatacatatcactatctatttctttttctctgtccatacttgagaccaatgtctctttggtagatggatcctatgaaactaaataacttacagacatccgagcccttagaaaggttcaaattgtccgtttgtctccacctcgattggtatatcttctttccgctcttttactgagatatcatgagagatggtgtttcttttatgtaaaagaaacacaatagtgcaatgcctgatcagttggttaattgagcactgtaacttggatagatgttgtggatcatttctttgtcacaccacatgagatagctgcatcgtgcatttattttgtgcttccactaacaaagattagacgctaagcagtaatagagaggcactgaataccagcattctacattaatacattatgcaggccattgacaccaatatagatcatgttgagcctgagcacaaagaccttctgagaggttattaacagcaacctgcatcttcacattacttttacaacaggatttacattgcctcattaatatgatgacatccaaattatcttttcgcagtccatgaagtgggaggtggctctacaatgtgttgcatccactcagttggatctaatcttactcgtactagggagctactagagttgtagtagaatgtgttcatgcagagcgggcaagaagctttcacagtgggtaaggattcaaacaggactccaacaagtgtgcatgagctggttgtacctatttgttccctggaaactggagtgcttggaaagagaatcaaaaggtctctaactggtgggcatgagatgcagtctacccaggacaagtgatcagggaggctagcatggtaaacttgacatttctcctcataaattatcataagtcgcacataactcaatcctacaaaataaatatgttcatcttataactaacatcaccgctgcatgacagcatgaatggtgagctgtaattttccatgaaaatgctgcaggtgaaggaagcaatactccaacatgtcaagttacaaaaccttcaagttcagtgagatggggtgacaggagtagctaaccacagttgaggcgacaaaaatacatatccaagtttaggtccttgtgcagatagacagataaacaagtatgacagtcacttcagaagtagcttccactccctatgttttgcaaggtagagagctccacgatgtagattccagacccaatgttgcgcaaggtagtaaaagttgtacacatctgttagcctgttgctgttgttgatctggtgatgaacattctcttctacaaaatcaaaagatgttttatttacatagaaattggacatatgaagcttctgttgagtgcatgataattcaatatattatgggttatattccatgatatgaattcatatgatgtgtttcttgtgatgacgattatagttgtgtcacaaatgct

SEQ ID NO: 17853 - DNA, 1656 bp, Zea Mays
gctcctccctctatccacttgcaacggtcgagaggaagcggaggtccatatcgctcattcccgcccgtcccgcaaccaccaccgcggccgcggtgccatggcatccgccgccggcgccgccttgtgcccatgctctttctccaccgtactctcctcctccccctcaactcccttccgtcccgcaaggacgacgcctcgcccttctctccgcccgctgccgcgccgcgccaggctaccgctgcggccgggccactcggtactgaggtgcctcccgaaatgcgactcggggaagccggacggaggaggagatgctgggttatcgggtcggaaggcggcccggccagcgggtcagggaggacccaggcggcccgcacagttcggcgcgtcgtcgtgcggactcgcattcacgacggtggcgggggtgataatgctccaggcatcgcagcaggcgcttgccgccacgcagttcgctggcctgcagcctgcggacgtgctgggggatctcggggacgtcagtacaggttttgcttcagctttcctgttgatcttcttttctgagctaggggacagaacgttcttcattgcggcactgttagcagctagaagttctggagctgtcatttttctaggcacatttggagctcttgcggtaatgaccattatatctgtagttcttggtcgagcattccactatgttgatggcatcattccgttcagctttggtggtactgatttcccagttgatgacattgctgcggcatgtctcttggtttattatggggttactacattacttgatgcagcctcaggtgatgatgaaaagatcaatgaggagcaagaggaggctgagttagcagtatcgaaattttctggaaatggtgcgggggtcatgtctgctgctggtactattgctagcacattcgtattggtttttgttgctgaatggggtgataaatcatttttctccacaattgcactagcagcagcttcatcccctctgggtgtcattgcgggatcactagctggtcatgccattgcaacattgattgcagttcttggtggctctttgctgggaacattcctgtctgaaaagattatagcatacattggagggagcctattcttggcctttgctgcgattaccatagttgagatagtgacttgaaaagggagttccagcttccacaattcataaaaagtactgatcttttgtcagggcaatgaaaaatcagcttgatcgtaatggtagtacattgatgtgttaccgaacatgattgtccacaggaacttcattgttcgtatgggacgtcctaggcttgcgtagagtgttttgtttctggtgatgagaatttctgcttctttatccaagaacaatgtttttgtcatcatcatgatttgtagtggaaacactgatagtcaggttggtcggaagatgggactgggagcaaaactatgaattccatgtagcttttgaacttcctcttacattatttacaagtatatgaatcagccttttcgtatttatggggaagacttccctggtttatgtcttccctagactttattcacactagttcaaccctttttatatgaatctaagtgttagattggaagccctaaccctaactagagttgggatgttgtattaataagtag

SEQ ID NO: 17854 - DNA, 141 bp, Zea Mays
caaatttacagagtaatgtttcattcctaaattacagaatcttttacaaggataattcaaatgtctctaaagatttgtgcagcaacttcatcagtctccgtcaagcttcggtttattgaccttcggcatcgtcatcctgta

SEQ ID NO: 17855 - DNA, 2889 bp, Zea Mays
caagtccccagtccgcactgaccactgccaccaccaaaaactcatggcctctcgcgcacccatccctcctgctccgccccacctccgcctccacgccgcgtccctcttctcgcagcgcctcccactccctcgcgcgcgtgccccgcgatgccgcggcggacggagccgcctcctctcagcgctgccgtcgccgcccccctcgccagcctcgcgctcgcagggcgtctccaccgctccgatcgagcgcgaaccaccgggactcgcgcccacgcccgcgcctacccccgctcagcagccgcaccaggatccagcgatcgccgcggaggtcgctcgcctctccgccgcccgcgagaggctccgcgcggcgcacacgctccacgagaaactccgcgcgctcgacgctgagccccgcgtcgcggcgttcttcggcgaggagtccagccgcggggtgttgggcgtgctcgagccccgcgaggtgctcctgctgaaatgcctcgtcgcggcaggacaggagcacgtgctcggccatgagctcgattggtacggcggcgacggcggccatcacgagcaccaccaccgcaacggggtcagtggtgggagtgccctgcgggatgcgctgtatagcctggccggtttggtcgggaagtggacctcggagggagtggtggctgccaaggagagaagggaggaaatggaggtgctacctagactgctcaagttcctcgacaacgtcgaggagttctacgactgcattggtggcatcatcggctatcaaattatggtattggagctcctttcagcctctaaggatcgcatgcaccgacctagcaaagacaagtttgttgatttccatgttcccagtggacttaatttattgaaggataaagaatatgcatctcaagcagctctgtggggaattgagggtctgccagaattaggtgaaatttacccaattggtggtgcgggtgatcgtcttggtttagtggactcagatactggtgagtcccttcctgctgcgttgctcccttactgtgggagatccctgttggaagggctgatacgggatctgcaggctagagagtttctccacttcaagatctttggaggtcaatgtataaccccagttgcaatcatgaccagttctgtgaaggataatcatgaacatataattgcgatatgcgaaagacttgattggtttggtagaggccgtgacaatttccggttgtttgaacagcctttggtacctgtagtaaatgccaaagatggtaaatggttaatcagcaaatcacttttccctgttggtaaacctggtggtcatggtgctatttggaaacttgcatatgatagaggtgtactccaatggttacaaaattgtggcaggaaaggtgcaactgtacgccaagtcagcaatgtggttgctgcaactgatttgaccatgatggcattggcaggaataggccttcgatgcaacaagaaattaggttttgcatcttgtgagcgaagacctggggctactgaaggagtgaatgtccttattgagaaacaaaatcttgaggggctatggtcatatggcatcacttgtatcgagtacactgagtttgaaaagtatggcatcccagaacctacactaaccaacagttcgcaggttagctttccagcaaatacgaacattctctatgttgatctacaagcggtacaggaagttggatctcgcaaaaatgctagttgcttaccagggatggtgctgaatttgaaaaaggcagtatcgtaccccaaccatcttggctttgagtgtagtgctgctggaggcaggctagagtgcacaatgcaaaacattgcagatgattttatgaacacttttaactacagatgcagcaaaggaatagaaagtgagcttaacactttcattgtatataatgaaaggaaaagagtcacttcatcagctaaaaggaagctgaaatcagaagacagatcattgcaccagactccggagggttcactccttgatattatgcgtaatgctcatgacctcctttccagttgcggcatagatattcccatggttcaagacaacagtgaatatatgcattctggaccgccgtttctcatatttcttcatcctgctttaggcccattttgggatatcatacgacaaaagttcgtaggtggttctgtttctaaaggttcagagttgcaaatagaggtggctgagtttctatggaaagatgttgagctggatggaagctttattattctagctgacaacgtcatgggttcaaccaagaatagcaaaaatggtgaacagatactgcactatggttccaggtgtgggagatgcagactgcaaagtgttaaaattgttaatgaagggatcaattggacttctcccaataatgtctattggaagcatgatgtagagagatcagaatctgtaaagattattcttcatggaaacgcagaatttgaggcaaaagatgtagtcttgaagggtaaccatgtatttgaagttcctgatggtcatagaatgtgcatcattcaggacagagcaggatttgttgttaaattggatcttatacgtgacgaattgatggacagtggaacctggcattggaagtatgcagttgatggtgtccatgtaaagttgaacatggtagaactataaggggtatcaactatagattcttgattcattgatttgtggccagcttaattttattgaggacacacttgacgttggttgactttagtctagattgtaggcgatgacatgttgtaaagataagggagctttgttttcgtacattaggtctgaactgttcccttcattgaagaggtgatgtactagaatatgtatttttcaaatatatggagaatgcttgttctccgaag

SEQ ID NO: 17856 - DNA, 809 bp, Zea Mays
gtcacccacgcctaaaaaaaccgtaatagcaaaaacgactccacacggtccacggcgtcttctccggcgaaccttcgcgagccctcggctcccctctaccaccgctgccgcgaccccgcctccggagcatcctcgggtagcgctctggcttcccgtgccgccggacgtcctgcaggaggcggcggcctccgtggcatgttgatgagggccgccgctgccctccctcgccgatcgtcgcggccctcggagccggggtcctcctcctcccgggctcccgcccctggggcctcctccagccgggctcctgcccctggggcctccttcgaccccttcgatgtcgataccgacccgccatcacggcctgagctgacgcccgagcagatcgggctttgcgtcgacgcgctcgcgcatttcgagtacaaggggaagcgccgggatgacttgtccgacgagttcagaagcctctcggtatcggatattagacatatgaaaacgatcagtgtagctcattatcctgttaatagagagaagaaccgatatattgatgtcttaccatttgacgataccagagtacagctaaaatcctcagcacggcctccaaacaacgattacatcaatgcaagctttataaaggctactgagaacaacagagttgcaacatttatttctacacaaggtccactagtgaagacatttggagatttttgggaaatggtctttgaatatcagtgccctgcaattgtcatgctcacccactttgacagtattaagctatctagagttgtacaagtatctgatgtgattaggct

SEQ ID NO: 17857 - DNA, 2467 bp, Zea Mays
cggaacagttggcgcgtgagcgagtttcttaactcctcgccattggaatcggagtcgtgtattctctcacaccatcctgctcctgctcctgctcctgctcccttcccatccggtctccctttcttttcgcggcctcgcctcgcctcgcctcgcctcgccggcggcctggtggtcgcggtctcgctccagcaccgataaagcccacctcgagttctgctctgctccaccccccggcttcagccgcagcttgtggtggaatcggagcttcttatccgagagcagacatggagcagagtagtgatgggttgccaatcagccagcggagggctaacagttcaacaaaacactcaagcaagtcagatgaggttgctgaagacatgagggacctcctcacaagaaaattgtccagaacttcacggagagcagtagttccaaaaataaaaaacacagatggtcatcagaggaagatgaggcactaaagcaaatggtaaaaaaatatgggacgaaaaactggcgaactattgcatgtgctatacctggccgaaatgccaactcatgcctttcaagatggaagtaccttctagacccagcaataaacaaagagccttggtcgcaacaggaggaactaagattgatccgtgcgcagcaagtttatggaaacaaatggtgtaaaatggtcaaacatttcccagggaggacaaatgatgcactcaaagaacattggagaagtcctatgaaaagaaaactggattcatatttggcctcaggattgctcgaacatgttccagacctgcaagatgatgtatcatttccacagacacagaacaatcaatcagatattccaaaggactgcaaagctgcatctgatagaaatagattttcatcacgtttatcaacagaccccaaacttaaacaagagctcacagaactggatgaaaatggtaatacatcagcaagaaaaagctctgacttattctatgctaaagcacctgatacccattcagccaaaatctcagaaatgagaatggccaaatcacagcagtgtgcaggaacaagaaagaagctggcttttctgtcaactccagtggagctcaagagtgttgtaccgcatgaaaccaccaaacattgccaagatatggaaccagaaaagacagagggcccactgtgcaagagaaattcccactgcatcaaggatggaagtagtttgaaaattcccgaaagtaccaaaggcaaatggttagcagaggaaaatgaaattctcattaaaatggttaccaaacatgggaaaaactggcaaactgtagcatttgctatacctggccgagaagcaaaacaatgccaaatcagatggacacgcagtcttgacccagcaataaagaaacaggattggtcagaacaggaggatctaaaattgattcgagctcatcaaatatatggaagtcagtggcttaaaatggtcaaacatttccctgggaggacaaatcatgcactcaaagaacactggagaaatcgtatcaaaggaaaactgaatttttatttagcctcaggattgctagaacaagttccggacctggaagaaggtggtatatcagttccagagagcagtcagtcagaaattccgaaggacagtcagggttcagctgacaggagtggaccgccaccagttttacgagcacagcccaaatctaaaccggaactcccagaaaacgctggtacatcaggagaaggaacttctgattccattcgtcttaaagggcccaacgcccatccaaccgaagtttctgaaaaggtattggctaaatcaaagcagcgtgccagagccagaaggagattggattttctgtcaaccccagtggagctcaaattgtgcactgctgcggcaagttgtcaaaggcctccccagaaaatggatcaaccgggtccagtggccgagaacatctctccgtcagatgcatgtcaagacatttcacagaatgttccaccagagcgtgcggatgccatcacaccgctggctgctagtaaccaccattcaccagcgacaccagttgatccattctctctcgaaatgcatgaggcgaacgcatcagatcttctggacatgtcctactgtgatggcttgataatcgattctcctcgtgatccacatgacggtagcctcatgtagaagaaaaagttaccaacgcaaaatgacacttttaatagcaagagacgatggactgtcttcctgaaatccagcaactccctgtataaaaatcgtgttgcatgttggatggaacttgtatcttgtcttggcaaaaataattgcattgctgttctgttaatgcccctaactggtttggagagcatttttcttttgcaggtttgaagagcattttgaggggtgttgtaggtcaaattgaacaccatactcgaatgactcgtgttgttggtaactgaatcaataaaatatatgcatgtaaaaattcat

SEQ ID NO: 17858 - DNA, 714 bp, Zea Mays
tcaatcgaaatccttcctctgcggtgcggagatgcgagttgagatcggttcattgaatttggaaatgacggtggacctgcagcgaagaccttgaagccaaagttcaatttgttcgtcaagctagtgtccaagaatactggattgggggtgccgcatattgatataaaaactgtcattgcagctaccatgtttcttaaaggctttggtggtcttctgttcatagtcagcagctcatttggagcattcctcctgctcatttacttggcgtttataacccctattgtgtatgacttctacaaccatgaaatggagtcaacactgtttgtcgatctttttttcaagttcatacagaacttggcgtttatgggtgccctgcttttcttccttgggatgaagaactcaattccaaaacgtcgctccaagggaaggacaacaaaaaccaagacaaactgatgtcagtggttgtaggaggggaagcaattgggctcattatgtttgcatactatacaggaatagatgtcccacttttgttcttggtgcgccaattgaattgtgaattgggacttacagaacttagcatgtaggatatttaagttatcttgcgcaattttattttcttatgttgcgatgtgttcttatgtcacatttcattttgctacaagaactgctttgacagtaaaaaaatattaagtcgcatagtctattttctgtgca

SEQ ID NO: 17859 - DNA, 1751 bp, Zea Mays
cagcccaactccatcgttactgccccctcaaaaagaaaaactctatatctttacacgccggacacacgggcacacgggccaggccaagcctgacatgccgtccgccgcgctcatatctcctttcgtctactccgtccagtcccaactctccaccggcggcaggaggcgccggcgctagcccgtggcgagatgagcggcgggagcgtaagcgccgtgttttatgcggacaagtaccacccgatccaggccggcagcatcgacggcacggacgtcgcgccccacgataacgccgtcctccgcgccctcatctgctctcaggccggcctctacgaccctttcggcgaccccaaggcctccggcgacccccaccgcacggttttcgtcggccgcctctcgcgccagaccgacgacgacacgcttcggaaggcgatgagcaggtacgggagggtgaagagcatgcggttggtgcgtgacattgttacaggtgcttctcgtggttatgcatttgttgagtatgaaactgacagagagatgcatcgtgcctatgaggatgcacaccattcagttattgaaggcagtgaagtgattgttgattactacaggcaacagcttatgcctgggtggataccaaggcggctaggaggggggcttggtggaatgaaagaatctggacagcttcgctttggaggccgagagaggccatttcgtgctcccttgcgacctattccttatgatgaactgaagaagcttgggatcccaccgccacctgaagggcgatatatgacacgttatcaggttccaccaccaccaaggcggaagagcagcaatattgacattgaagattcacctcctgggagaagatccaaggacagagccggggttagtacctacagaaggcaaagaagttctaatgacgatgatgaaacccttctcaagaggaaaagcagccgagacgggctagaagaatcacaaagtcggaggagcgcaagatcatccattaccaaggaggacaacaggtacagcagtcagaggaagtccaaggaacatgacaaaggtcatcgcaagcacagacgaagccaagatccgggcgaagtatctcctccagcagaggaagacggtagctatgaaaggcagagaactttagaagaacctgatcgcagccctgatcggtaccatcaccactggcatcacagggatgatacatatgagagcagacactcacgccacagggatcatcgcaagcgcagacgaagccaagagccaggcgtatctccactagaggaagacagtagctatgaaagggaaagaacttcagacgaacttggtcgcagccctgattggtaccatcaccatcggcatcacagggaggatacatatgagagcagacactctcaccacagggatcgccgacgccatggtgaccggcatcgcaccaagagaagcgagagtcgagattacagggactaggcaactctcactcgcaccacagggatccccgacgccatggtgaccggcatcacaccaagagaagtgagggtcgagattacactctccagtttcctagactacaatgtttcattatgtaaacttgattgtttttcgtactccttgatctagtaaggtttactgttgccctgtagtctctttcatgagaatgtattcctgtaccgaattttatatgtttggttttgttgttgacacacaggagagaataaaaataaatgaaatactgaaatataataaaaagaaca

SEQ ID NO: 17860 - DNA, 1091 bp, Zea Mays
ctttccgcaaagcgaagaggctgcttcaaacttgatgaccccaaatctagggagctaattgctttgagggctgtgattaagtgtatcgaagagcataagcttcagaaggagtgttcacttggacctctccagaagcgtgtttctgagctgaagcccaagggtgagaaaaggccatcaagtgatgctgggcgtacttatgcaaagaagcctcgaggccctggcatttcatttcctaggagacctgccggttctgttggttcagctgctcgcaggcctccatttccgggctatacctggcagcgtgctcctgcgccgatgccctcccgtggtcctgctccagtgccctcccgtgcccctcttcctgcccctcttcctgatagatatggagctgctgaccggtaccattacacaccaccagccccagcatacgactctggtgcattttcgtcttacagtgaacctttcagtgccccaaaaccattccagtacactccagggtcagtggcagcatcatacaattcaagcccctataaagtcgcttatggtggcccaggagcaccagtcagaagcacctatccaggttatgccagcgcatctgggccggctgcttccagcagctatgcaaattatatgggatccgtatatcgccctccccagcaaccatagattcgactcctccctcaaaaaatgttgtgctggtgatgcaagacatggaaaccagtccctcccatccaactcccatggcggagatgtaaacttgagctattttcttgtttcatcgtccacaacagtggggtttggaggtgtatactgatgctctcatgtccagctacatctacaatgtaccttgcactcttgtttgcttttagctgtgcttattcctgagtcgttgaatgttttatattttctttccacaagtctgtctcatgtagggaactgtctcatctaggaatataactcctttacttgctaccgttgcgattgagttggaaacgccgattgagttggaaacgccaaaacgtggcttgagtttaacagcttgcttatccctatctcatttcatttttcactttgtaatagtcaaatagtgc

SEQ ID NO: 17861 - DNA, 2125 bp, Zea Mays
cgctctgcaccgcgcgcctccttctctgctgcggcaaccgggaactgcggctgcggcggcggcgacttaaaccctcgagctcgctccaaggccgtcgctggtcgatcgggcggaagaggcagaagccagccagccagccaatggcccccaaggccggccgtggcaagggcaggggcggcaaaggcgacaagaggaagaaggaagagaaagtggtgcccagcgtggtagacgtcacggtggtcacccccgacgagtcccaggtgacactcaaggggatatccacggaccgcgtgctggacgtgcggaagctgctggggtcgaacgtggaaacgtgtcacctgacaaactattcactctcccatgtggcgcgcgggcaccggctggaggacggcgcggaggtggtggcgctcaagccctgcgctctccggatcgtcgaagttatcaggaggaaggaggcgaatggcgcttctcaggaaggcgatcacttcgaaatcgaggtgaaggtttgcaacgggaagcttctgcacgttgttgcttcagtaaagggtttctacttgtcagggaagccacacaacgttagccactccctggtggacctgctgcaacagctcagcaatgcgtttgctaatgcatatgaggcgttgatgaaagctttcgtggatcacaacaagtttgggaatttgccttacggattccgtgcaaacacatggcttatccctccaatatatgttgactctgccacaaggtgcccagcactgccagtcgaggatgagaattggggtggaaatgggggtggctgtggacgtgatggaaagtatgatcgcagacggtggtcaaaagagttttctgttttggctagaatgccttgcaaaactgaggaagaacgggtgatcagagaccggaaagcttttcttttacacaatctgtttgtagatacagcaatttttagagctgcgtcaacaataaggcgactcattgatcagtctatgaactcagttggttcacatagtggtacacatggttcaaacgtatttgaggaacgtataggggacatgaatataactgtgaagaaggatggtgctgatgctagtttaaaggtggaggacaaggttgatggtgttgccttctgtcaaacgggtgctatggatattgcacaaaggaatcttctgaaaggtttaacctctgatgaaaatgttgttgctaaggattcttcaacactcggggtggtgattgtcaagcattgtggatatacggcaactgtgaaggtttctggacgtgcaaaggacagtaatgatgttaaacaaacaaatgacatctctggtaaatttgatggaatgctgaccattgatgtacatgaccatccagatggaggttctaatgccttgaatgttaacagtctaaggataccactcccgagagttatccatccagaaactgttgttggtaaccagcaccatagcccaaagtctcatgctagtaatcctgcaaagaaattggcacgtaaaatactcaaggacagcttggtaaagctggatagcatgcctagcataaattctagaattattagatgggaactggggtcctcctggctgcaacaattgcagaaaaaggatactccagcgtctgagaatggtaaggggaatgcgatgaagactgacaaagaaccagctgtcagaggtcttggaaagcattttgaacaattaaggaaacttaaaaagaaagaatgcaacaatgaaggttccagttctgagaaggaagaatgtagcaataactattcatcaatgaatggtacacaagtatcagatatgatagctgctgatgaagcaaataacggggctgatattagcaagttaatgtcagaggatgctttccttagcttaaagagtttgggagctggccttcatgaaaagtccctcgaagagctcacaaagatggcccataatttctatgatgatactgcactcccaaagctggtagctgattttgcgtcccttgagctttctcctgtggatggaagaaccatgacagatttcatgcatgcaaggggacttaatatgtcctctttaggcagggtggtagagctagcagagaagctcccacacatccagtctatatgcattcatga

SEQ ID NO: 17862 - DNA, 1361 bp, Zea Mays
attatttcggcctgctgttggttgatatccgtgacaaagatggattggaaaaggtttttgcttcaacaagatttgatgctgttattcattttgctggactgaaagctgttggagaaagtgtacaaaagcctttgctttattatgaccataatgttgttggcacaataaatcttctggaagtaatggcagctcatggatgtaagaagttagtgttctcatcatcagctgcagtttatgggtcacctaagaactcaccctgcactgaagattttcctctcactccacataacccatatggcagaaccaaacttatggcagaggagatatgccgtgatatctaccattcagatcctgaatggaatatcattttgcttaggtactttaatccagttggggctcaccccagtggataccttggtgaagacccatgtggaactcctaacaaccttatgcccttcgttcagcaaattgcagttggcaggaggccatcgctaacaatatttggaaataactacgcaacaaaggatgggacaggggttcgtgattatattcatgtggttgaccttgctgaaggacatcttttcgcattaaagaagctttttgaaagctcatctaacataggatgtgaagcatacaaccttggaaccggaaaaggaacatcagtgttggagatagtcaatgcatttgagaaggcttctggaaagaaaatccctttgatcatgggccaacggcgtcctggtgatgctgagattctcttttcatcgccggcaaaagcagagagagagctccactggaaagcgaaatatggcatcacagaaatgtgcggagacctgtggaactgggctagcaagagcccttatggatacgcggcatctgagtctccgaagctgaatggtagttcacgctgagcaacgccgattggcccgtgtggactcacttgtacatgagactgtagtgccagccaaccaggataaatgtagatctagtcggtcggtcatacagagagaagttctataggcctaggaaagaaatgttatcctgttcctcagcataagctcccatagtggttcttccatatgcgtatagtctatgaaatttgttctaggaccattgctatagtcaaccagctaattcaattctatttcttgagttgcgttgcctaaaatagagcatgatatagatatcagcatcacaaaaagttgcagttcatacaaattttcttttgtaattgtattgtttctttgagacaatttctgtattattagtatttcttttgaaataaatatgtaatattggttagtgagaccacagtaatacttccatttcaacttcattggtgtgataaatcacacttcactggg

SEQ ID NO: 17863 - DNA, 2559 bp, Zea Mays
aggaggtttctttgtacaacattgagttgcactggttagagatgagtgctctatttctagagaccacgagaagaagtgaagagcttgcatgtgcatctagagaacaagctgattctgctaatggggtaggaaacagcgctcattcaggatcaagagggagtggtgctttactacctttttcctctacacataatgcgtcaacttatggggatgaatttgacacgaccataattacattcaacatggctgtcatcctatatcatcttcatgactatgaatctgcactatctgttttggacccactgtaccgaaacattgaaccaatggacgagccaactgctcttcatgtatgctttctattattggatattacattagctttgcaagatgcaacaaaggctgtggatatagtacagtacttggaaaggtcgtttggagtagctaacacaatgaacccgaatgaaaatgcaagcatagctcagcagcaattagctcaagcgaagcctcctgtgaaaattagcatgcctccagattccgattcaaatgcttatgctggtggatatgagaacctttcgtcaggaattttcccagatgagcaaatagaatttgaatctctatgctctagttttgatggacatcagaatgtgggcaggcgtatcttgaatgatttctcaagggcgtctgctgatcttgctgctactgctgctgatttgaaagttagacttcagatttacaaggtccgtcttctactgctcactaggaaccttaaggttgcgaagcgagaactcaaagtactaatgaacatggcacgtggtagggattcatctacagagcttctcttgaaatctcagctggagtatgcccgggggaattataggaaggctgtgaagctattgagcacaccaaataatcggactgaaccagcaatgctagccattttccacaacaacatgggatgtatactccaccaacagagatcgtatcacgcctctatatggtgctttagcaaagcgctgaaatacagcttatcatttcgttcagagaaaccaatgaagttgtctacattatcacaagacaagtcttgccttatttcatacaactgtggtatccaacatttgatgtgtgggaagcctttgttagcagcttcttgttttcgtgaagccatgccgctcttctacaagcgaccccttttctggctccgtttttctgagtgcagcctgctagctctagaaaagggtctcctgtgtgcaaatggtgcttcctcattcaacgatgagattgaaatcaatgttgtggggtcaggacaatggaggcagttgattgtcaacccagtgaactcgagaagtaatttagattctgcaggtgtgactttaggcgaacataaaaatttggtttcacttggatttgctagacagtgtctacaaaatgcgctgctattattggatgctactgagaaggaaaattgggtaatcgcatctgatacagaggattgggaccaaggaaccgtacatggatataaaagctcaggccagaagaatactacaagtacagattctaaaacaccttcaggcccaactctagctaatgtaaatggagaacaaaagggcacaagcttgaatgctaccttgcagagttctcttgctttctatgacgagatccgtagaaaagagtacatcaaaatcagacaggctgtcctggcgaacttggcatttgttgaattgtgccttgataatcccttgaaaactttgacgtatgcaaagtcagtactgcaggtgacagactgttccaggatgtatgcgttcctcagccatgtatacgcagccgaagctctatgtactttgaacagaacagaggatgccgccgagaatctatcagtttatataagagatggtaatcatgtcgagttgccttatagtgtggagaattctgaaaaggccttggttgagaaagacagtgatggtgaagacttggttgctcctgcagtgacaaaactcgccacagaagaacctgagcagctcaggccggaggaggcccgtggtgtcctgtatatcaaccttggcatgattgctgcaaggcagggagaagttgaaaaagccaactacatggtgagccgtggcctggcgatgttgcccaacaacccccgggcagtgctagcatcggtttacgtagaccttttgcaagggaagtcccaggaagctgtcgtgaagttgagacggtgtaggaatgtgagatttagacccgctagcatagcagccagcagtcagcagtcgagcttagaaaagcctcccctttcatgatttctgtagtttacaattaccgttataatcttttttggaccctgaccccaatgtggatgatcaaagatggtaatgcttctcctgtgtaacatatataagaaatgaactctaactccccttctagctccctcccagattcaggggtggaatgtgttggaactgtaccgttttaatttgccctctttggactgaagagagccaagtgatcaaaatagtttcctatgtttattcaagaatttggaaaataatgtgcagtcagcag

SEQ ID NO: 17864 - DNA, 229 bp, Zea Mays
  misc_feature (1)..(2): n is a, c, g, or t
nnttgacaaggttgttgctttggcttattgttgcaacaccgaagctgtatgataaatataccgtgttaccggccttggagaatcaaagcttttggctgtttatattgttatgatctcgtgtggtgtttcaaggcatccaatatgaatgtgctcttcggctatttcatatatgggtgatgtgctggatttctggttcatatgaatttgttcacatgtgaatgtgaaaagg

SEQ ID NO: 17865 - DNA, 2321 bp, Zea Mays
cagtcatcctcgacgagttcccagtttggtgcacgacgatctcgccggcgtcgacactatctctgtccgagagccccgacgatagcccggtgcacttgcactcgggagcgctatgtcaagctagggtataaagcacaaaaaagtgatcctctcatctaattgagactgttgagtatctcacatattcttgtgcttgcttgctgggatcggctttggctcaggagcatgagcgaaaagatatgattcttcatttctccttctggctataagttttagtttctttatgatgggaaataaaactggtaagcctgtcttcagtgagctcaaatccacagagtttagtttattggagagcactctagtacaggatcattgtgcaatcccgacttgtgtaccattggattttctgaaggccatcacgagtgatttctctaaggagcaagagctaggaagaggtgggtttggagttgtttataagggccttcttaaaaatgggaaggcgatagctgtgaagaagctttctgaaatgaacctagatgacgatcagttccataatgaagttacttatcttttcgggttgaagcacaaaaatattgtccagctaaaagcttattgtgctgaatcacggtgggaagcaatcgaattgcgcagaaaatatgtcatggctgaatctcggaaaaggctgctgtgctttgagtgtataaataataagagccttgataagcacctttctgctgaatctcatggggttgagtggcatatcagatatgagataatcaaaggaatttgccatggtttgcattaccttcacacagattgccaaattgttcatttggacctaaagcctgagaatatattgctagatgacaacatggagccaaaaattacagattttggtatgtccaggctctttggtctacaacaatccaaaatcatcaccaaaacttgtggaggaacacttggatacatggcaccagaatacttactaaaagggttgatttcagtgaaggccgacatattcagtttgggcgttataatcatagaggtgatgaccggaggccggaattatcccacttgtgaaaaatcttgcgagcaattcgctgttgatgtggttggacgttggaggaagaggttattggaggaggcaggaaggtacacacccttggaaaaatacgttgagcaagtagagacatgcatcttgataggattgatgtgtgtcgatgatgatcctaacaaaaggcccacgacattggacattatcgaaaggcttaccaaagtagatgtcacgaacacggacagagggccacccaaaactctggaggccgcgacagggcttacaggccaccccaacctcgcaactagatcatttcttgacaggttccgccgaaccatcgtgatagggatgctgaagaaggccctgaaaatccaggacgtatcgcagttggagcagctcctggccaaggaggtgctgctggagctccacaaaatcggcacgaatgcaactggaaacagatcgttcctggagaggctccacgcaagcatcaccatggctacgctggttcaggcgctgcattccttggacttggatccatcggcggcgctgcgtatggaggtgctgttcttggcgctggagaatatgcgtggaaaaaacaactcaaggcgaagaagcgaggacgtccttgagctggaggagcggccagagcagatccggtcggtgctggaggctggcaccagggccaggctcagtgatgaggaacacatgccgtcggtgtctgtgcaggctgaagaccaggcctttcccaaaccgaagttggccaaagtacgcgccaccgccccggtgtgcgtgtcagcagtgtggttggcggccggcataggattcctgtgtggattcaccctaggagagatgaggggattaaggcggacgagggtccacgaacgcacgtgatgccaatgtgcccacatgacatggccagaaaatgtcactgcggtggaccatgcatgcacgaattaaggagcaccagttagaatacgtattctagattcattttacaaattctgtatttaaaaggaacttgtgcattgtgacagaggcggcggactggatcaggttgtattgtttctgctggtgtcctgtcgtatgtataagccacggagtgtatcggatgaaattgaacagagaaatgtgcaatatagaaccgtgttgagggcagcctttcatgcttctgctaccgtttctatattgtatcctgattgcttcaaacctcccggcgattctcctgggtgtattggtttgtgtgcggcggcgaataatgatatcacgg

SEQ ID NO: 17866 - DNA, 902 bp, Zea Mays
ggggtagtcgcaacaaaaagaaaccaaactcggctcgagagagatcgcatcttgcctgcccacccaagcttccctttcgttcctcctcgccccagcgacgcggcctcccgtagaccgagcaaggcaacccaccactgagaggcacgcagaggagcaggaagccggagaccaagatgtcgtcggtgttcagcggcgatgagacggcccccttcttcggtttcctcggcgccgccgccgccctcgtcttctcatgcatgggcgcagcgtacgggaccgcgaagagcggcgtcggcgtggcgtcgatgggtgtgatgcggccggagctcgtcatgaagtccatcgtgcccgtggtcatggctggtgtgctcggtatctacgggctcatcatcgccgtcatcatcagcactgggatcaaccccaaggccaagccctactacctttttgatggctacgctcacctttcgtccgggcttgcctgtggccttgctgggcttgcagctggcatggccatcggcattgttggtgatgctggagtcagggcgaatgcacaacagccgaagctttttgtgggcatgatcctcatcctcattttcgcagaagcgcttgctctctgaaggaaggtgacacttccagccatgttggttttggcggtgttaagcagaggttatttattgggttaagattggatggatgctcctgggctaagtggatttaatttttatccttggtgaataatgaacacggaggtgtagccaaataataacgtgatatatatatttctttgcccctttactggatgcctggattttcattgtcatctatacttcggcatgttcacagcgatagctgatgttttgtttctgatgtttttgagccaatggttgataggtgtatgaagtaca

SEQ ID NO: 17867 - DNA, 1791 bp, Zea Mays
aaaaaaaccaatgatagatgcggataaggcgacagcacagctgacagggccccacgcgtcggcgggcgcgcgccgccgaacgaaaccatcccggcaaggcaagcaagcaaccgtggccacgccgcggcgcgaccctgacgcccgccgtctccggcacccgataggcctcctccccacacccctcgcgtggcttccgtggcccgtagcccggcgcgcttcccttcaaagccactgcttcgcctcctccttctacttaagcgcagccggccccggccggcattcgcatccggtagctcgatcacttcttcctctggattttgggaaggaggcatcggacgtcggatgcatgacacactcattgcattagcgcctacgcctaccgcaagtggaagcctatggatctcaagcaagccttctctggtacaatcttctgccttctgcttctattctgcgtgggctgcagatgtcggactttggaaatagaggccacccagacagcagccctcaaggttgatgcctcgccacagcttgcccggaagatccctgaaacactgtttgggatattttttgaggagatcaaccatgcaggagctggtggcatatgggcagagcttgtcagtaacagaggtttcgaagctggaggctctcatactccatcaaacatcgacccgtggtccatcattggagatgactcctccgtgttcgtggcgactgatcgtacatcatgtttcagtcgaaacattgttgctctgaggatggaggtcctctgtgatgactgtccagctggtggtgttggtgtttataacccaggtttttggggcatgaacatagaagatgggaaggcctacaatctcgttatgtatgttcagtccccagaaacaaaggatctaacagtttcattaacaagctctgatgggttgcaaaacttggcttcagctacaataacagtttctggcacatcaaattggacaaaagtggagcagaagctggttgctaaaggaaccaatagaacatcaaggcttcaaataacaacgaacaaaaaaggagttgtttggcttgatcaagtatcactcatgcctgaagacacatacaagggacatggtttccgcacagaacttatatccatgcttttggatttgaaaccacgattcttgagatttcctggaggttgttttgtagaaggtgactggctaagaaatgcattcagatggagagagtcaattggtccatgggaagagaggcctggacacttcggggatgtttggcattactggactgatgatgggcttggatattatgagttccttcagcttgcggaggacctgggtgctgccccaatctgggtattcaacaatggaataagccacaatgatgaagttgatactgtagctattgccccttttgtaaaggatgtattggacagtctagaatttgcaagggggagtgcagattcaacatggggctctgttagggctgcaatggggcaccctgaacctttcctggtcaaacatgtcgcaattggaaatgaagattgcgggaaaaagttctaccgtggtaattacctcaaattctacaatgctataagagaggcctatccagacattcagatgatttcaaactgtgatggttcatctagaccacttgaccatcctgcggatttgtatgatttccatgtctatactgattctaagactttgtttaacatgaggagcacatttgacagaacatcacgtagtggacctaagggattcctggcattcacttgggagttgggatgttctttgggtagta

SEQ ID NO: 17868 - DNA, 2264 bp, Zea Mays
gaaagtcctgaaccagccgcgaatcgcgagtcgagactcgcgaggcgcgcgcgcctgccgttctccgcctcgggtcgccgccggtagccggccaccgtccccgccacgacggatcgcaagctggcgaggagctccgagcgactaagggatccacgcatccagccgccggccgccaggccgcggcgccccgaaccacggaaacctgaaggatctctcattaagaggcaccctaggtccagagctaggaactcttagccatctgagggctcttgtactctccaataacttattcagtggatcaatacctaaggaattgagtgctcttacaatgttggagatactggatttaagcaacaacaacttgagtggggaagttccacaagagattgcagaaatgcaatcacttaggcagttattgctttccaataactgctttcagtggcctctgacccaacattcctatgggaactacgatcaggaaaatgatttcaatatttatgataatcttgggaggggtaatatgaatcgaagagctgagaatgggttggaatctggttcttcttcacaagagaacaaaaaggacactagcaacctttctggtaatccaactcaacttccttcacaacacgaaccaagaaatacagcatcacaccttacccagcgcaggttacttcaagatagcaatcttgctgcaccttctcctgcaaatgcccttgttccagctgctgttcctgttccttccactggaactggttcgttttcagcatttagtcccaacaatgcacctgtaccagctgtaaattcaccaagtagtccaccgatggtccccagaactacctccgaagaagatcaagaaacaaggtccatcaaatggctttatgtcattgtactgccactggtcgcacttcttatgtttggcatcgcatgtatgcttttgctatgccgcaccaagtcagggacaacaataggtccatggaagacagggctcagtggccagctccaaaaggcatttgtaacaggagtaccaaagttgcaacgctctgagctggaaggtgcgtgtgaggatttcagtaatattgtggcaagctacccacaatacactgtctacaagggaaccttatcaagtggtgtggagatagctgttgtatcaaccatgattatctctagcaaagattggtcaaaacattcggaagggcgattcaggaagaagatagactcactgtcgcgaatcaatcataagaattatatcaatctgcttggatactgtgaggaggaagagcctttcatgcggatgatggtgatggaatatgctcccaatggaacgctatatgaacacctccatgtcgagggatttgatcctattgattggaatggtaggatgagggtaattatgggagtcgcatactgcacgctacacatgcatgagctcagccctcctataacacatccagacataaagtcaagtgctatattgctatctgaggatggagctgcaaagatagtagacatgagcgtttggcatgaagtatattccagagaaaacgtgcccaacgatgacgacttagttgatcacccggaacgagtagctgcggatccagctgggaacatctacagttttggtctactcatgctggagatcatctcaggaaagcctccatattccaaagaaaagggttcgcttttgaacttggctttggagtgcattagggataaccgaaacatgtcttgtttgcttgatcctaacttgaaggatcacaaagaaaaggacctagaaatcatatgtgatttgctctatgaatgcatccaaagcgatccgaagaagagaccaaccatgagggaggtcaccactagattgcgagaagtactgtcaatttcgcctgaggctgcaacgccccggttatctccactctggtgggcagagcttgagatcctttcagttgaagcaagctagcgaaaatgttctttgtttgcagcaacgaggtacttgtgcatattgtaatgcaaccctgtacatccctgttgtatgttttcatcttgtgttgtaactttggtgtctgcgtgctacaattttccctccccagtgaattcagttgcctggtatgttttctcatttgttcctcgctttccctatgtatactaaacatacatggtgtgaaagtagaaaataaaaaacgcttcatgccgtccaagggctgaatgtaatcagcaaatgtatagtgttccatagttttctttgattcaataactagtaattagtgttttgg

SEQ ID NO: 17869 - DNA, 1511 bp, Zea Mays
cctggtctcgtcgccctaaccgcacccttccaatgacggggcgctagcgaagccgcgcatcctccctgcatctcaccggtcgtcaccctaaccgcgcccttccaacgacgaggtcgctaccgaagcgccgcgcatcctcctcgcatcttcgtcgctcctgcgccgcgccgaaatcctcccccaccgcgcccttccatcgacgaccatggcggactacccacgcgtcatgcacgccccgccctccgtgcctgtcctccggggccagcgcgctcccctcctcctcaccagactctgccgccgcgggtctggttgcccacctcaactccgaggaacgaggactccaccatgctcgctctagagacaccgccttcctgtcctccgctcaccgtgcttgtcctcggatccacgactgccgccccgctccccccaaataccactgatgcagggatccaagcccctgccatctattcagccgccccgacgtccacaggggataccaactgatgggccaccaaccatgttgttccacgctctgggctgctgctggaagctaatcaatcgcttggttagaccatcgcagattagcggtgggattcccaggttcaataatctcgtttcgggccatgccctcgatgtcattatctggcttgaggtttgtcgtggagaagcaaagggatgtttacatgtgctctattctaagtcttagggtctgggattaattgggtacgattcgttctagaggatgatgcgagtaagtgcttaagtgccctgctaattttttcagctacctctttcgaatttgttgtctacctgtttgttaggcaagcatggagtattcgcttggttctactcaagaagggaatcaaggaattcaggactttatgcactgattgtaatagtccaacgaaagagcggatccacatgttaaaaatctcagcaagtgttcctttctgacagagtttcaacttatgtgttactaatgtagaagggatcccaattacttgctgcattgggtgatcgaacagtcatagtatggagtttaggaaacaggaaatgcattggtctcttgtttgggcatactgggagcgtgaggtcgttgccttgccattcctccaatccggatcatgtattaagggtgtggacggttatgttgcctttttcacaaacttcaatttatgatcaattgcaagcaagatgtggtctagctgttggaatgcggatcacgaaggtggtgtcttcactcttcagcatgttccagtgtcgtgtgttccagatcgggttgctatcgggagtctgttggtttgcatggaatcaatcaggtttagcttggattcatgaataattggtttgtgtcgtccggctgttcgagctacgtcatcatgattagaatctacatttttccctacgcttgtatttaaaatggagtttacaaagataatcgttagaatggaatcgaaggctcattttttgttctatctgataatagccgaacgaatgaaatgcaatttaaa

SEQ ID NO: 17870 - DNA, 894 bp, Zea Mays
gttcaagaacatccaagacaaatagcgttgttggcgatctgaggcagctggtaggcagtctaggcttgggcgcacgcgagccagagagggagggctgggagcacgtcatctccaagagcagcgacgacgtctcctacaaggcctggtgcgacaagcccacgttttcggcgatgcgatgagggttttcggcgatccgtgcttgctagttgcgctctacgatcaggcggagggggtttgagatgtgaatattccactttttcattctagaacatcaaacctgagttgctctacgatcaggcggaggttgttttgtagttgccaattgcgtacatgcattgcaacagatctgggctctagaagctgctaacttggtagcagaaagattgaggcattgcatagcaaaccactggatcaaagagtttagtgaatggccacagtgcatgttcttgagttggcatcaaagttccttccatataataataacaaaatatttgacataatgaatctgttggaggatagacttcaacatgcaaatggagccattgttttggcaacaattaaagtttttctccattcccatgactgttgttcatcaacagcaagagaagaaggaagacaagtcagacaaaacagaagacgagaagaactgatgtatccatgttcatgcttccactgttgaaatgcatattcaacatagcttgctcagctcctatctgttgtttcaacgttgatttaaaagaagagctggtagttgtgggcttttgaacaatagctggaatgatctagctagctatatgtaaatgatctagttgtgaatgatattataactgtgatgcttttgtgaatatataattgtggtgcttttgtgtttatgtgatggatctatgactgtgg

SEQ ID NO: 17871 - DNA, 145 bp, Zea Mays
ctttgaccagtccttgatttccatccccgaatgtaatagctcgttggggatctttgtttttctcgtaggaggaggacatccttttctctcctgtcatgtggtttgtgtatccgatatcaattatccaacttgaaccaccagatgc

SEQ ID NO: 17872 - DNA, 354 bp, Zea Mays
gtcgcgcagcgacatcaatgaagcctaagtactatggaggagattacaacagaatgctggagatacttctcgaatgtaagagcatagggactacttttcttgttggtggtcgaaagattgaaggagatttcaaggtccttgagaacttagacattccagaagagctgagagaaatgttcatttctattccggaggaaaagtttcgcatagatatttcatctactgaaataagaaagagccaagggctctgatgtatcaagtggtcgtattctacagcagatttgggatgattctccacgactatagaaggaggaatttcttcagatccttcccgcatgcaatgtcataaagagc

SEQ ID NO: 17873 - DNA, 2632 bp, Zea Mays
ctccgctcgtcggctctgccttgacccgcagagactaaacattagatgcaacccccaagatgttcttgtttgcattcagataatgaatgaaaggcaacgccaagctgtagtgaggaaagggttcttcaacatacttgacatgaccatcgatgcacttggaagccgaacacacctttgttggctgatggagaagctagacccgaaagacatgactcttcgcattggtccaggcaaagagctgaaaatcaccaaggagaccgtccatctcatcctgggtttacccaatactggtggtgggaagcctctaaacattgatgaagtaaatgcagctgttaaccttaggtcatcacttggcatcagcaaagatgagtttggagttgcaaagctgcaagaacgattaagattaggaggcgatgatgacctctcaattcgatgttttttcttgatccttttcaaccggctgctattcccaactgctagctggtctatatccaacaatgaggtgctcttgacagaacaattggatcgtttccctcatattgattggtgtcatctcatattcaacgacttatgtgaagctgcccataaatggcataacagaagcactacaaatgtgtcggcgacgatatatgggtgttccattgtcgttcttgtgtactacctggaccacctccaccacgctgtagcccccaacaacaaaagcgacacaccgcgtatcaaatattttgacaagaaaaccataaaagcattgtcaatggctgataagaggaagccacgtcagggcggtgaaccatttggccactgtgattttcggagcagctcagagacctgttacgcccctacacctgaatttcatggtcaattcgagtttcagttcagttcagatgcatttgatgtagcccaaaatgcaccctgtggacatcacaccatctctattcaagttccacttatcaaagacatgatttcaagcaagattcagcaactccctgcatatcaccatcccaaatttgaagcaaagctgcgtgcttacgactcagaggttggcaagtcatttgccactatcaaccaacgtcttagcaagattgtcaaaaagcagtacgacctagcagacacatttggagagttgattgacgaggttcttcgtgctgagataaatagtccagacaacaaagatgacatgatagaaccttccaatccctcagcatcagagcattgcacacagtctactgaccaattcatctcagatccactaatgacagccacgcagctggagtcgcagatgatagtcactcaggtggaggccatatataaaagacaacaggaaatgtgccgagccttcgagagttctcgtgatgaatcagtcacacctcaaaacatccggggtgacacgacggaagatgatgctcttcaacttgactctggcctagttttggaccagattctaagtggcaatgagacatatatgatgcacaaaacacgacacgactctgtgccactcacacaaatggactgtgttcgcgcccttcgacaattcctgtgtgctaaggtcatggatttgaacagaaatgtcattgattttggtgaatatgtcggtacttgtcgtgatatacaacgatcgtttgccgatggggagtgccttgacaatgttttcatgcaatgcttcattgattgtgttcgtgatgacgccacaaatcatatccctccactaactgctcatcaacttatcctagacgccattgttggggctatattgaacttcgaggagcaggaacaacacagtaacactcatcggccgtatgacccagccatcctagagaattacttgtcaaagacactgccttcgttcaagcagttggacgaatacaaatcgatcatggtccctatgctccgcgcgggacattggacgttgtatgttatcaattttcagaatcgatgcatacacattctagactccaatccatacggaccagaacttggtgagactacatgggaaagttaccattatgttcaaatggacatcgggaaaaggaagttaccatgggccagactaataatggttagactaaacatggctctccaacatgttcgaccaagatcaaacctacctagatttgacaactttccaatcgacatggctccaaactgtcccacaatgaaagcagggtctaacgactgtggcttctttgctatgaggtacatacaatattatgactatatggatggtgctatcaatgtagttatagactcggataattcaggtgacctccgcgctcttgccttgtattacctgatcttccatcgactaaacaagaatcgctcattgtctccagaattagaaagattcaagttcccccattattagattagtctagagcaatatcatcagattgatcgttgcactcaaaggtgtgctagcatgtatttagtgtatatgtttgtccatatgtatagtgatctagtgcctaaaactgttttacaacctttacacgttataaacttctgtcacttcttatggatccatgctgatcaagtgcttaccaccagtttttactacattttgttatgttgctatgtttcaatgatgtggtgtgcaattgttatgttgttatgctcaaatattgttcattttttg

SEQ ID NO: 17874 - DNA, 247 bp, Zea Mays
ctgccgtagctgaataacttagacaccccatgttatcagcacaactgttgtgataatgtggtggtggtgttttaatcgagagagcactagctccaagaaggccaaaggcccaaagctgatgtttgggaagggagatgaagtagaaggttttgataattcgaagtctaagtttaaggatgatgagcaagatggtaatgaggatgaggatgaataaataataggatgggggaacatcaactttgcaatt

SEQ ID NO: 17875 - DNA, 1250 bp, Zea Mays
cgactatgctccatcaacaaatcaacataacgaagtgccgtttgaggaggatgacaaggatcctaggatctggttccttgaccacaattaccatgaatcgatgttctccatgttcaagaggattaacgccaaggagcatgttgttggctggtacagcactggcccaaaactaagggagaatgacttggatgtccatgcattgttcaacagttatgttcctaaccctgtcctagtgattattgatgttcaacccaaggagcttgggatacccaccaaggcgtattacgccgtggaagaagttaaagagaatgctacacagaaaagtcagaaggtatttgtccatgttccttcagaaattgctgctcatgaagttgaggaaattggagttgaacaccttttaagggacgtaaaggacacaaccataagcacacttgctacagaggtcactagcaagcttgcagccttgaagggactagatgcaaggctcagggagatccgaagctatttggatcttgtaattgaagggaagctcccactgaatcatgagattttgtatcatttgcaggatgtctttaatctccttccaaatctgaacgtaaatgagctaattaaagcctttgcaggtaatcttgcatctttttttctgatttaacataattgacctgatcttttcatattctcgggagccttatgttgtctttcttttgtacagtgaaaacaaacgacatgatgttggtaatatatctgtcttctctgatccggagtgtcattgcgcttcacaatttgatcaacaataagatgctaaacaaggagcatgagaaggctgaggattcgaaaccagccgccattccaactgctgccggtggagggggagctaaatgagcttttgatcacttattgatggccaagaaaagggaggaaacgtgattacatgcttaccacggttgtgctggaaccaaatcgccttgaccttgaatggatattttcatgtttacttcacgtatgataaggtcaacggcaagaaaaatcatttacgttgtatgagagcattagatcatacctcaagttttctgtagatctcgatgctatttcatctgatgcatcatgttttgtgatgtagacttaagttttattattattatgattgatttatagtgaacctgtacgtcatgcaattaatgttcattcgtgattgatttgtagcaagtcccgtctcgacgaacctgtcgataggtaataatactacatta

SEQ ID NO: 17876 - DNA, 768 bp, Zea Mays
aaaattcaaaattttccgtacacctgcacatgggcccaaagacgccgcagaggtcaatgatgttaaagatgacctgtctcaaattggatttgatgtcgaatcaattcagaaaatggttgctggattggagggaaagatcgagttacttgagaacaaacaggacgtggctaatactggtatctggtatctctgccaagtagcaggcggtttaaaagatggaataaacaccaggtttttccaggaaaccagtgagaagctgaagctctcacattcagctcaacctgaaaacaagccagtgaaggggcttgaatttttttcggaaagcaccatggaacagaaagtagctgactccaaaccaattgcggtgacagtcgacgctgagaagcctgagaaaaccgctgctgtaatgggcaccacagtgcacaggtctatcaggttctcatatcggaaggcaggccttgctttgtgatcaaatcctctccgcttgagatgcacgtggccttcctggttgctttttcttttttggcaacaaccttcctggttgctttgtgtgatggtcagaaaacatagaagaataacctgcaactggagtgacagaatttcttttccccgcagtagacaggtgtgcgttatttggttggaattatctccagtccactatcaattttttttccttggattttgattcattttatgtttcgatttgttgccttatatactgtaaagtcattggaaagaataaataaaacacgaatgttttttgtcaaa

SEQ ID NO: 17877 - DNA, 83 bp, Zea Mays
ctcactccggcgggctgtgggagttttggccactccctccagaaccatggacgaggaagtcttggacgttgacagcaccctcc

SEQ ID NO: 17878 - DNA, 1246 bp, Zea Mays
tatgcatgttacctcccgacgcaagttctgaccgaatttcctggatggatggataggctgagcatggaaaaactttatgaatggatcctgaggcagcacgaaaatggtttgaggctaacagttgctgatgtagcctcccatatccaggtaagtttgcaatcgttccttgatatgtttctatacaaattgacaatacaaactcaggtaaaaaacctgcatatattgccatttcataggtcatggttagttctaaattgtgtgctactgacttgttgccttaatgaacaatagtttatgacaaatgagatgagatgaacttgttgttcttgcagacttaacttcgatcctgttcctatcctctgattattttctttgcctttttacatatccagccatagcatgtttgcatacagtttcaccattgttcttccttttgcgcatattcaggcaaagaatgattacacacttatgtatcatctgtgtgtagcatgagattcagtatggaggtgacaatgcatcagcctctccaaggtcacaataccctagccaaagcactgcaccgacaatgcacattcccaacacaagcaaccagcaaccatcgccaagcttatttgcttcaggaaaccctgggttgacacagtccaagaattccatggtcttttcaagcgcattatccagccccatccggcggagcctgcaaccttaccacctagagcaggacggggatgcagggtacttcgcgaacggtgcaagccgcgatgtgaaccccacggcttcgaatgattcgtccatggacatgcactcggacagcccagctcatgactcctactgagcagctcccaccatggaaccagcctcaagaacagcacttcaagtggaagaagtctgctgtcacagccttcccaggcctagtagtaatattcaatttaacaccttccatagcctctcttacactaagcgtgtgatgtcttgtgttgttactactacttaccacttgttgctttgcgagaattatgtaatttgcatgtactatactatactgtaccatttgatttatctgtgcatattactgctgttggtacgtgacaagtgcaggaaacaaaccactgaaaagaattaacagcttggacagtttgtgaggtgatcttgatttatctgttgccactgctgtcattcgttttttgttgagacggaaactgcataaatgtagctgctggtgttggattgtggtgaatcaaggcagcag

SEQ ID NO: 17879 - DNA, 1154 bp, Zea Mays
gctgtgtttacaaattacacctgcttgctgttgatcttcgtttcccgtccagccgtttttcgcatccacgtgggccagccggccaggcgaccgccgccaccgccgccctactcctggtcccagctctgctgcacccttcgccggcgacgagcgtccaccgcggcagcgaggaggtcggctacctttctcctccggcgagctccacgagggcgccgacgaggggatggacgcgcagcctaactggagaggtggaccggcggcgactaggatatcgtacaagaacgccaccatcgtcatgtgcgcctttaacctcttcgttgcggccctcctcctccacaactactactcgtcctggacgcgtatcgccggaggcaacaagctcgattctgctcagcttcggtatatatgggaatctgaggagctgcgtcgtgctatggagcctgtggatttgattagaagagtgaaggaaattgagcaagaagcttatggtgagcatggcatggcgacagatgaagatcctaagcaaactgccgctgttgatttatcaaaacggcttaaggatttgagggcaggcaatgatggcagtagccaaaaagctctcgaagaatggcgtaaacggaagatggagcgtgcaaggcagcgagccatcgaaaagaatgggacttctagtgtgaaaactaaatgaggtgaggagtgtaatgcagcacaagggattttgttttcatgtgtctcggagctgctccatgatgcattcaagtcaatccgtccatcgtaagcgagtgtagctgtgatgacccatgtttttaaagccacaggcagcggtgttcttgtagaaacgtgaagttttaatatttgtgattgtccatgttgccgtgttttttaaccgtcatgtatcagtatcaactttgtttgttcatggaatcatccctgcaaatactttatgcttttgcttgagtcctcatagtgtttggtttgacgagaagggtgaatgggatggggtcatctgtggatttggaaatatgaatatgtatgatatctgtttggttgaatggatgaggcaagttcttttggtttggttagatggatgagagtgaacaaaatgagaataattgactatttgtatctacattatttttttaaaaaataaaaattaa

SEQ ID NO: 17880 - DNA, 1384 bp, Zea Mays
gacaaacccactctggtaatccatatatgctacagtgaagagccacaagaacctgccaaacaccataatagattgggaccagcaggccttgcattgcattatgctaatatcatcaatcagattgacaatcttgtttctcgatcatgtgcaatgcctccaaatgcaagggatacattatatcatagcttaccacctaccatcaaatctgctttccgttctaagctacaatcttttgaagtcaaggaagagcttacagcttctaggatcaaagcagaaatggaaaagactttgcgttggcttgtcccttttgctagtaacacaaatagggcacaccatggcttcggttgggttggagagtgggcaaatacaggatctgaattaaactgcaagatatcagggcagatggacatgtcccgaatggagaccttgtatcatgctgacaaggagaagaccgaagcacttatcctggagctagtcgtgtggcttcatcatcttatcagcaaatcaggaaacgccagtggaggtgtaaggtctcccatcaaatctccagtcagctcaccaacacaaaagggtgctgcaatcacactgttgtcgggcaaaacaaacaatttgccaccgattctcacccaagaggaccaggatatgctaaggggtgttaagtacaggaaatttgttccaggaataagcaaaagccaagagtttgacacaaagtcaagtcacagcaaacatagtaggttgagcaagagcaacagccactctccggccagtggcagcagaaaagacttgctcccagttaggaggtcttccatgcttccagttattgacttcgagattgacaggaccaaggctttggatctaattgacaggcttgacaacctaaaagtacaatgagcatgaagcttattgtggtcatccgcagttcttgaaaccccagccgcgatataaacagttatcgtgtatcagcagcaagaccgcccgttaggctctgcggttacaagataacaaacagtatgataagttggtgtctcagatcctgtaccgaatagaataggaaaaaatgttgtaaaaattacctgtcgtttctacctgtacaagaaatggaaagtgcagtttttaagaaaaaaaggagggtgaaagggatctaggtgttctatgttttcatggccattagactggaatggtgtgtatgaaccatagtactcccgtcccaaaatattagtcgttttagctcttgatttttatatatctatattcaaatggatgatgaatctagataaatatataaaacaaatacattgattattgtatgaatcaactaaaaagataaataaattttattttgagatgaagggagtatctttttttgcagaaaaaaataaaagca

SEQ ID NO: 17881 - DNA, 626 bp, Zea Mays
tggacaaatcaaagaagttgaacgtgtaaccagagagtcaaacttctatgatgctgagaagacaaagaactttttgatggaagcaaaactacctgatgcccgtccactgattaatgtttgtgatcgctttggttttgtgccagatctcactcactatctgtacacaaacaacatgcttcgatatatcgaaggctatgttcagaaggtgaatcccgggaatgctccattggtagtggggcaattacttgatgatgaatgccctgaagattttatcaagggtttgatcctctctgttcgttctctcctccctgttgagcctttggttgatgaatgtgagaagaggaaccgcctacgtttgctcactcaattcttggagcacttagtgagtgaaggtagccaagatgtgcatgtccataatgctcttggtaaaatcatcattgacagcaacaacaatcctgagcatttccttactaccaacccattttacgactctcgtgttgtgggtaaatattgtgaaaagcgggatcctacacttgctgttgttgcttacagacgtgggcagtgtgacgatgaacttattaacgtcactaacaagaattcgttattcaagctgcaagctaggttgt

SEQ ID NO: 17882 - DNA, 2469 bp, Zea Mays
tgaaaacctagctctctgataccatatggccatagatgaggagcgctacaaggatgcagcatatatcagagatcatgctggcgcaggactgctggggtggtggtctggaatttctggaaatttgtctgatccatatggtcttattattcgtataagtgctgaacatggtcgatatgtggcaagaagttatgatacaagacagctggcttctgacagccctggtctccctatatttgaaatatactttgcagaggcaaatggtggatataacctacaggcagtgcatctgaaaccagatggtagcgattctgaccaagtgccaaacatgttaagggagaaacttggcattgacagtataaacatatctagcagtccattagggtctaagcatgaagaatttgatggaagtgtaaacatggatgataaagatagtgatgatagcaacatcgctgctggccctggttcgaaaaacttgtcaagcgatctaactgcagttcccaggattaaaatcttgaaagtggtacccatgcagaatgttgatcatgactacataatcaatatctttgatcagatttcagaggaagatgatgacaatgatgatcatgaagttgaaaatgaatcttcagaagatgttgataatgatgataacagtggagtagcagaaacagtttctgcagaagagaatggtgatgaatctggtgacgaaagtgatattgaaaccttggtttcatttgattttgtcagtgagaataacgtctatgcttctcgtccatctgctgaagcttttgaacgaatgccggctagattagaaaaaagagatcgcttctcattttccttctatactgaagaatacagtaaaaagctagatgctggaaaggcccggcagacttcaaaggaaacagttggtttgcatgccgatcagcaggattatgatggttttgtccagcttgatcgtgtaaagttgagtggcagcaacaaaaaactatcgatactacaacttggcatcaagcaaaataacaaggttcagcaaaaactgcatggagttacccactttagtcgtattcagatgcctatattttcagatcctcttaccggtttatatgtgaccacatcaggatttgactcagaaattcttagtttgcaacgaaaatttggtcaatggcgggatgatggttcatctgaggagcatagtgacctattgttctatgagcatgttgaagctgtaaaattaacaggggacaatctcatgccagctggtcaggttgtcttccgtgcaaaagttggtgaacgctatcagctccctcataagggaattatccctagagaacttggagtgattgctaggtacaaggggcaaaggaaaattgcagatcctggtttccaaaaccctcgatgggttgatggagagcttttgataatagatggaaagttcatcagagatggtcctgtgatagctttcttttactggacatctaattttcatcgtttcgaattctttagacggttgaggcttcctgaatagttcccatctaaaagtagttaaaggagttgcctggcattacattttccgaggacagattctgatgtgaagagggcgcctggcatgaatcaaggggcatctccacccactctgaaaggctgccatgagggtggaaaatagctcacagtcgcaggaagaggaatagcatcctgccaacatgggtgagctgcgggcgcatcataccaattccgcttctgctatgctccgtccaccaggtcaccagcttgtgaccgaggcatcaaaccgccagattttgtgtttctcagagcaagtagaactaaagcacctcaaagatgtaaatttatgcactcccaaatttaggattttgagcgcaatcttggcagttttcatacatgcgaagtgaactagtacgagcaatagttttgtatagcgtgatcaaacagtggcagcaatcagtagcagaggcatacagaccaacacggccacacagatttgttaatatatctaagtttgtttaaccttgcccatttcttaagcaagaactctatttttaatttttaagctcccattcaaacaagcaaggaaaaggctgtgctgtcgcttgtcgctgcagcaatagacaagactgtattcaggagatgatgtaaaacaggggacgtgaaactgtagatgtgtcatctacattgtttgatactttttgcagagtacttcatgaagtactgaagttttaaataggggataagatagagaatttgttaaagattaggcagcaagttttaaataggggatgagatagagaatttgttaaagatagcctgcctaagactactgcctcacttgttccacactctatttacaatggctgtgttacgaagggcagataagatctgttacatctgtccgctcactttggacactgtgtgcttattgagagatgtcatggactgtcttctccggcgaggttatac

SEQ ID NO: 17883 - DNA, 139 bp, Zea Mays
atcacagacataaatatccaacacaaacattaatatacaagttctcaacacaaacataagtatcaacacaagttcataagtatcaacacataagtctcaagctctgacataagtattcaacataagttctgaagtctga

SEQ ID NO: 17884 - DNA, 2267 bp, Zea Mays
taaagattagtggcccggaacctttgcggctttaccctcctggcctcctgtcctgccctgcctttccccccgcatgctctcgctcgctctctcgttctcgtggttctcccgagtcccgtgccgctcgagtgcgccgtctgcgtctctagtggcgacgactgggcgaccgccgccgccgccctacgcaaggtgcccagctctccattttcggtcccttcgccggacacgagcacccgccaggggactagaggctagtagaagttctgaggaatctaattttggaaatgacttaaaggatggttcttcagtttcttctgagaacttcggctcctcttgtctgcctggcgagagctatcaatctgccacagtagatcatgaaaaacgacctctttctgatgtcaagacatgccaaattgcttgcaaacgtccaaagcaaacagatcactgtacctggttatattcctttgaggaacaccctttgaccagtgaagtgggaatatcttctccagctttatatgatggattggttgagatcaaacaaccaaatgacattcctgcaattaatggtgccacaacctgcagtggtagttcagtgatcccttgccgtaatcatgatcaatcaattttagtggaaaacttagacatacctgattgggcgacttccttccctggttattttgaagactgtgggccagttgttacatatagccatgttgatgacattggttcgcctagaaagggtgtgccaattggacctgagcaccaggctgacattccagaatggaggcccctaaactctatgattgtacctggtgcttcagagttttgtgctaatctggattgtagttctgcttccacttcagagtctgttcccagaggtgatgactatgtaagtgacaagtggatcaggtactgtgttgttccggtgacatgctgctcatctcctgttgactgggctggagacagcaaaatagattgcaactgcagtgacgagggttctatgaggtgttccagacagcatattattgaagcaagggataaccttaaaatgatcttgggacaggacaggtttcgtgagttaggtctttgtgaaatgggagaggatgttgctctgagatggactgatgaggaggagaagctattccaaagagttgttttcttaaatcctgtctccttgggcaagaacttttgggaccaccttccggatgcatttcctaataaaactagccaggagtttgttagctactattttaacgttttcatgctcaggaaaagggctcagcagaacaggtctgacgtgttggctgtggacagtgatgatgatgaactgcatggtgaacctctagctgagcgggtggaaggggatcctgcagttgagtcctctacacatgaacattctgtcagcaattctctgcccatggatgatgaccataaagagtttgaaggagcacagtttgatggatctttgtgtgagaagtcagtatacaatgcagtcgagtgcagacatctaccaaatcagatgcctgcagattcaaatacggtgaacactgcactagatgtttgtgaccaagataatggagctcagtgttcagagtttcacatgtcactgccgagcgatacttcaaacagtcttggggatcaaagtgcatctgtataggagatgttgtgtggacaaggctctttggccgtcgagatgtccaaccaagaccatgaacaacaatgaaatggataacacattcagtttggatctgacatctacttcagatgggtgctgttttgccatggcttggagttgtaaattcagcttcatctggagttgatagttcatgaagttgtacattcttcaactactatgtacttttcgcggcattttgttagcacacttggaactcaactgagcttccacggggttttgctgcccccaccccctaccccccatccccattcgagaaatcaaccttgttgtatgtaccatctgttgtattttcatcgctgtatgtccattcgagaaactgaacatgtagattgtaagagttgccactgtctggattacccgcggtggttttcgtttgcagaccgagtgctttcggaatcgattcatgcaaataatgtgctaccgacagactccagttgaatccatttgatgtgatacgtttgtcacgactgcattcttttgttttaaagacagccagtgtaaggaatgtttggagtgtttggtttgaggaatgatgtagtccatcatcttttcactccttactttttttgtt

SEQ ID NO: 17885 - DNA, 2372 bp, Zea Mays
gccggcaggagcacgagggggggtcacgagcgacgaatccaaggcgcgaccgcaaccacgccgcaggcagcggtccggccgcccggccgaggccggcagctcatcacgagtgccagatccagtcgtggccaacgccaacacagcgccccctccccacgacgctgaagtcccagatctaaccacacagacacaacccaccacgtcgccaccaccaactaacccattaatccatcaacgccggtcctccacggtcacgcggaagtcaccgccgctctgccgcgctctcccgtagtcccgtaccgcatcgcgttcttcgctggcctcgctgtcgtctcatcgccattggcgtttcgcctgcagctgctcgtccgccagaaccaagcaggtgtaaacatgcttcatcattcaaatagccggaaccaaaggaacaggggatcaagaatcaaaactctactccaagcgaccttgctttcaggtgttgtcttttggctcctgtatcaggtgaagcattcctatgataagaaaaacgagtacttggatgatgctgaggaccagcttacccataatgatagaagcatattccaggcgaggaaacaaaaggcaggtagttacagtgatagcaacgtccaaatggttgtcgacaattctgatgtaacaactaaaccagaggaaggtgatgtagatcatcattctgatacttttgatcataacgagaagactgtagaaactgtgttcgataaagatagtactaacctgcatgaagatgacaagagaaacactgagagttcagaagcggaaggacaagtcaacagtggagatagtaatacagaagctaataataataagaatgaagatgaaaccaccagtcttgtagaaggacgcaagcatgatactgaatccaactctgctgctgagagtaaaagtgaagtcaattcaactggagatgaattgtcccaaaacaatcatgcacaagaggaaaacactagggaggcaagtggaatgtctcatgatgaagtagcgcatggtgacgaatcaaccagtgcaagtggaacttggaatggatcagatggagaaggtgagaaaaaggaggcagttgatactcaaactggttctgaaacccttcctgacgatgccaagaccgaagcaactgatgaccgtggtactaacagcctttctgacgaaacagggaacataccatcagttcatactgataattcacaaaatgatgccagtgaaaaccaaggagatgcaacatccactacctcagattcatctgagcatggcatcagtgaggctgtccatattgaaactggattggaacatggaagtgcaacaacatcatctgttactggatctggtgatgacagggataactcatctgatagctcctctgcaggaaaaaatacggagactctatctggtgatgataagaccaactccagcagcactccgcatgcggctccggatccgtattttgcggagtctagcacactattcatcagtccagcaggctccgtatccggctccgtaaaacgcacggcgtgtacccagactccccatttccacgctttctctctcctctccgcagctctctcgcgggcgcgcgtgcctgctggcgggccccaggtgtcatagactgcatgcggagtgggatggggagtgttgctggaaacggagccggatacggagaggagagagaatgtgtcggccgcgcgttttagggatacggagtcgcacactgctggagttggtctaagggcatggaaacaggtacaaccactgaagcgtcatattccaaagaagagaactctgagaacagcagtgtctcaactgaagcagagaactcccgaggagattcttccattggagtgaatggttcttcagaaacgtctaccaatggtgagcaggtggatcccaagactgaaactagcacatccaccagtaacgtgcacaatgaatctcaaggggctgatggcagttctggatcaaataactcaattggtaacggccctgaacaaaccggtaaaactgaaaggcagtgataccactatctagacacgaacattgttttagtataaagatttgtttcctggagattgaagaggctagtactgaaccaagaaaaactgttcacattgtggcttatggtgattttagttgatactgctgaagtacaattgtgcacatcgcaagatcggttgtctgctatgcttattgcttatgccatgatttctcgtcaagttgtatcagaacgagtcattatagctgtacggttattaatctctactagtacaatgcccgtcccttctgttgcaatgcaaggacacacaaattattcaaatataatattagtcaaattattcaaatataat

SEQ ID NO: 17886 - DNA, 3743 bp, Zea Mays
atggcgagcgggggaggggggattcgggcgacgacttcggggaggatgaagtcgcgagggtggggagattcaagcgacgactttgggacaccggctattgcgctgaggcgtgggggcgactgtagtggcacggcgagttcagactccagcgccgtcttcttcgcggtcgccttttgcgctccatcccctgggctttccgtcacggcggccgcagccatggtggagatgcggcagcggaggaagccgctggtgctcgcctccacgcaggcgctcctcgactcgcttccgggggatcgcccgccgccaccgccgcagaagccggtgcgccttaaggccggcgtcctccgattcccctccggaggtggtggcgccgagttcggggagctcgcgtctttcgtcggcatccctgcccctgctctccgacggctcgcggtcgtcacgggtactcctgtgcttgtcaagaatactgacaataatgttgggaggattgtcaaagcagtattgtttggtaacccgtcccttgacaagtcctgctcagaacatactgaccaagtggtctctgcctctctctctggtcatgcaatgggcttcttaccttgtcgcacgttccctgctattggttttacatccatggatgaagatgttggttatgttagcccacttttggcattcaacttgggattgcatgtttcttgccttaaacttcttattcaaagagaagggcagcctttcaagttctgttctcgagctgaagagattgatgcaactgccagttctggaagtgatctttctcttcacttagaccttcttccatgccctcaagtgcctaaatatgcattgcatttacgagtttctgttgtgaggattcctgattgtggtgtgcttgcttctttaaagatatattcatcctttggaggaagtgagtaccaagacatggtagatcaagctttgaacgagtactttaagtttgataggttcctagcaagaggagatgtttttggtatacaaaacagttggaagtgtggctcaagctgctgcctggcatgcaataagcaggataataaactgaatccccgtaatatgatctactttaaggtgactggcatggaaccatcagatgaacctatacttcgtgttaattgcaatgaaacagcccttgtacttggtggagctgcttctgctgcaatccccccttattccttttttgcttcttctggtaattcagtaccattgcacagtgaagtagtggagcatttagcatctgtcattgcaccagcattgtgcccttcggatattttaccaaaaataaagttttccacttttttatatggcccgccaggatgtggaaagcgcacagtggttaggcatgttgctaaccatcttggtctgcatgtggtcgagtgtagctgtcatgatctgatgacatcatcagaaagtggggcacctgctgcacttgcaactgcctttaaagaagctcagaagtattctccttgtataatacttcttcgccactttgatgcaattgggaatgcatcctcaaacgaaggtccacagtctgagcaatctgggattgcatcgaacattgaatctgtcattaagcagtacattggacaacgttgggttgctaaggattcactgccaggaaaagatgtaaatgggagctcatacctcgtggagcctgaatgtgtaagctctcttcaaatcatactagttgcaactgcggacagttctgaaggaatgcaacagtcaattagaagatgcttccgctatgagatcgacatgaagactatgaatgaagaacagagaaacgaactgatatctgagacacttcaaggcattcctaaagttgctgatgagagtatttgtgacaagttcataaaagatttagcagcgcaaacgtcaggtttcatgcccagggacatacttgcattggtcgcagatgctggtgtgtcttttgcgcataaaattgcagcagggaaagatagcaaagcaatcagtaagcatacggaggtccttccagaaagctcttctgccactcaaaatgaggaacaccatttcagcaaagaagatattatgtcttccttggaacgagccaagaaacggaatcgtgctgcactgggcacacccaaagttcctaatgtcaaatgggaagatgttggtgggctagaggatgtgaaaaaggttattctagatactattcagttgcctctgatgtacaagcacctgttttcttctaaattgcgcaagcgatcaggtgtcctgctatatggacctccaggaacagggaagactttactcgcgaaagcagtagcaactgaatgctcattgaactttcttagcgtcaaaggtccagaactgataaacatgtatgttggagaatcagagaaaaatgttcgggatatttttgagaaggctaggtctgcacgcccatgtgtcattttctttgatgagcttgattcccttgctcctgcacgaggatcctcagcagattctggcggtgtcatggacagggttgtttcccagttacttgtggagatcgatgggttgagtgacaacagccaggaccttttcattattggggctaccaataggcctgaccttcttgattctgcccttcttcgccctggtcggttcgacaagcttctttatgtcggtgtaaatactgaggcatcatacagggaaaggatccttaaagcacagacacgcaagtataagctgcacaagaacgtttctctcttgtcagttgcgcagcgttgtccaccaaacttcactggtgctgatatttacgcgctgtgtgcggatgcatggtttcatgcagcaaagcgatcagttgaaacattcgaaatcgatccttcaagaagtaatgaagccagtgccgaagaagtcatcgtcgagatcgacgattttatcacggtgttaggagatatcgcaccgtcgctctctctggacgagctacaaaactacgaacagttgaggcagaagatcgaaggaccttctagatgaagttgggtttccactccctgctgacattcttaaactgctaacacaccaaaacattccctgtcttacattttcgttcgtacacaagttttcctccctgaaaacttgggcacttctatatccattcctgatttatacaatcacatccttgtagcagcatctgtattgacatcagaatgacattttctctgaagagaaacatcctgtcattctttgttagcagctccgcaactattctgaatgagcccgtgaagtcaagcactcaaagccttacctgggaaacaaaatgctattcctgacctgaaggaagcatccaccaatacagctagtttgggtacacacgctgaaccagctagttcgcctgggagaggcctctgtctcgtttagatgccatcgtctagaagttgtatcggaaaaattataagcgaatgttgcaatgaacagagttccttgtactgctgtgatttgtcattggtcaaagagaactaactgcagcgtttgtctacctacaatacttgtttttttgttgttgctatcttgtagtgccagcagcgatgcctccttgttggtgctcggcaagtcggctggtgtgagcaaaatccgtacgtcgtcgtctccagtggtgtcattctaaactggatctgctgctctcgagaccgaacaactgcaacaaactcaggcagggactcagcatctacacatcctgttctacggtacgatgttcatttttattaaatctgcag

SEQ ID NO: 17887 - DNA, 114 bp, Zea Mays
aggcccacccacccggtatttttcgcaagtcgcggcatttttcgagcaaaattcgcgcgctacgcggttgttagtattcgaaccgtcgacctcaccctcgcgcgtaccctcccc

SEQ ID NO: 17888 - DNA, 2073 bp, Zea Mays
gcacgagcatcgcggcggcggaggcgagggcacgcgcgggtatcgcgggagcggggcatggggaggcggagggagcgcgacggcagaaccgtgcactatagtcgaatatgaacgcctacgatacaaacataaggagtagtaaagataaagatgtagagagttttttccgatgacccatgccgcactcaccaaaaatatctgcgggccagcgcgcgtgcacattggacaagtggacaaccgaggtcaccgactagtgggccccacacgtcagcccctcgatccgcttcccatctgatgctcgtgctccgccgcgtctccttcctcctctcgtcgccctcccctcgcgcaccgctcgcaaaacctctcctgctcctacgcccgccccaaaccctagccccgacagcgcggcagctcgtggctatggccgcgtcagtcccgtcggcgggtggggcggggacgatgagccgcgacgcgttccgcgcggccgtgaccaacacgctggagcgccggctcttcttcgtgccctctttcaagatctacggcggcgtcgcggggctctacgactacggacccccaggttgcgctgtcaaagctaacgtcctcgcattctggcgccagatatctccccgtcaaggccttttgagagtccgtgagtttactttagcggaaattgagcactttgtggacccagaggacaaatcccatccaaagtttggtgatgtttctgatctagagttctggatgtttccgagagaggatcaaatggcaggaaggtcagccacaagacttaaactcggaaattctatatctgagggaactgtgaacaatgagacccttggctacttcattggaagggtctaccttttcttgacacaacttgggattgacaaggatcgtctccgtttccgtcaacacctgccaaatgaaatggctcattatgctgctgattgttgggatgcagagattgaatgctcctatggttggattgagtgtgttggaattgctgataggtctgcctatgacttacgtgcccactcggataaaagcggcgagaaacttgaagcacatgagaagtttgctgaacccagagaagtggagaaattagttataacgccatcaaagaaggaacttggtcttgcattcaaagggaaccagaagttggttgttgagtcattggaagccatgaccgagaccgaggcactggacatgaaagccgcgttggaatccagaggggaagtcgagttcaaggtgtgtacccttgggaagaatgtcaccataaagaaaaacatggtttcaatcaacatcgagaagaaaaaggagcaccagaggaaatttactccttccgtcatagagccatcctttgggatcgggcgcatcatatactgcctttttgagcactgcttctaccaaaggcctggcaagaccgaggatgagcagctaaacgtgttcaggtttccccctctcgttgctccaataaagtgcaccgtctttccattggtcaagctcgagaaatttgaggctgttgccaagaagatctccaaggccctgacagcagctgggatttcacatatcatcgacatgacaggtaatacaataggaaaacggtacgcaaggacggatgagattggtgtccccctggcgatcacggttgatcacaccacgagcgtgacggtgcgcgatcgtgacagcaaggaccagatccgcgtggatgtggacgaggtggcctcggtggtgaaggaagtgacggacgggcagagcacctgggctgacatcatgtggaggtacccggctcacacggcctcggccgccgacgaggatggggcacagccctgaagaggcacagccacaacaccacccaacgatcgttggtctctgatagttccttcctgcgttccttaacagaaacagactgcattgttgtgtaagcctacagtagccagattcctgcacatttaaatttccacaaacaaatagtagcctctgtgttataaattctgctacaacatttcatcctgtttcacccttgaatggacctgtgatgtttgcctcgtcgtgatatgaaggaactagaaa

SEQ ID NO: 17889 - DNA, 2538 bp, Zea Mays
gagagaggccgcacgaaatccaaagcagctaggccagatcggcgaagggagtgagtgacgccactcagagcttgctcgagccaccaaagaggccaagagcttagcttttacctaaagcagctgaggtacctcaccatcaccaccaccgacaccaactgcgccgaggccggaggcggagtagagccagaccagaatggtattggggggaggccctctaggcgccatcattggccgctacccctcctcctccgccgccgccggtgacgatgaacaaggggacccgggacccggaggaggcgtcattcgccatgaccgcaagtgccgggactggcccttcctcgtcctcttcgccgccttctgggttgccatgattgtcaactccagcttcggattcaaccagggcaacccactcaggctgacatacggactggactacaaagggaacatatgtggcagcaggcatgccgatcctgatttgtatcagttagatgttcgctattgggtgaaccccaaccaggtctaccaaagtggcctcaaaaccagtcacatcgagctacctgatgctaaaaccatctgcctgatggaatgcccacttcctgccgaagatggcttgaattttgtttgtgattatccagaaggtgacatacgcctctctgtcgacgactggattgacagggactacgattacttcgagtacctcacaccagacatgaggaatagttctcttcagctgcagggtccatgttaccctgtcatatttccaagtgtaaatgtctactggagctgccagtttattgcacgggcatccaatgcctctttaaagcattggaaggacatgggtggtgtcaccatcgacgaaaacatgctaatagacagaacaattcatgatgcaattaatagcaaatctgccgtcatgaagtggtggtcttcaatgctcttgtggtatctgttacaatgttcttctatataaaagctggttggattggccatgatcctttgactgttgtaattggtgaaagtgatccttacgttagcataggtggacgagagataaatcaccttcatgctgcttccgtcttgatgacagtgataatgatacttgctttcctgacttcaatagctatcgctcggcgcattatgaaagcaacatcagtcctaaagcacttcatcttttcagcgccggtcaagttatacaaaatgattgcaatacagattgctgttcctacgatctgaaacttggcaaagtaaattgtgacagatgttgtggctacactatccattacaccccacatattggcatcgccattcttttccatctttttggctgttactgggcaacacagtttttcatcgggtgttcttcgactataattgccggatcggttgcttcatactactgggcacgcggtgaaatatcgcacgatatccctttccataccgtggtatcttccctgaagcgcttgttgcgctatagcctgggatctgtggctctgggctcactgatagtgtccatcgtagagtgggtgcgattcatactagaatcactacgccgcaggctgaaatttgttgactctgcccgcggaagccggttcgggaagacggtatcatcctcatcccagtgctgcttaggctgcatcgattggaccctgaaatcggtgaatcgaaatgcctatgtcatgattgccatcacagggaaaggattctgcaaggcttccgtgctagcgactgggctgatcatgaacaacgtgttgcgcgtcgggaaggtgaatgtcattggggatgtgatcctcctgttgggcaaactttgtgttagcctgttgtgtgcgctgtttgccttccttatgctggacgagcacaagtacagatctgggcataacaagatctcatcaccgctggtccccgtgctgctgtcgtgggcgctgggctatatagttgcgaagcttttcttcgcagtggtggaggtgtcgatcgacacaatggtcctgtcattctgccaggactcggaagagcatcaggggaacgcgcggtatgctcccccgctgctgatggagacattggacgaggagagcgagttgcgaaggctgacacaggggccatgatcgatcttccaaataggagacactgaactgaatggctgtgatgttggttgcatgtcttttttatatgaatcatcactggggttgatggatggagctataggtgcaagcatgtctttttatatgtatcagctaaatacgaggaatagaatagaatagggcttagtgctggaattgaaacccaccgtctgtaatgtatgttcggctttatttgatatgtcttttttgtttatatattgttagactatgtgtgtggaccgacaccactgttgggctgccgacccattagggttagggttgtgagtctatatattgcactctatcttatatcaatacatcaaccaatttaggacttgttcggttagctctcaatccatgtggattgagtgagattcatggattgagtgggattggatgtgtttaaatctcaagcaagttaaag

SEQ ID NO: 17890 - DNA, 605 bp, Zea Mays
tgcaaatgactgctattatttctgtatcttactgaaatacaaaataaagtttgctgcaaagatatgtcttctaacatcattcagagatacctgttttgttgaaattgttccacaatatcaagctccacagagagagatttggctgagtttctggtccgaagttcactataactcactgtacgatgctcgagatctccctagcaaatacaagcctagaaagaagcattggttgttgttttgatatccacgcgggggtttgcttcttaatggtggaatcatattgcttgaccgcttcgaccaccggccgctggtggcagcctggtcatagctcattgtggctctatccactatatagctatgcatcaatgatccattgtattgctcggtacaactccatcacgatccaggcatacaacactagatacagttacaatgccgaacctgagccttgtgaatagatactcctttactgacatacaggttgattgtataccatgtcctatttgttcattgttatattctttatttatacagttacatattattaatcttcatcagttcattattcagttcatatttggaagaattcatcatcgtgttcttgg

SEQ ID NO: 17891 - DNA, 197 bp, Zea Mays
gagaagaacaggtgctctaggaggagccttacaacgaagagtatgagctcatctaggtggtgtctcccagtcagctttatgacgccaaggatttatgtttagttcgctttattgttctcatttatttttgtaagactcccgctatgtaataatgatatttgtgatatttattgttctcattatatgtgatgttcttt

SEQ ID NO: 17892 - DNA, 2661 bp, Zea Mays
ctctgtgacccctccccgcgcggcggtcgcggtcatcccgctgtcgacgctacttcggcaagatgagcttgcttgggacggggcttcagcctcggcctcgacccgcgtcaggtgaaggctgcggcacgcgtcccctcctccgcctccagtctccgcccaactcaaaaccctagcaaccgcgcctccatccctacccgaattccaatccaggtccgatcccccggtggcgaggacacccggcgccgattcgtccccgcagatcgaccgggcaggacatatttgggttcggggtccgctcgagtcgcctcgccggggtccaccgcggcggtcagggggtatggtgggcggcgggaggcggggcggagcggcggaggaggtcaagctttacaccggcaacgtgttcgcggcgctcgagtccctcaagaagaagaagaagaagggtgacaaaggcaaggcggtcgggaggaggacggcgagggggccgctgaaccctgggcaaacaggcgagcgagtacgccgactgcgaggagtaaacttgtgtcatctcgcgcggggccaacccgaggaccacgcacatcctcgccggcgagacggtggaggtgcgcaggggagacgtaggtggtggctgcacgaaggtggttttcagcattgagccgttggcattgagcgaccggcagcagcccgcgtcttcgtcttcgtcgccggcggcacccgccagagtcgtcgtgtccggtcgttgctgctgctgcatgaagaggctgctggaggaccgggacatcttcatctacctgggcaagaaggccttctgcagcgacgagtgcaggaacgggttcactatggaccgtttggctcgaattgtcttgagcccaaggaaatctgggcctttttaatcgtcgtcacctagctcgcggatggtccgcacacagtttccaccgtcagtatcgcattggagtgaaacaacacccatccttgccaccgattaggaacttaggaatggactcgccggtgcctgctacgctcgcccgcgcgccagcgagatcgcaagcgcgggcgggcgaggaggcttgcgcggatactcggcaggatgctccggcggaagcggagccacctccccgtcggccacccgcgttctacagctccgtgtttgcgtagatcgaagagatcgggtggaagcagctggtgagcgccacaggagacggagtgtcctgtctcaccttccgcgtcgtggatgaaccaggacagatgcatttactggagatcacactgcccatgggctatcccgaaagtcctccttcaatctctgcagttagtctctatcctgatatttttattatactttgccagggatgaactaggcatgtttttgattatagcccatatgtagccgccagggatgaactaggcctgtttttattatactttgcagttgcatgaaatttcagaaccataaccatatgggctataattgaacttgtctcattaacaggacgtaccatatctcccaaaaatacattggtcaaaaaactcaagactgaaagatgttatttgccatgtctcattaacaggacgtaccatatactcacatatttcctgcattgcattgtacacattttcttatatattaacgagtgcaggaacgagttcatcgaggaggcggcggaggaggagctcatgattctagatcctgctcgaaatctttgatcaagatttgttagttgtcgtggcaaaagtagagagtgtaatatttgcccgcaatattttgcttctaccttcaacttggggactacttggctgggagagtgagtgggggaaggacaaaggaaatgcctctcattcaagttttttgctgtaaggagaggtcgtcccggtttggccaaccagtgcaatggtcgagccagccaatttccgtggtttgttgagctccattttggctactgtcatattagctcttcggcatcaatttccgggaggaggatggcgagggggccgcgcagcggcaagagccaccgcagaaggagctattctcagccttctcagccttttccagtttattttattttttatttagtagcatttcgttaattccagttctatttgttacaatgattccagttcgttcttgtagcaatagctggctctggctgaattttatgatctatcaatttaatgtcatcatcatgattaatgtggacttatctagactgtttttggatagagtagtagttagtgatttctgatccgactattgtcgctgcaatctttcatgttctttttatgtagtctcactttgctcctttttcattaatggtttattcgtggacattttcaacttctaccatcaaaccttctgatgttggtactttgtgttctattcaattattttacccataaaagaacttgggattattttataccttttatctctactactacttaagtgtctattgtaggcgtccacaaaggcggatggtgcacggttctgccggttccgcatcccgccagattgggacgaattcggcatcggctccaccaaaggctccacggatttggcatcagctccacagattttcgatactgggtaacagaaatgcatgtttatggtgttcgttttgaccttgcattacatctacaatgaccagaggatgcaggactcagttttcc

SEQ ID NO: 17893 - DNA, 100 bp, Zea Mays
ccttgtaccatgtttgtttgtattctgacgagtagacgagccagtggccgaggattcaggtgttcagcaggtagaacttgcggagctcattgaaggcaag

SEQ ID NO: 17894 - DNA, 1331 bp, Zea Mays
agccgatcgagtgcggaaaacaccacgccaggggtgcttcagatggcagtaaagcgctgtctgattcctgtatatttattttggcaatgctttcagctgcaacaaaactaaccatggatggcactagctttgacctgacagagcacgaaggttcaaatttgtctccttttctactcaaactttttaatgagtgggatgatcgcaagacaaggggcttgtttcaccatgacatcagttcctgtgaaacaaaggtgctacctggagtacataattttgtggcaacattaattgaaggacgtgaccaaaagaagcggccaactgagttcacaatgaaccaagttctccagccatttgttagtgagaagttcaatttcacaaaagtcagcccgttggaggtgatctttagattcaatgacactgagaaagattctgcacaatattttgatggtgttcctgatactgtttcagcttcttctagtgccatcttgattaatgtgagcccaattggctactgccatgtgctattgactcccaagatccaggactgtttgccgcaaaggattgatcaagagagcttcttaatagccatgtatgttgcaagagaagcaaggactcccttcttcagagttggttataacagcctgggcggctttgcaactatcaaccaccttcacttccaggcatactacctgaaagtacagtatccagttgaaaaggcaatcacggagaagctcaagaccctagggaatagcgtgagcatttttcacctggtggattacccagtcaatggctttgtgttcgaaggtggtgcgagcctggaagatttgtcagatgtggtctccaaagtctgcatcttcctgcaagagaacaacagacctttcaatgtcctcatctctgaatctggcaagagaattttccttctaccacagtgctatgcggagaagcagctcctcggaaaggcgagccaagagttcctggacatgagaatcaatccagcaatctgggagctcagtggccatctggtactgaagcggaggaaggactacgaggaggcctctgaagcaaacatatgcaggtttttggttgaagcagctctttctgaaacagaatttcaggagctgaacctatgcgtgctcgacttcctgaccagctctcttggttgaaactcggatgtaggttcctatagatagtaacagttctgaggttccagttaaaacagttgtgctggtactgttactttatgatggtatatcatgtagtagtatttctgatttgactcgtcacctctgcgatgaaataatatgtcttctccggcttcaatttcgtaaaga

SEQ ID NO: 17895 - DNA, 3685 bp, Zea Mays
cgtggtcattggcctccaccagatccgatgccttctttttcgctcttgctctgctctcatgggcagggcagggcatgcccatctacttgaattgcgatgcgtacatacatcgctgtctccatctagctgcacacatatatacatacatgcatacagagtgagagagaaacagatcgatctcacttagctgctgctgctgctgctgcttgctggtggcctgggcctggctgctgtgtctgtatcgatgtgtccgtattttctccatctcgtctgcatacgctgcaattggtaaggagctagctggcctttcatgtcttccatgctgccatagccatacggccggccggcaggcaggaggataccccatcgctcgctgcacatgcatgtatgcatggggatacatgttcatcatcagcagcacagtggctctgtatcccccatcccaatctgatcctatataggaggagaaggaggagcagcagcagcagccaggcgcggccggcggccggagtagtatccgaatccgctcaacacccaccggctggtctctagctttcctatcgatcaatggctttcaaaggactcccgcgtgattcccgagggtccctcgaagtcttcaatccagacgcccctgtttcagatcgagcaaccacctccccgtttctcctccctcctgcggccgcgtcccatcccagcctcctcgccgccggagatggcggcgatgctgacgtgggtcgggcgacacagagggccgccgagtggggcctcgtcctccagaccgacgagcacaccggccgcccccagggtgtcgtcgcccgtccctccggttccaaccgcaccagcgagagtggcaactccatcgacgagagggccgccgccgccggtgctggtagagctctcccccgggtgtcggaggagcttcgcgccgcgctctcagcgttccagcagaccttcgtcgtgtccgatgccacccgccctgaccaccccatcctctacgccagcgctggattcttcaacatgacgggctactcctccaatgaggtcgtcggaaggaactgccgcttccttcaaggttctgggaccgaccccgtagagatttccaagatcagacaggctctcgcagctgggtcaaattactgtggccgtatcctcaactacaagaaggatggtacaccattctggaacctcctaaccgttgcccccataaaggatgaggatggcagggtcctcaagttcattgggatgcaagtggaagtaagtaagtacacggaaggtaacaaagatactgctcttcgtccaaatggattgccagagtcactcatcaaatatgatgcaaggcagaaggatcatgctcgtagctcagtctcggagctcctacttgccctgaaggatccacggtcattgtcagaatcaagaaacaataccttaaaaaggaaatcacaggaatcagcaggttcagctctagttcccggcaagagaagctccgaaactggatcccgtcgtaactcacatagtggaatgagaaactctctacaaaaaatcagtgaggtgcctgaaggagggaataagaccaggaaatctggtttgcgttcttttatgggccttattggtatgggacatgggaatgtagagaagaacattctaaaaccaagggaagatcccctacttgatagcgatgatgagagaccagatagcttcgatgacgatttcaggaagaaagaaatgagaaagggcatagatttggctaccacacttgaacgtattgaaaagaattttgtcatcaccgacccgaggttaccagataatccaattatatttgcatcggatagctttttgcgtttgacagagtattgccgcgaagaaatattgggaagaaactgcaggtttcttcaaggacctgaaactgaccgtgggacagtaaagaagataagagatgccatagataaccaaacagaagttactgttcagctgataaattatacaaagagcggtaagaaattctggaacctctttcacttgcagcctatgcgtgatcagaagggtgatgttcaatacttcattggggttcaattggatggaactgagcgtgttcgagaggctgctgcaaaagatggtgccatactggttaagaaaactgcagacaatattgatgaggctgcaaaggagcttccggatgctaatttgagacctgaggatctatgggctaatcactcaaaaccagtcttgccaaagccacatatgaaggatactgcatcgtggagagccatccaaaaggttcttgagaacggtgaaagcattgatttgaaacatttcagaccagtaaggcctttaggatctggtgatactggcagtgtccacttggtggagttgcttggcacaggtgaatactttgccatgaaagctatggataaaagtgtcatgcttaaccgaaacaaggtccatagagctaccgctgaacgacaaatccttgatatgttggaccacccattccttccgacattgtatgcatcatttcagacaaagacacatatatgtcttattgttgactattgtgctggtggggaactctttatgctccttgataggcaacctatgaaggttctgaaggaggatgcggtcaggttctatgctgcagaagtggtcacagcacttgaatacctacattgccaaggtataatctacagagacttaaagccagagaacattttacttcatagagatgggcacatttcattgacagactttgatttgtcttgcttgacatcctgccgaccacaagtgtttcttccacacgatattgataagaagaaaaagaggaggaagagcaggagtaatcccatattttttgctgaaccaatgcgagcatcaaattcttttgttggagattattaccggagctggccatacgagtgctgtagattggtgggcgctaggaattcttctatatgagatgttatatggttatacaccgttcagagggaaaacaagacaaaggacatttgctaatattctgcacaaggatatcagatttcctgcgagcatacaggtgagcctggcggcaaggcagctgatataccggttgttacaccgagaccctgcaaataggctaggttcctatgagggcgctatggagatcaaacaacaccccttctttcgtggcataaactgggctctagttcgtgccgccacgcccccagagctggaggctcccctccaggatacattggaggccacactgcctcctcctgcagctgatggggctcacaccgatatgttctgatcatacattggtccatgatgctacatgttaatttgcttaaaggaagaaaaaatattagatgatgaagatgcatgactttggcatagatgagaacaataatgtatgttaaggactaattatcttgatccatctatgcatgctcacaattagaataagattggatgtgtatattgtttctgtggttgcaatatacgcacgagtctatgaaaggacctatggatagcttgaggggatgacagacactaggcatgttgattagtactccctccgtttcgttttacaagtcgtttccaacagcttcgtgctgattaaggaatctatgaatcaatgattctgccctcccacaagcctcggcttaggccttggcatttcgtccaaccttatccggtaaacacctgctgtaag

SEQ ID NO: 17896 - DNA, 157 bp, Zea Mays
gaaaactttgtgatgtggaccttgtgatgtcaactttgtgatgtggactatgtattatggactatgttatgtggaccttgtattaaggactatgttatgtggacttagtgatattctgtgttatttgtgatgtattatatgctgaaatgtggtgata

SEQ ID NO: 17897 - DNA, 1710 bp, Zea Mays
gagcaaccctcgtttaggaaattagtacccaagatcaatttctgttcgatcctcaaatcaagatatgttactggaaggtcatggggcaaaacaacctccacaagttttactggttctaccaccaaacatgagcagagcttgcatggaaatgttaagccgttgcaattggcggcaaatgaatcctctcgtttggcttacagaagtccagcacttaaaaaccagtggaatcttcctgctagttcttcctccactaatgtggttaccacctttgatgataacgaacacgtgtcttccagtgttattgaagaaaaagttggagtactgttattaaaccttggtggtccagagacacttgacgatgttcaaccatttttattcaacctatttgctgatccagatatcattcgactccctaggctcttcaggtttcttcaaagaccactggccaaacttatttctacttttagagctcctaagagtaaagaagggtatgcttcaattggtggtgggtcgccgttaaggaaaattactgatgaacaggcgaatgctttgaagattgccctggaaaagaaaaaattgaacgcaaacatatatgttgggatgcggtattggtaccctttcacagaagaggccattgatcaaattaaaaaggataagattaccaagctcgttgttcttcccctttaccctcagtactccatatcaacaagtgggtcaagcattcgtgttctccaagacattgtcaaggaagattcatatttttctggtttgccaatttccattattgaatcatggtaccaacgagatggctatgtgaaatcaatgtctgacctaattgaaaaggagctctccgccttctccaatcctgaagaggttatgatattcttcagtgcacatggtgtgccacttacctatgttgaggatgctggagatccttacagagatcagatggaggattgtattgctttgatcatgggggagttaagatcaagaggaatcttaaatagtcacactttggcgtaccagagtcgggtggggccagttcaatggctgaagccatatactgatgaagttttagtagaacttggtcaaaagggtgtgaagagcctcctggctgttccagtaagctttgtgagtgagcacatcgagacattggaagaaattgacatggagtacaaggagttggctctggaatcaggcatcaagaactggggtcgggttcctgctcttggatgcacttcaacattcatctccgaccttgcagatgctgtcgtcgaagccctgccctctgcttcagcgctcgcgaccagaaagcctgacgacatcgattccagcatggacctgacgcattacctcaccaagatgctgtttggctcaatcttggcatttgtcctgctgctatcaccaaggctagtttccgccttccggagcaccatgctttaagtttttctccaaagcactaaatttgagattgagaatgagatatttcattttggacctttttttcctccttaatagaatgatgtgcagttcttctgctcgttccagagaaaaaaataactgctaggaactcacaaggtagtaggggattgcaaaagggatgtgaacagctgttttgatcgaagttgtctataaataccgtgctcacggactctgtattttaatggtttcttgtgctcgactaattttgttgttcttgtccaaggtttt

SEQ ID NO: 17898 - DNA, 1707 bp, Zea Mays
cctcaccttcaatgtcactggtggcttcatttttatgaatcttccgtctctttcgctaactgtttggatcattttacgtggagattgcatgccatcaccttccttgaagtgaaaaatatatgggctgatcttggcatttcatgggaggttttgaagatgatgaaccaccctcaaaacgcgcaagagcatcctcagtagaatctgcaagtttaccagactgtttcttgttttcaaaatctgccaatcctttgggaagtacaatggctagacctttgccttcccaagggaaagaagctatggttggttccaagggtgttattaagaaggaggaatttgttaggataatcagcaaaactctgtatagtcttggatatgagaaaagtggagcagttctggaagaggaatcagggattactttacataaccctatggtgaatcttttcagagagcaggtgattgatgggaattgggataatgcggttgttaccttgaataagattggccttcaagatgtaaacatcatgaaatctgcggcatttttgatattggagcagaaattctttgaacttctaagaaatgacaatgtcatgggcgctatgaagactttacgacgtgagatcacaccccttggtgtgaatagaaaaagagtgcatgaactgtcgacttgtatgatttcttgttctccacagcagttgttccttgggttttcaaaacttggcattgattcttctagttcaaggtttaagcttctagaggaattgcaaaaggtgctccctccaactgttatggtgccagagaggaggttagaaaatttagttgagcaagcacttactgtacaaagagatgcttgctacttccataattctgttgatgggttgtcactttacattgatcatcattgcgggaaagatcagctaccatctcgcacgttacaggttttgcatgcacatcatgatgaagtgtggtttgtccaattttcaaacaatgggaagtatttagcctcagcgtcaaatgataaatctgcaattatatgggaggttaatgaagatggagagctattactgaggcatacattgagtggtcatcaaaagtcagtgatgatggttgcatggagttcagatgattgccagctcctcacatgtgggcaggaggaagccatcagacgctgggatgttaaatctggcaaatgtcttcatgtttatgaacatcctggcattggtttgagatcatgtgcttggtttcgagatggaaagcaaatattgtctggtctagctgatcaaaccttttgcatttgggatttagatggtaaggaagtagattgctggaaagggcagagatcggcaacaacatctgattttgctgtagcaaaagatggaaatcttataataagcttgagtagggacaatgcaattcttctatttgatagggagacaaaacatgagagaataattgaagagggtagtacaattacttcattttctctatcagaagatggtgatttcctgcttgtaaatcttgtaagtgaagagattcatttgtggaacataagaaatgatcctgttcgagtcaaccgatacaatggccataagcacagccggtttgtgataaggtcttgttttggcggatctgagcaggcgttcattgctagtgggagtgaagattcacagctgctgagctttttctcgaatttggcctccactgttgtcc

SEQ ID NO: 17899 - DNA, 736 bp, Zea Mays
gtcaagttttaatttggtttggaacaaaactatagcataccacaataaaggcccataacaatattgaacttttccatcacgcaagaaggaacatcaatggtcttttacaaagcatgagccaaattcccggaataatgagcaagatgcccccattgcctatttcggtggatgaaaggctagctagctgcatactccctcgtgctcctatggctcaagttcttggcagcagtcatttgaaagaagaacgaagagtatggtaggccactgctagacagggaagcagctcaattttcagcagcagtttgaccaaaaatatctgaagagccatgtgcttgggagtctgcatggagaagcataggtgaaagaacgatctggcttttctgatggtctcaaagctacagaagcaacatgatccacttcacctcatggcttaaagaacactgtctagcttgccttgtcaggatgctctgtattagtgatcaacaaatttgagatagggagagttttccgtaatctgcagttttcctcaccttggttgcacatatcgattcttttttgggttttgtcctggtgatcgatgttaacagaagtgtagcgtagaaattgaactttgatatgaataattagcaggaaaagcctagcctttttgtcagttactacaatggtaaccaacctcctgtgtatctagtattctagttctagtatgatgcatatgcaagcctggttctctaaacgt

SEQ ID NO: 17900 - DNA, 1566 bp, Zea Mays
agggcattgctcggtcgctggtccgatgagtggcactgtcagggagcgtgacaggggcgacaaatctagacctccacttgtttgaagcccctcttgacgaaaaagaaatatcgctacgatatagctctgctcttggataaggtgctacaaatgtatagctctgctcttgttcaaggtgcaccaaatccacgtatgcatcaaaaaattgaaccaactcggatgaacttgatcccatcatctgcccgaatgtcggtcagtagtttgcttattgcactggatgaatggtgcctgactgaccgatttgatcccaacaacgctaagcatttgaccgccaaggctgagattgagcttggcgatggcctgcctgacatccgtaccactcgccagtgtgtccaagctatgaaagatgcgggattcgaggtcgtttttgcaaaggatcttgctcaagcgttttccttgcccatggatcctacacttgctgttgttgcttatagacgtgggcagtgtgacgatgaacttattaacgtcactaacaagaattcgttattcaagctgcaagctaggtatgtggttgagagaatggatggtgatctgtgggataaagttcttcagcccgagaatgaatatagaaggcaactcattgaccaagtggtttcgactgcattacctgagagcaagagccccgagcaagtgcaaaacctgctcatcttgactgccaaagcccagttacgtgaaggtctggtcagtgaagcaattgagtccttcattcgtgtagatgatgctgcacacttccttgatgttatccgtgcagccaaggaagctaatgtgtacaatgatttagtgaagtaccttctgatggtaaggcaaaaggcacgggaacccaaagtcgatggagaactcatttttgcatatgctaagattgacatgcttagtgatattgaggaattcattcttatgccaaatgttgccaaccttcaaaatgttggtgaccgtctgtatgatgaagaactatatgaagctgcaaaaatcatctatgctttcatctcaaactgggctaaactggctgttaccctggttaagctgaagctgtttcaaggtgctgtggaagctgctcgcaaggctaacagtgccaaaacatggaaggaggtctgctttgcttgtgttgacgccgaggagttccgtcttgcacaaatttgtggtctcaatattattattcaggttgatgacttggaagaagtcagtgagtactaccaaaatagaggatgcttcaatgaactcattgctctcatggagagtggtcttggactagaacgtgcacacatgggcatcttcacagaattgggagttctatatgctagataccgctctgagaagcttatggaacacatcaaacttttctccacacgtctcaatattcctaagcttattcgagcttgtgatgaacagcagcactggaaagaacttacctacctgtacatacagtatgatgaatttgacaatgctgccaccactattatgaaccactctccagatgcatgggatcatatgcagttcaaggatagatga

SEQ ID NO: 17901 - DNA, 1135 bp, Zea Mays
gagattggtcacttgtactgttacaagacagaaaacatgcacaaaaaaaggtatgttgaggccactcgtgaattcaacaagattcttctgtatatcctcaagtacaagcagtatcatcagaagtcccctcagtatgatcagatactgaagaaaaatgagcagatgtatgcactgttggtgatttgcctatctttgtgcccacagaacaagctcattgatgaaaatgttagcacccagctgaaagaaaagtataacgacaagatgacaaagatgcagaggtatgatgatgaagcatacgctgcttatgatgagctattttcgtatgcttgccccaagttcattacaccatcacctccagtgctggaccagccgctaacaaactataaccaggatgcataccgtctacagttgaagctgtttctttatgaagtaaagcagcagcagttgctttctgggatccggagttatctgaagctatattcaacaataaccattagcaaacttgcccaatatatggaagtggatgaagcaacgctaaggtcaatcttgatgacatacaagcacaaaatgcatgcggttgacagtgacggaaagatggtatcgagtgcagactttgacttttacattgttgaggatgttattcatgtcgtggagtccaaacctactaagcgtcatggcgattactttttgagacaaattttgaagttcgaggaaatgatcggtggactggataaagtacagcttgactgaacctggtagcaaatatggagagaaatgccactgctttctttttgctaatataggaatagatgtttatgatggatgtcattagcaagttatgtttgtgccttctgtagcccatgcaaaaacccgtcattttttctctcttttcactggattcgactttgaagcccgttgaggcaattagcagagtcgtgatgttaattttggtcgcccagttgcttgaatagtgatctcatatcctatctgggagtggcatgcaaattgagttgtgccagcaaccggcatgtcctagctaaagaggatcggtgctaaagggaacaaatttgtaccgatgagaatttagatgagtcgctcatcagcataacgctgactctggtcgactcaaaactca

SEQ ID NO: 17902 - DNA, 935 bp, Zea Mays
tgtattttcatgctgaagggaccgatgtggtattaaacttttttggtgttgattcgcaacaacaaccatagctgttgagatttttcaagagaatactaatcaagttcatgttgtaaattattgtttgtgttgcatattgtatgtgacataccgacaagtttctttattcaatgtttttgacaaagtcagtttttcgtgcaggaatgcttcaatgcttgtgtgtctggctgtggattcagatttgacatcccaacggagaaggtcgaagaaatcaagcccaataggccatccaaaccatcagctcctgaacctgaagtgaaacaaactaggaatgcagattgtaatgaagatgtgccgtgcacgtcagcctagtttgagtgttggcgtgcctcaaattttgtaaagccaatgtgtttctccgttgtatttctactcgtcctattttcccatggaaaactcacgggaaactttatctagcttagctctagtttggaaactcaaatcccttcgtggatgaaaggggtttgagggacaaattagtttatttttatcttaatcccttccaatccccgggtgatttgagtttacaaactagcctttagagtaaagatttaccacattggcaatgaaagatgatggcctgggaactaggtgaagatttactgcattggtggtgataagtgagcctgaccctgatgagtatagtaattcgacgatgtaatgtgcataagtaacggggtcttgagtttatattccatgcatcacatattgtttggatcaccaccgccgatcccacattgcgcagttgtggcggttgaatcggccgccgcagcttaggcagggtgctggaggtcaaggtccaaacatgtcatgtatctttcagttcaatcatccttgcgtgccagcacctagcaatggcattgacagaaatgttt

SEQ ID NO: 17903 - DNA, 951 bp, Zea Mays
gtggaaagcaacgttgaagccagggcgtgggatgatacaaagaacactggccattggattgagttgaagcctttgagggcggattatgagccattgatcttaatgatgttggaatacatggttgcaacagtacaaaatagtggagatgaagcttctagcacaacaacgagaccttcaggcaaagattcctgatatagagaagtgtttggatattgtttcaacattacaagctaaaaatgatttgggtgaggcacttatagctgattttgaattatccgaggggatatactcctgtgcgaaaatcgaggatactgactcagtgtgcctgtggttgggtgcaaatgtgatgctggagtactcttgcgatgaggccaatgccctcttgaagaaaaacttggaaaatgctaaggccagcttagaagtccttgttgctgatcttcagttcttgcgagaccagcaaaccatcactcaggttacaattgctcgggtattcaactgggatgtacaccaccggagaagcaaacaggctgtaaaggaaccttaatcagttagatcacgaggtcaaccaatgtgattgggacaaattttttcgtaccttttggtacctctggcagattagtccatcatagcgagctctttgtttgttgatggtttctttgctgtgtaacaatgtatcggtttattctctttaatggtgtgggaacattagtagaagatggaacattttactgcctttttccccactggatgtccactggatcacgtcgcaaaatattttttttttcatgattcatgcataattcctgctttccaaagggcttcctttatgtttactgcattacagtccaggagatagacggtccattgtcatgttgagcaaagatagaagaaaatcgacaacaggtgaggtgactcgtttttacatatgtagggctttactgcttgacactt

SEQ ID NO: 17904 - DNA, 1562 bp, Zea Mays
ctcagactaaacaagacctcggtcctcgttttcactcgcttgacctgttgctgttggccatacctcctgtctcgcctccggtcagatcagattagcctccatggccgccgatcgccgcttcaagatctttgcagccgccgatggcttcggccagccactcaaggacgccgtcgtcgcttatctccgcgcccaccccgccgtcgccgaggtcgttgacctcggcgtcgacaagtactacgccgccgccgcagccgtcgcccgacacgtctcctctcccgactcggagcctgacgcccccgaggtccgcggcgtcgtagtctgcggcaccggcgccggcgtctgcatcttcgccaacaagtacccgcgcgtctacgccacccactgtgcttcccccgccgacgccgtcaacacacgctccatcaacgcctgcaacgtcctcgctctctccggaatcgccacgcagcccgacgccgcggccgccatagccgattcctggctcgccacgcccttccgcgccccttgccccgcctccggcgacgcgccctggccggaggacatccaggggttcttcgacaccgcgccagacgagatggccgccatcccggaggcggaggatgccccggactcggtctgcgccatctgctgcctcaggaacgggatggagttcgagccggtggggattatgcccggcggcgagatgcggatcgtgcgggagagccccacctcggcgtacgtccgcttcaaggctggcagtgtggagccagcgcaccatcacacctttggccacgacctggtggtcatcaagggcaagaagaaggtttggaacctcaccaagaaggaaagctacgacctggtggacggagattttctcttcacacctgccggggatgtgcacagggtcaagtactttgaggacacagagttcttcatccgttgggatggccactgggacatctttctcgacgaggatctcgacactgcacgcagtgccattgacgcggagcttgcagctgccagcaagtgagatcatgccatctatgtgcagtgatggcaacgcttctgaagtggatcctggatccgagccatgactcctagggtctggaaacaaaccacggagctgtgaccgctccgtgtccgaggagagcggcggcggcgcaaggagtcttcctctccgacgccggcaacgtcgacaccgctggcaaacttctctccgattgtccctgctccagtaagagtaggcgaggacgagcctcccccatcttgggtgttggtgcctgacccattttctcaaggaaatattggtcatatggagacagttctgcacagcgttttgagtgccagtatgagctatatatatgttgcatttctccatgtttgggctcagcatgtaatagaaccgaaggaaggttgttgcgagacttgtatggcatgcttaaatttctggataaaatctagcatatactaagtctattacatgcttaaatttttgaaaaaatatgtatcgagaattggatggaatgcttaaatttctagataaatgacatgttctatgtttaaatttc

SEQ ID NO: 17905 - DNA, 2130 bp, Zea Mays
ctggacactgagtccttggagcttcgaagcccctgctgaacaccagaggttcagaccattcgccaaggctatctatctaagagatcttcaaacttgagaggtgattggaaaaggaggttctttgtcctcgacagtcgaggaatgttgtactattatcgcaagcagaacagtagaccatctagtggatattctaaccaaagaactagcattccctcagaacatggttctgggttgctcagcagatggttctcttctcattatcatggaggcgtgcatgatgagaaatcggttgcacgtcatactgtaaacttgctaacatcgaccattaaagttgatgcagaccaatcagatctgcggttctgcttcagaataatttctcccacaaagaactacacgttgcaggcagagagtgcaatggatcagatggattggattgaaaaaattaccggcgtcattgcttctttgctgagctcccagtctcctgaacgacatcttatatcaagtcctaagggcagcagtcatcatcgaactgccagctcaagcagttcattcagtagctcaacagaacttgaacattcaataagtgaagattgtatgctggaaaaaaactcaggaagtggttatttcgagcattctgcaagagttgcacagcatcaccgaacaagcatgatgaaacctgacaagccaattgacttgcttaggaaggtggctggcaataattgctgtgctgattgtggtgcttcggagcctgattgggcatccctgaaccttggaattcttttatgcatagagtgttcgggggtacacagaaatatgggtgtgcatatatctaaggtaagatccctgacgcttgatgtcagggtttgggagcaatctgtaatcaatctctttcagtcaataggcaacacttttgccaattctgtctgggaagaaatgttaccttcatcaagctgtgttgaccatggtgatatttcaagggctgatggattagaaaacatgtcgcatggctttgcacccaagaagcctaaacaatctgattctattgcagtgaaggagaaatttattcatgccaagtatgctgagaaggatttcgtgcggaaacataacatggatgggattcaacttgcagaacagatgtgggacaatgtaagttcgaacaacaagaagggggtgtacagcttgatcgtggggtcaaatgccgacgtaaatttttcctatggtcatacatcattcaattcggctttgactctgggaaaagctctcctcctacaagagcaatcagcctctccatctaacggaagctctagatgttttgaccgcaatccactcgagaagggttgtaccggggattctgtttctcctgccagcacaagcgcccgtatagacgggccggacgattatgttgaaggattatctttgctccatctagcatgccgcgccgcggacctgggcatggttgagctgctcttgcagtacggcgccaatgtaaactccacagattcaagagggcggacgccgcttcatcacagcatcatgaaagggcgacatgtgtacgccaagctactgctttccaggggcgccgattctcaagccgcggatcgagatggtaggacagcgttacagtatgcaatcgacagcggaaccatagaggacgaagagatccttgttttgctagaggacccaagtagataaatcacgtaggtgtagtagtccaagtctcgagttcctgccgtcctgcggtggtgcattgtggctgccttttgcagtcacctggcacacacagggtccgaggatgccttgctagtattcagtctctgcctttgtggcaagaggaagttatagtttttctaggtctgtctgcggttttggtcgcgcttagggtaaaagtggcctgtttgtcgtggatgcagtttgcaagttgttggtttgcctttgtttgcagatgtcgcagtgtacacttgggaagtggctgccattgttgcgactgatgtacatatagcgatgtctgatacaggttatttatgcaagaatttagatcggtgaaaaaaatgtggctggctgtctgcctgtctcgagtcttgatcgatcaggtacaaagagtatgcatgcctaatacagcgcgaaccacca

SEQ ID NO: 17906 - DNA, 105 bp, Zea Mays
cttacccgttgccctatcatttttgactattattttgaatcaaacttgtatgttttgtaaatggtgagattcgaactcacaacctctctctcgcgcataccatcc

SEQ ID NO: 17907 - DNA, 1368 bp, Zea Mays
caacgcaggagcaacacagcgtcgccggcggcgatggatcccctctccgtgctccgcgactacgctggccgcaacgagctggacaagatcatcttctccggcgacgagatccacttcggctctgactacaccttcccggcttccacccccaccgccttcgcctccaagcagtcaggtcgcccctacccgctctccgctgccgtcttcctcgcgcagcaccacgacctcaagcacaccgacttcatccaggccgcgcgcctccgccgcatcccgcccgtatcgctccccgaccgcaagaccttcctcgacttcctccgcttcggccacaactccctcccctccgccgacccgctcctcccctccgccttccagccgcaggagccccacctccatccgccctcgcctccgccggaggaccccgcagctaccgaagaggccaccacgggaaagcaaatccgcgcgctcgagcggcccttcaaggaccgcaactcaatcctcgacgcccgcggccgcgactttctcgccgtcttccatgccgccgtgcgccgccaggacgagcagctcaagggcggcggcaaggatgcggcgccctcttcccgccccaactctggctccgtcgctgcagccctggccaagcccaaggtgctggacaggtccctgggcgacggcgtcgtgcccatcatccttgtgcccagcgcctcgcagacgctgattacgatctataacgtcaaggagttcctcgaggacggggtgttcgtgcccagcgaggagaggatgcgggcgaccaagggagggaagccggagagcgtcacggtgcagaagaagctgattcgtacggagagagctggcggcgctgggggtgccgtctccttcgaggttagggacaagccggcttcgctcaagtcagacgattgggggcgggtggtggccgtgtttgtgctcggcaaggagtggcagttcaaagactggcccttcaaggaccatgtagagatcttcaacagagttattggtttctatgtgcgctttgaagatgatagtgtggaagcagccaaggtggtgaaacagtggaatgtgaaaatcatatctataagcaaaaataaaaggcatcaagacagaacagctgctcttgaagtatgggagcgcttggaggaatttatgcgggcacggacataattgatgtgcagtcatggaaaggataaaagacaaccattttactagattcattcgcaatattggtcggtgactgtagatggcagaatggaatggccgggagcctatgaagactgcaatctttattctgtacaatggaaacgtttttattgtagctgctcaacagtagggtgcagtttgaactcataaataacgtta

SEQ ID NO: 17908 - DNA, 1111 bp, Zea Mays
atttgatttggcagccactgagcagtgaccaccagcagctgacacgaggacacaacagagataaggcccgctccgcccgcagtcgtccccagctcgcgcgacatggcgcccgccgcccggtggtccacgtcccctgtgctcttcctcctcctgctgctcgcggcggccacggcgacgacgaccactacggcaaaggatgggcatccgtcgccgacgccgtggccggagcgtttccacgcggtgctgttcacgaacctgaccaactacacggaagcctccacgggcccgccgctgcgcgtgacggacctctactacgactggccgcggcggcggaacctgaacctggtgcggcaccagctgtcggccgacccgctgtacgacgtggagtggaacaacggcaccggcttctacttcgactccaaggcgtgccgcgtggagcagttccccgtgggcgtgctgccgccgtggtggctctccggcggcggcgccgagtacgtgggccgccgcgtcgcgggcgggatcgactgccacgtgtggggcaaggccggcttcatcttctactacgaggaggcgcgcacggggcggcccgtgcgctgggacttcgtcgacgttcgtgatgagcttcgaacccggagctgcgctggaggacgacgcgcagtggcaggctcctgcatactgcttcccggacgacgacgatgccgcaaggagcagtggtgaggaggaagctggggttgggcttgaggcggcgagcagattactcaggaagctagcaggagctgcagcaacctattgactgtgttgtgttgtactgtaggatttatgtaccgtattaatttcgagcacaacagatatacttatgttcttgtagtactacctaattgcctagtttcctattgctggcttgctgctcctgttgtaaacaaacagatatacttagtaaattatgaaatcgtgctgtcggcttccggatctccacacacactactttagtttcagaatatatgggcacagctcatacaaaaagaatctctatatcatcccacctattcagcatagcatagattattgcaggggtatgacaattgtgccactgttatcaacctaataatac

SEQ ID NO: 17909 - DNA, 112 bp, Zea Mays
agcaaccaccgctacattcacttgccttcatcgaagaagaaaaatgtactgggcatgatctggagtgtagccacctagggtttccccaagaaaatctgcaagaagaaatggg

SEQ ID NO: 17910 - DNA, 1699 bp, Zea Mays
acccgcgcgacagcgggcgcgcgcggctgcgactgctgctgctgcttcttctccacttctccttccttcccctataaagcaaggaatagtcgcagcttgccccagcttcgcaagctttcctgctaatccctgccattagtagcaagcaagcaagaaagcagtggtagtaggtgccacccacacggttttcacggctgccggctgggagcgaccgaggagatcgtcgtcacgctcgatggaggccctggtggggaggtactggggtctggggggacggcggtgcggggcgtgcggcggatcgccggcggcggcgcactgccggacgtgcccgggcggcgcgtacctgtgcggggggtgcgacgcggggcacgcgcgggcggggcacgagcgggtgtgggtctgcgaggtgtgcgagtgcgcgccggccgccgtgacgtgccgcgccgacgccgccgcgctctgcgccgcgtgcgacgccgacatccacgacgccaacccgctggcgcgccgccacgagcgcgtccccgtgcagcccatcggcgccgccgctgatcccgccgcggagaaggcggcgctgctgttcggccttgccgcggaagggaaggacggcggcgacgcggccaaggtcgtcgtcgacgccagtaagctggacctcctgttcgcggacgacgtggtcgacccgttcctcgcccaagacttcgccaggttcccgcacgccgacagcgtcgtgccgaacgatggatccaactgcggcgccgctgtggacttcgactttggtggcggcgtcgccgtcgccgccaagcagccgtcctacagctcctacacggcggcgtcgctgggccacagcggctcgtcgtcggaggtcggcctggtcccagacgtgatgtgcggccgcggtgggagcgtgaccggcggcgtcatcgagctcgacttcgcgcagtccaaggcggcgtacctgccttacgctgcaactcctacccacagcctgtcgtctttggacgtgggcgccgtgccggagcgcagtgacggggtcatggcgggcaggctcgcgacgccgacgccggcgacggccacggagagcagggaggcgcggctgatgcgttaccgcgagaaacggaaaaaccggcggttcgagaagacgatccgctatgcgtcccggaaggcctacgcggagtcgcggccgcgcatcaagggccgcttcgccaagcgcgcggatgacaacgacgccgacgccgacctcgacgaggctgccgcgccggctccgccggcgcggtcgcagccgcagccgcagccgcagccatcgtaccgctacgtgctcgacttcgccgccggctacggcgtcgtgcccacattctgatgacgcgtgccgtgtgagtgttgccgcgcgcgtcgcgtgccccatgttttcacggattgggccggcgcgcgtgcgagccatgctgcatgcgcgcctacgtgtttgctggagcggcgagctcctagttggcgatcacatgccgttttgggctagccatggttaaattagcaggctagcgtgtactgctgctgcgtttgtttgctggggcgaccagttctactaatagtacgtagtaccgtgtaattttgggtcaggaagagatgcttagcatctgtttcgattgatcgatgtagtattatgctataattggaaaggcctctcgatctatttgcaaaaaaataa

SEQ ID NO: 17911 - DNA, 3636 bp, Zea Mays
cgatcactcaccaccccactactccactaccaccacctacctaaccaaaagctacaagccttgagagaatccaaacgcaaatgccatgtctgcgttcccggctttgcttgcgaatggggcgaaatgagctggggggcgcagcgcagccgcaacgcggtgcaagtgcaaccagaggcaggcggccatgtcatgtcaccatggacgtgtgacttccaaggcaatcctcctcccactcctcatcagtcctcccccgccaacaacaacatctgaaagcgtctactactagcgcaagcgaggttgacatgtcttctcgccctctgtccctgccccgccgcacggctcggtgacggtgaggcacacagcacagcaagcgaggaggttgacgacaacgagagccccggaacgctgacgcgcaccaacccgggggaggagacgccgcgctctttcaccctcgcgcacctaactgacaagccgacgcctggcctgaccgcgaggagagaggttcatggtgcagtggagcagcgggcggcagcggagcctcgacccctcctcctcctcctcccccgcgagacgggcgccgagagatggccaaggtgcccgatctcggctccgacttcgcccagaagctgctcagggacctccgccgccgccgggagcggctcggcttcgactccaccgccgccgcgcctcgggctcgggatgcttattcgaatgctcagaaaccacctcaagttcagaagccacaacaacaagcagctcctcggcctcgggtggcgacaagatcagaagcacaaacgagcgtaatacaccgacaaggcagcagcagcagctccattgccagaccagggacgccgcgccgccatgacgcgccggccatcgccgattcgcacgccaccgtgccgttacaaggaggacgaggaggcaagcagacggcgcccgcggcgaacgccggcggcgtggacgtgcagatggcgctggccctcgcgctcagcaacagcggcaagctccagaacgtgcatctcgtggcgcgccagggcggcagcggcggctccgcgttcttcggcgagccgtgcaggatggcgtcgcaggcgcggcgcctcctggctcctggcgcgcacgtcggcaaggtggcgatcggcgtccagaatctcaacgacattctcgtggcgtactcctccggcggtgctgccggcgcgaggaggggctcggttgagatcgggaagcagctgctcagaggtgccatggacctcgaggagtcgctcaacatgctcatgatgctccaggacgctacagactacatggaaatggggagctcagggaacgacggcaaggtgctgctgctggagggcactgagagctggaagaggtccgcgccgcgttcgacgagctctgcctctgcaaggctggtagagatcgtcgacgatgattcagggaccgagcaggccgacgatgcgaagagctcgtcagatacgttcatgcagatcgttcctcacggcatgtctcagagttacagacggaaccacatctcgccctcgcagctcgccggtgctgcaaccaattgcaagagcaatgcttcgagtggcgagaaggatggttcaaaggtgaggatgcccggtctgattgccaagttgatggggctggaaaaccttccgtcagcgaagacggctgcagagcgcaaggagacagagaggtttgtgaaacctgaggcggtgccaagaaaatcaacggcggcaactgtgatggctggcacattaccgatacgaattatagcttcggaacggatgccatccagagggcagctcaagaattttcagacaagagagtggaatattagcctgacaaagtctgaagaacctgtactgtcaagtagattttcacatctcaaagttgacaagcaaacaaggcagaccatgaggcagatgttaagcaaacaggaaggtacggagagaagagctagtgtaaaccaagtagctgatgagaaaatcgttcatcaggatacgaagctggctgaagacagcaaccagcaaaagacaacagtcagtgcaggaagaaagatgagtttccttcagaggtttaggaagactggaaagaacaaaccagccacagaagagaaagtcactgttgaagaaaataaacagaagctcgggaagaagcaaaccacaagcacaaaacagagagacagtgaggtgaagccgaggaagacgagagagaagtttaacaaggagaaccttgccaatcctggaaacaagactctaggaaataatggcaaaactgccaagactgatcaaacgagaaggcaagcacaaagtaaaccttcagataagcaagtcatggaaaagaaggtgcagagttaccgtcgaatgcagagtgaaacagccattcagaacctagaacagaagaggccactgaaaccagaaccagcgcattcgaacacgaaggagaagcttcagtctgttacaccgacagaaccacagaatggagaaggcacaaaagtagatgataccagaagccagaaaccatcagacaacacgcccggtgatgatggtgtatgcgaacaatctgcagcggagatggaagatagcggcacaaaagctttgccgtaccaatcggaaaaggaattgactgaagaaaccattgatccgatcaccgcagcacaggctacacctgaatcaattgctgagacaaatgatgacagcacagtcagtgaggctatacagacaccggaaacatttcctgaggaagaacagcagcaacaaatgaaagaagtgaacgatgaatcaacgaatggactggatcatctcatgaaccccagtaacccgaatgatttgagaaaccacaatatggatgttgtctcatgcgattccttcacagagaaccagctcctgcttgcagagatgttgctgaaggatccctacctactcgaaaccacgaaggcgatcaccgggttccacgtcccagccagcgcagctcaggttaacacggggaaatggctagacgaaggcaacagggttctttcagacatcgggcgcgaagtgatcagaaggaaaggcaagcgaatggaggcgatggtggatgtcagcgcgacacgtgccgctaacctgaagctgcggactctggacgatctggtcagggaactggacagcgacatccagtctctccacgtcccgaggaaaattcagcaacggggggatgaccacagcacagctgagaacctgaggatggtcctccgctacgacatggagagcacgcactcggacgctaactcggtgtgggactttggttggaaccgcgcgtgggacctgccggtcgagaagaacgaagtcgtcagggatttggagaagaacatattgggtggtatcatcactgatgtagcaagggagcttatcgatgtatccatgcgccagcgccatggcccatgggtgctgtgcctgtgagtcttgatcttgactgacttggatatatatatgtgggtattttcaatctgggtatgtacgaaggttttccagtagaaacattcatatgatttttgtgtgtatatataaaaggaggaacgtgtgcataaaagaaagggcaaatcttctgagtttatgtgttctttggtgatacagtttttttttaagaaaaaaagaaagggca

SEQ ID NO: 17912 - DNA, 1553 bp, Zea Mays
tggatgcaagctgaaatccaccctgtgtttggtttctgctacttgtgtcggtggatcaggtggttgacacctgacatggccaagacgagaggctttgacccgcagtggctgtccataacattctctaaagccatcttccttgggaacggcttaattgccattgtatctgggctatttgcgaaccttcttgctgagaacttgggctttggtcctgtggctccattcgatgcggctgcgtgctttctggcgattggcatggctatcataatgtcctcatggagtgaaaactacggagatccatctgaaagcaaggacctgatggcccagttcaaggttgcggctaaggcaattgcgtcagatgaaaagattgcattactgggagccatacagtcattgtttgagggctccatgtacacatttgtcttcctatggactccagcattgagtccaaatgaagaagacattcctcatggttttatttttgctacattcatgctgtcatccatgctgggtagctccatcgcgtcacgtctattagcccgaaagctcaaggttgaaggctatatgcagatcgtgttctcgatatcggctgtcacccttgtcctccctgtcgccaccaacatcttagtgccaacgtcttctgtgaaaggaggcagcgtatcaattggaggttctcttcagcttcttggtttctgcacctttgaggcatgtgttggtatattctggccgtcaatcatgaagatgagatctcagtacattcctgaggaagcgagaagcacaatcatgaacttcttccgcataccactcaacttatttgtttgtgtggtgctttacaacgcaaggagccattccctctcccaactactatgttctctttagttgtgctggcaagaattatacagaaatatcagcacacaagtaacgctttgcctgtggacatggtctttgcaggtgaatgcattccctatcactgtcatgtttgggatgtgttctatcttcctcttcatggcagcaatcttgcagagacggctgatggttgtctctgatcaagtacacaaatcatcaactacacaagaaatgatcggggaagatgagccactaaatccttagatgtcgacagaaccatacatgcgaaatcagatattgacgacgacgtccatactccatactgcatttcgtttcgtcacctgtgcaataagatggacgtcaaaaccatgtagtctagtggttttcgtttctgtagtgtagatttgaccaggctgctaagtttgcacctgtcccgagaagattagatgagcaagtcaatcgatattggctattcgcattgttgtttcttttttttaaaaaaagatgttcgctttaaagtttaaacgatacggtatatatccttgtaagtgttgcattgctgcatctgatgacaattctagtggtgctgttactgactgttgagggctctctctacttggtcgttgtaagaactgttgcttcttaatgaaaaacgggctcaataaattcagtagaagcctgcagttgcagtaatcatacaacacgat

SEQ ID NO: 17913 - DNA, 1834 bp, Zea Mays
cgcgattccccaccccgcgcccgcagcccccccccccgtcctcccggccgcagccgagcacagccgccgcgcccacaaatcacgcgactcccgcttccatgtcctcgcgtcctccattgcagccgcatacatagcgtcgccccttccatcgatggcagccagccgcgcccgcaaatcacgcgactcccccttccatggcgtcgcccccttccatccatggcaggtccgcgcccctacgccccaaatcacgcggatggaaggggtcgcgagggagtctctctctggacgcgcccgtcgccgcctccaagctcaggagggagcggcgcccggcccccgcgagcgtgaacccggggccacaatgcttgaggcggaggaggggcctggcggttcgctgccagacggggtccaccgcagcgcccttcctcaggacggaggagccccccgcggctgcggcgggggcaaggaatgcccaggcggggttcaccttcgtcatgaagttcggcggctcgtcgctcgcgtcagccgagcggatgcgggaggtggccggcctcatccttagcttcctcgacgagatgcctgtcgccgtcctctccgccatggggaagaccaccaataacctcctcctaggaccttccatttctagctctcagcgcctgagtcagggtgctcgattctttcgcttactagctaacaaggctagatgcgcgtgtgcctgattcgttgtctgtgtaggccgaagagaaggcggtgagctgcggcggaggaggggcatctgaaatccctgagctcgctgtcatcagggagctacatcttaggacaattgatgagctcggtttagataagtcgattgtttcagggacccttctccccaacacgcaggggtagcgtaggaggtgttgtggcggcattatctaggaagcggtctgtggacatgaggcagatcaacccgaaggtgcctaaggaggaggctgtcaccatctccggtcgactcgtccagatcctctccgaccatgggcccctcaccatcggcaacacctagaacaacacgaaggtacccaatcaaccagtcagtcaggcagagtggcaaaagctggggagcgatgcaggcgtcagagcagcaacaacggaggactctgccagtgtagatgagaaggaaacacgcaaagagcatcaaaagcaagttcaacgatcttatgtcaacccatccacctctgaatgaggcatattcagatgtgtgtgtattcagtttacagagctcaatatgttacatcgaccttcccaacccgccggcagagcttaagaagctcaagcacaagaagtgcctcgtccagtccccccaactccttcatggatgtcaagtgccaacgatgcttcagcatgtccaattcgcttgtggcataggaatctcatcctagattcaatagaggggctgcaatgccggcatcgccatagctggaaatcgagcactgacggacaccgggcgccgagatgggccgtcttgtccaccgccgcaagaaccgcatgcgttggagccatccttacacctgctcctacttccgcgccagcaacccaacacgccgacgacacgagctcctccttataaaagtgacatctttattgtatagataacgaatggttatagttatttattcttgtgtccaagtggtattggatttttttagcttggggttaaagaaaagacagtcatgtactttgcatcttttttgtatttatgttttatgctaaattgtggaataacactatattagttgttagcaaagaatttctgagatattaaggttgatgataatatatgttgttatttcatttaatc

SEQ ID NO: 17914 - DNA, 433 bp, Zea Mays
atttgccgttccaactttgtcgcggttctctctcactggcggcggcggcgaggcctctgcgtcttccagatccctcgtacgggagggaatctccgcagccgagcggagcggcggaggggagggaggtgtgccctatatccgtacggtgtacgtgcatgtgctggcgcagcaaagcgacagctctctcgaagatgacgatgtttatgctcccttttggacgttgatattggagggcaagaaatacaattgagttgtataccaaatcagtcatgtattaaaatgagatgtagttttaattctattgtttgtatattgttgggttgtactttagaatcgtgcgttctaattccacgcaatataagagagctttgtatgtattagatgtaatactcaaaagtgtaataaaagaggatagagataatctcaaaagttt

SEQ ID NO: 17915 - DNA, 562 bp, Zea Mays
caaagatgaatttcaaactgaattgtttcagctacacttaactttaggttgaagaggatggttcgattgttaagatcaggcatgaagagaagctcgatgactacatgaagttctttgatggtcttcctgcttagatgtttatttgtgactgctaggggcgatgttttcttggagataattgaatttttctttgtcaagctcattttgctttcttgtggttgttatggaatgttactggatactggatagttagttcggcctgtaggcgtatcctcctgaacttacctctcattgctgttagttttggcaccaagtttgttcccaattgctatttacggaagttattgcataaagggctgtttggttgtaatcttcccgtaagaataagatgcatgtttttgagttagaggaccatgcctgagcgtgatttgtttgggactgaatgttttacctggtgacttgcctgcttgtgatccaaatctgtcacctgggctccggttattcccatcatccatggattagagtccatggattagagaggattggaaaaaaataagaaaga

SEQ ID NO: 17916 - DNA, 1616 bp, Zea Mays
ttgcttaccttggactgtactggtaaggttttttatttcggaggattccccttctcaagctggattgagaccgcaggacaatctccaagcaaaaggctcatggttaatgcatgcagctggcccaagctcagatgattcgctgccacctggcttcgaatcattgcagccaacaagctgtctcaaaattgacatatcccaaatccatgttattaggtggagatgcccaccaaaggtattgcataatcctgtttggcttgtagctgctggagaagaaagtgaggaggttgccttgcagaatgatagaatatttggagcacttgaggctatatatccacggccgtcgaatatacccccaaacccatttgttactcctgatgtgaaagactcccaatatgatgattcccgaacccagttggttccgttgctcccagttgaagaggatgatgcctctgaccagttggaagaaccacctgttggtctatcaagtagttaccagcagtcagataagtacgactcagcaacattcagggtcccacaagcctcagacgctccctttaccactgcgcagcagcagcagccgaatggttccatcaacaccacaaggtctggtgcccccgttgagcctgacacagtggctgctgcatctgctgcttacactgcaataattcagagcaaccgaatgggaaatatgattgacaaagatctgctcgtcgaaatgctaagtgaccctgcccaacttgagaggttaatgaaagaatatggcgcgcttaagcacgaacagtcaactaacagttctgttgccccaatggtgcaaggtccaccaccccagatgacagctagtgttccggtctccttcccagatcacaccactacttttcacaacataaactctacactgccgcctccacctgttctgaatcgtctgcctcctccagctattccttcagcagttaccatcaatccaccagcaagttcaagtcaagcaattagctttccaactggccgaaccagcggcttgaactattaccagaccctgatccatcagcatggaggggagaggcaggagccacagccacttcaacagcatggaatgcactttccaatgcatcatcgcactgtcgcttcccagtctagcgccactgatattgtcagcagtggtactatgccagctagggatactaagcaaaggcctacgaggccttgtgcttacttcaacagcgccagaggatgccgcaatggtgcgaactgcacctttctgcacgatgtgtctgccgcgaggaaagaacagccaaagggatccaaaagaattaagctagacagtagaatagctggtcggtattgaggaggctgctgccggttgattttttactgttctttggttcaaaatccttttcctcctttttcccttcaaaaaattattcagtaaatattgcgccccagctcctttgctttctcttagccaatttctatttgtttactagaagaacatgctcttagcccatttctctttgttgactaaaagaaaatgttttagaagaaagaaaaaaaatcccatgattaaatggagctctgtcgttattgaaccagttgaacacatgttaattggtggcagttat

SEQ ID NO: 17917 - DNA, 2116 bp, Zea Mays
ggatggttggtttacgtgcgtgtcgtgcaattagcctacttcaatgataggatcttctttgagacgatctcacaatccgcaaacttggaggccatcaagatgaagctgtgggagcagatcagcggcaacatggtgctcggtgcatacaaccagatcccagaatggcagctcaagttaggaccaagagaccgagggcctgtccttgtgatccttgacgacgtttggtctctcccacagctcgaggagctcaccttcaggttccctgggtgcaagactctagttgtatcgaggttcaagttccccacactggtaaaacagacatacgaaatgcagttgctagacgaggcggcggccttgtccgtcttctgccgtgccgctttcgatcaggagtgtgttccgcggactgctgacaagagattggtcaggcaggtctctgcagagtgcaggggccttccactggctctgaaggttattggtgcgtcattgcgcgaccagcctcctaagatctggctcagcgccaagaaccggctgtctcgaggagaggctatttccgactcccatgagaccaagcttctagagaggatggcggcaagtgtcgagtgcttgtcggagaaggtcagagactgcttccttgatctgggatgcttcccggaggacaagaagatcccccttgatgtcttgatcaacatctggatggaggttcatgatcttgatgaaccagatgctttcgccatcttggttgagctttcgaacaagaaccttcttaccctcgttaacgatgcacagtatgtatcatcgatcatttgtgtgcttcaaaatgttctatgtcccaaataacatggtttctaaactccttttttgctgctctgccttcaggaacaaggctggagatttgtacagcagctaccatgactactcggtgacacagcatgatgtgctgagagatcttgctcttcacatgagtgggcgtgaccctctgaacaagcgtaggcggttggtgatgccgagaagagaagagacacttccaaaggactggcagaggaataaggataccccgtttgaagctcagatagtttccattcatacaggtgaaatgaagggatctgactggttccagatgaacttccccaaggcagaagtgctcatcctcaacttcgcctcaagcctgtactacctcccgccgttcatcgcgtcgatgcagaacctgaaagccctggtgctgatcaactacggcaccagcagcgcggcccttgacaacctatccgccttcaccacgctgaacggcctgaggagtctctggctggagaagatcaggctcccgccgctgccgaagaccaccatcccgctgaagaacctgcacaagatctcgctcgtcctctgcgagctgaacagcagcctgagagggtcgacgatggacctgtccatgacattcccgcgcctctccaacctcacgatcgaccactgcatagacctaaaggagctgccagcaagcatctgcgagatcggctccctggagaccgtctccatctccaactgccacgacctcaccgagctgccatacgagctgggcaagctgcactgcctcagcatcctccgggtgtacgcctgcccggcgctgtggcggctcccggcgtcggtgtgcagcctgaagaggctcaagtacctcgacatatcccagtgcatcaacctgacggacctcccggaggagctcggacacctgacgagcctcgagaagatcgacatgcgggagtgctcgcgcctgaggagcctcccgaggtcgtcgtcctccctcaagtccctcggccacgtcgtgtgcgacgaggagacggcgctgctgtggcgggaggccgagcaggtcatccctgacctccgggtgcaggtggccgaagagtgctacaacctggactggctagcggactgatgtcagattctggatgctaccgcttccaaactgaccatgtacatatatgatgataacgatgatgtttagatgttgcttcccctgtgtagtgcagggaagagaatcatcaatccactggccgattttgacatgttcagtcagtgttcatcacgcatccactccaaggttattaaaacggtaaaacgttgaaacgct

SEQ ID NO: 17918 - DNA, 2042 bp, Zea Mays
cactctcactcacactctgtttctctctctctcgtggagacgactgggcgaccgccggcgccgacctacgccaggtgcccaagccttcgacgggaccatcgccgacgacgagcactcacgagtcagaaatgtcttcagtcgggagcggcagtggcaccagggctgcgaatggtgcagctgccatcagtgctgccgcgacggcagcaggctcggccgacgccagattccacccccaactactacagcagcaggacaggcaaagtagatgggctggctgcttttcaggcttatcatgtttcggatcgcagaagggcgggaaaagaattgttcctgcagcacgtacttctgatgggaatggatcaaatgctcgcggaaatggtctccagtctggtgccaattcaaaccaaaatatgcctatgaatttatctcttctggctccaccatcatcaccggcatccttctcaaactctgcacttccttcgactgctcaatcgccaaattgctttctgtctgtatccgcaaactctcctggtggcccaacgtctaatatgttcgccgttgggccatatgctaatgaacctcaacttgtctcaccacctgtcttctcaacttacacaactgagccatccacagcaccgttgaccccaccacctgaactagcccatgcaactacaccttcttctccagatgttccatatgctagatttctttcttcttctatggatatcaaaactgctagcaaggagcataacatgcctttcttatcaacaacctattctggtggttcaggactccaagcatcctacccactttaccctgaaagcccttgtagcagcctcatctcaccggcttcagtaactccgaggactggtctatcctcacctatacctgagcaagaggttcctcctgcccattggaagacctctaggtccgcgtgcgacacaccatatttcagggcttcgcccattcctgagcaagaaaccactgcacaatggaagacctctagatctgcttgtgacacaccgtatgccaggacctcaccaaccaatatttttggtctggattcaaataccccgagaaactatatgctagatagcaatttctttcggccagcggcatctgctcagttctacctggaccaggctcagcaggcatttccacataatggcgggagggttagcgtatccagggagaagcaagatgccgatgaaatcgaagcttaccgagcttcatttgggtttagtgccgatgaaattgtccaatctcaatcttatgttgggataccagatgcggttgacgagtcattcagtatatcaccatttggaaacaatgctcctgctactgagatctgcccattcagtgatctgcctagtgaggttcagaaggcggataaatcatgcacctacgttaaagatggcacgagcccaaagaaatcagcaaaccaactctcgattgattctccaaataaagttctgcgcttggacgtgttcaaagtaacaaaagggggtcatctgtctgaggacgagggtattgcgagagatggtcatcctttcagaaggacaacggatgaaatatctctaaaaccgatagaggtaaggaagaaatctcctcctggccattcttgctcagacgcagagattgagtacagaaggacaaggagtctgagggatgccaacggtgttttatcgcggcgtagcgcattggcaagacaactgcactaataagtcactagtatgcatggcaatttcatagttcatgtagagcagtgtgtgcattgaatttgagctgtcattagagtgatctgtaggcgaagagtagcctttatcgtatatgaggattatattatcagattgtgtgttctgggtatgtgatgatgagctttgtactctgtttgaactccaagatcctctttgtagacacctgcagtctttcccaggagcagtgaaatgaaatatcgttggcaaattacaggaactgtgttctggtcttcctgaatcctgatgatgtaggctgcgtttgaattctgcagcatgttgattggg

SEQ ID NO: 17919 - DNA, 4954 bp, Zea Mays
tcctcactctcctcgccagttagttggctgtaccccaccattccccgctcttaaccggcaaacaaacaaaacggaaaacaagccacggaaaaaagaggaaaaaaagctcgagaagagcaaaccctaggttcccgtggcaccgacgaaatcctaattcgcccgcattggatcgcccaggcaaggggcttttggcacagatcggcgctcccccgtcctcggattcgattcctctgctcaatttggggccgatccgtggctcggaccttctcgccgctcggcgactctctcatcttttttccccgatccgtctgtgagacactaagcgctttgccgcggtcgcccctgctgacgccaccggcacaaggaggcttgtcgcccactctggtccgccaccgacgcttgacgcctccagggcttcaaggattgctgatgagaggatgattgaaattgtttctgttaacttgattcaactgaatccgtatgctccacgcttccgctcctgatctggggtcgggactctatgtatgatgggaggtgaaattctgcagaaatctgttctcttgacctgtgggctcgtgaatggaatccagtggcggtgataaacccactgcaacagatgctaccgaatcagtggtgggtttagatggcgaggagactttgtctgagagggaatctgttggagcaagacatggccctgccttgtctaatgggggtggaaaggaggctccttcgagcagttcatctgcagggaataagaggaagcacggcatcttgggttctaatcaaatggaactcaatgaaccagggatgccaagttccagctcaggtgattccacatggagtttagatagtctggatgaccgtcaccagatctcattgttgagaagtaagaatgaacactctgaacattcagttacttcagctggagttacagtgatcaggcagcctcgtggcgtcttgaggttaaggaagcgggatcagaatgtcagtactgagagttggactggtggtcataatattccacaagctaatggagttcctaggtcttcccaactcctgaggcggaacaagaaggggaaatcaactgtgttcgagcagaatagaattggtggtgatgaacctgtcagttgcttgagaactgagaatggtacttgtgatcaggataccggctccaagttctgttctgaaactgagttctcagctgaaaagctgtcacatctttcaggtgaagccccaaaagctgttcatgttgacaagggtgggtgtgaccatgtcaaagatgatgatggtgttagtctggaagaaaatgctgctatgatgctttgttctttatcagataacatatgtgctggatcaccaaggaagggaatgaaatcatctgatacgtcatcaaagagatgtattcctcagcattcaaatcattttaagagttcaaacaaaaaaatcaaggatgtacctagtcctgctagattgctgcggaagcgtgatggtaaagttccattcaggaagcgtcgtccgcgtcggcatttttatgaagttagccctagcgacgtggatccattttgcattgtaaaagagaggatcagagttttttggcctcttgatgagacttggtactttggcttggtcaaggaatataatccggacacaaggttacatcatgtcaggtatgatgataaagatgaagaatggatcaatcttcaaaatgagaggattaaactcctgttcttaccagcggaagctcgcaatagatctaaatgcaccaactcaaggtcagtgtttgacctgaagcatgaacagggtgacagagaagacatggatggaagcgaaggcaatacagaaagttctgagtcaggtcccattggctcatggttagctcgatcaaaccaagcaaaatctgctgcactttgtaacatcagcaagcaagatcacagtcattccaatattgttccaatttcatttgaccaaaagcagtgccgtggttctgatgctaaggagtctaatgattatataccatgtgattcatttggaaatgggagtgcaaaagttctcaaggatagaaccacacctgaggacaggaggtttcgctttgtttattctaggaaacggttttgcagaaaaacgaatggttttcttagcatttccgaacagcattctaattgtcagataagagcaagatttgctatggttcttgctgcatgtcctggtatggaatctagttctgcaactggtgcttcagtcacatatgtcatacctgcattgagcctcccactgaaacctgtttacaagttgctttgtgaagcctgttgtgtttcgttttccaataccttctttctccattgtggtacaatggttgctttatggcctgttgtacatctggacatactttttgataatgctttaggcttgaaacattttcttctcgacacatgcttgatatcggcagtatcacttctctgtttacttgctggaagcttcaagcagtgttctaggcagagaactaccaaggaagctagaataccttgtacttcgatcagatttcagatatctggtgggcatggtagaagcgaagtagtatttatgttattcaactttgttggtgtagagaaatcgaaatgggaacaccttcaaggaaagcttcaatatcactgttctaaatcggagttgtctaaagattccacaaaatgtactggtcgaagagccctttcttcaatggatctcttctccaagggttttgatgttcaggactttcttccagagtctaattattcagatcgcgaacctatcatttgttgtttggatgaacattgtagatttactcaaagtgttctggacatgacaactgcaccttcactactgccttggcaccataaaaaaatgttaacagaaagcaatttgactaatggttctcagcaatccatgtcatgtactttggatgaggatcagcagcagttggtaacagaacatgcatctgacacagtttttcatgctccacctcaagtttgttcacttaatctcggttcatcacctgatagtccattggatatggcttctgctagttgtgcaaatccatctagctctgctagtagggaatccaatattgctgaaaggaatgtaagcacagaatgtaatggcagcagtattggtgatgcaaatataattcacaggaagtgtgaagatcaaaatgggccttgtgctggtcctgacaagtcattttcctccaaccttagtgttatttgctcttcacagaagtctgcagagagtcgtctttccataaatattgacaaagcaaatgataaacctcttgacaacgatgaaaaagaaaagcaacctatatctaacttggttcaggaattgaatgaacatccaattggctgtgttacacctactgcccctagaactacttcccataggaaccggtttacatctatatcacgtgcttttggagatggttcaaaattactgccagaagaccacgtgttgactggctttgctggtggttctaagaaaccacgaagtcaagtttcatactcagtttctcctaaaagtgaggaacttggcataaaaaacaaaggtcatttccgcaagatacaatctcatgttagtgcaaagataaatgatgcaaagaaacttcctgatagttctagaagtgggcatagcagcccggagtcattgacttgcgttgcaaatgttcttgttacagtgggtgatagaggttggagggagtatgatacccagatcacaatggattccgatggtcagagtgaaaggaggatatgcgtgaaacttgctgaagggaccaagtatgctcacaaggtctgtcaagttttgcagcctggggccacaaaccgctatacacatgccatgatgtggaaaggtggtgctgaatggtgcctggaatttcctgacagaagccagtggttgattttcaagcaaatgcacgatgagtgctatagccataacatcagagctgcttctgtgagaaacattccaatccctggtgtccatttggttgaaatccatgatgataatgatgtggtatcctttgtgcaatctgaagcttatcttgttcacatcggaacagatgttgaaattgctcttgatcaatcccgtgtgttatatgacatggacagcgatgatgaagagtggatatcaagctggcggaaatccttagtaagagacaacaccaccacacttcagtttgcagaagatttgtttgagagggttatggacaaactagagaagtttgcatatagccacaactgtaatggactcagcattgatcagatgaaggaactggagactgatgatgtacctctgcacactattgaagtgatacatgcatattggcaagacaagaggcagaaaaggggaatgccacttattcgacattttcagtcggctatgtggaagatctacgagcagcagctgcatgaatgggaatcaaaagtatgcagaatgcagagttcgtcaaatgggtaccaagaaaagaaattgcctcccaagcctgcattgtttgccttctgtttgaggcctcgtggactccatgtaccatacaaggggccaaagcagcgttctcataagaagcttatgtccacaggctgccatagcttttcaagagagcatgatggcttttaccggcaagtatcaggcaggagatacaatgaatgcactggggatgggaggataagcgaatcgtatgacactggttctctttactccccaacagggtactctcccaggttctctacaagaacagattctcctcgggcattcgagtcctcagaacgaagctccacaccaagattttccaggaacaacagtagcaccaaaaggagcgcagcccttgctttctccgacgaccaccagccatcaccttcctgccgcccccagagagcgaaacggagcgcgcacgaccactggaacgctgctatccacgactggcagaactcga

SEQ ID NO: 17920 - DNA, 681 bp, Zea Mays
ggggagctcaggcctcaagaagaaagagcccgcgccacgccacgccacgccgccgtggacatggaggtggagctggagcacggcggggatgaaggcggcgacagagggagcgagtcctcctcctcctcctccaagaggagcttcggcgcttcttcggacgcaaccgtcagcagcacaccaagcaagctgcaagccctgaggtttgcagaggacctctcgctgccgtcggtgcaggtggtggtgatgagcgccaacatggggtgttcgcactgccggcagcgggtcgccaacgtcgtctccaagatgaacggcctgctggactacatggtggacttcgggaagaaggaggtgacggtgcgcgggaaggtggtgcataccaagaagaagaagaagaggcacatgagggcactgctgggtgcagcaggagcaggttgggacgacgcccgatcggcggcgtctttgcccggcggccatgccaggacgctgtcctggttttgggggtgctacagctcatgacggccatagctagtatagtctttatataatactaatatataccgcatatatatagagagactatcatacgtctgtatgttacatttatatgtaactagtaggagctgcgtatatatagttgttgtattaataatctgttagtagtaatatatttcttctcctggt

SEQ ID NO: 17921 - DNA, 1058 bp, Zea Mays
cggacacaccaaaaggttgacttgtatttgcatgagcttaaggacaactctgtgtgtgcgatttaagagtgaagtagtagcatgcggagttgtgtatgctgcagctaggagacaccgggttccccttcctgaagatcctccgtggtggactgtctttgatgctgatgaagcaggaattcaggaagtttgcagggttcttgctcacctctacagcttgcccaaggcccaatacattccagtatataaagacaacgattcctttactgttaagagaatctctgatctacaggcttcaaaggaaagtccagcaagggctgttgctagcgataagggtacccctgtaccctcaagttctagccaggagaaggatccagtggctaagactatactgaacaaggtgaaggaaaaaagtgatgacgaaggtaaaccattgcccgctgaatttgatggaaaagaaaacccggtggcaaactcaaaaaatgacaagtctgattctggtgtcgaccggagtcgagaaagagagagatcaagagggcgggaacgtgatgccaggggtagggattctgatcgtgatagcaggggtcgcgagtctgatcgtgagagggaccggagacgctgctctagggaaagaagttcagacaaggagaaatcaaggcgccattcatcacgcgaccgggctgactactacaattcgcattcatctcgtgagaaagatcggcataggcaccattgatcaaggtgacgaggatccccggtctgcagggcttcgctgcatggagaccaccacttggcagtgccgaccggatcatgaaaacttgtggattatcatcccactggtggttgtattggcttgattgtgttttgcaccttggattgtaacttgcaagatacgctagccatgagctgtgtgcaacttgaatttataaacacaacatataagatacaattgacgcacgtgcactaactgccattccagcagagcttgtggaatgttataaagaaacagtttgtggaatgttggcactgttagacctagtttggtgactagggaaacgaag

SEQ ID NO: 17922 - DNA, 463 bp, Zea Mays
ccctctggagggcctctttggcgaccgtagaggtatctgatagctctgcacaccacagactaccaacaacctatgctcttcctcaatacccttgccgtcagtgtgcttgtggtcgcgaaactaccgaatatgcacaaggtccggattttcggaataaatgccgagaactgagcaacgtcatccttcgccagacatttaccctatatgcgcttttcagaacggttttgtgtgttcccccccccttctagtgcctttagttgggctcatcagagcaccagtgttgaaaaagttgttagcaggatgggccttggtcgctgtatagagagatgctcggaggcgtgctgtacatctgatgtgcacggattctgtacactcttaatgttgctatatatacggtttgttgcaagcatctgtcggttgctatatgtacagtgtggttcttgcagagcgatgtgtttcctcg

SEQ ID NO: 17923 - DNA, 1450 bp, Zea Mays
gtcagaagcattttcgactaatattttgtacgtggcagcattgggtttcacatcaactgatgggactcttaatgataggatggataatgttggttcctgcagtccacttccacagtcagagcctgctgtttcagtttctgaacatgagcagtcattgacggagtgtgtggatgttcggagccctggtgttgtcggtggaacaaatgagacgatttcaagcaaggtaacacattctcaacctcgactccagcatcaggaagctgcacagaattttaaggcatatgagccagattctggttatgggatgtcatttattactaaagttgatggtgaagcagcccaaggtatagcttattcatctgaggctatggttttacattctgtaaatggctatcagttacctgcatctacagcaactcaacaaccagtgccccagatgttttctcaacaattccaagcacctcagtatccaaactttttgccatatcggcatgttttctcaccacagtttgggtctctaatggttgttccaaactattcaagcaaccatgcatttcctcagttgccacatgccagcagctatctggtaatgccaaatggagcctcacaactagctgccaatggcatgaaatatggatcaaaccatcagtataagcaagtatttcaaggagcccctgctggatatggctacggaaatcataatggttaccctaacggtgttattggcggcacaggtgctattgaggatatgaatatgagtaaatataaggacaactgcctctatgcacccaatccacaggtggaaacagcagatgtatggattcaaagtcagaaagagagtcccaatatgccatctgcaccgttctacaatatggtgggacaaccagtgtctccacatgcagcatacttaccaccacaaagtggccacactgccttcagtcccgccccttcccatcctggtcacttgcagtacccgggctttgtgcatgcactgcagccaacatccatgaccatggtgcagaacccgcagaccatgatacatcagccggctgcaccgccattggcaggaaatctaggcctggacatgtcggccatggttcctggaaatcaagtaggagcgtttcaacataaccagcttgcccatcttggctggaccacacaatccttttgagattttggtgtgcttctatggctggataagtgaaatttcggttccgtgtggatagaacctaattgaagtgatatgctgtaatatgcaggataggcctgatgaataccaggtttttctttgttttaattataaaaggggaaccgttttttcgtgccgttgtgatttgcaagaacgtgtttaatgttcacttccagtttttgttccaaaattttgttgtaagtgctagtttggaaactcaaattctctttcgggattagaatgaccctacaatctccaatc

SEQ ID NO: 17924 - DNA, 1476 bp, Zea Mays
gatgcatctgttccggtgagtcattagaagatgctttgaggcaattatacctcattgatgcaattgatgaaaacggacaaataacggatgttggacgagttatggcagagcttcctcttgagccgtctctttcaaggactttgattgaagcaaatgaattgggatgcctatctcaggcgttaactgttgcatcgattttgtcagcagaaataacattgcgatcagttagcaaggacgtggtggatggaaagaggaaaaggcaggagctccctgatgggtctggctggggtgaccatatacaattgcttcagatatttgaaagctgggaccaaactggctatgacacaaaatggtgctctcatcatgatttgcaggtgcggggtatgaaattgagcaaagatgtgaggaaccaactatgtcagattattcaaaaaattgcaaaaggttcaactgatgtggatgcaaggaaaagccggaagaatgaccctgattatagaaagctgaggagagctctctgcgtaggatatggtaaccagctagctgagaggatgctgcatcacaatggctaccatactgttggctataggacccaacttgtacaggtgcatccatcttctgtactggaaggcgatgagtatggaaagtttccaatgtacgttatttatcatgagctgataagtacaactcgtccatacatgagaaatgtctgcgccgtcgagcaagcctgggttcagcctatattaaagaagctcgacaaattagacataaacagattaagtggtggttcgagtgcaccgggagattctgaacttctgggagacaataagcaagtgaactcgtcaaagaatgacgtgggtgtaaaacaatcagaggtggacagtaaaatccaggcagctcgagagcggtaccttgcacgaaaaggcaagaaatgacaatcgacacgtttaactgatcgctcagcatccttctggtcagcctgaagcttctctgaagatcataccgaggaaccattcgtgttattgtgggtggtgtatgcttcaacgtgcacaaacaagagaatttcttatgtaatcttttgtttgaggactctaaccttttcttttatttggcattactgtgatgtgaccttttccttgggccgaaatattttacaggcttttctgcatgggctagattcttttcccccatattcctatatggtgttgtctgttgaggtcttgtccctcctgcctagcatatgttgagtcccaagcaaggcaacaccgcaatatgatgcgatcttggaagtgatactgatatgcgctctgcttgggtttctctaacaaattttagagtcccgctctccctccctccgttccaaaatataatttgttttagattaattacacattcattaagtaacatatgaatataatttgtatgtatattcattatcatttgaatgaatgtggacaaaaaaaagtgggctagaaggaa

SEQ ID NO: 17925 - DNA, 2546 bp, Zea Mays
gccccgtctccctctccggcttcctttctccgtttctcgctcgcctcttctctctcccggcgtccgcgcccgccgaaacactctcgaaaggaaaccgatctgtcacccaaaccgcgcctccccgcggtgatctcgactcgagcgcgtttaaagcaccgcatcaaaaggaaaagagaagcgcgcgagcgagcgaggatccgggagcgtgaagcgcgaaaaaaaagcaggggagggagcgagcgaggaagcaacgcggaaacgggaaagcgagcgagacaagcgcccgatttggtcccccgcccgcttcgtttcctccgccgcacgtcttctcccccactaccactaggccactaccccacctcccctccagtcccctcgccttcccgccacgccacccgccgcgtcgccggagccctgtagctttcaccgcgcgcgcgtccgtccgtccgtcggcccgcccgcccgccccgagatcggggaggggcgcggtgtcatctctcctgagcaagcggcgcggcgatggcaggggggcaggcgcccgaggcgtcgcccgggcggtaccagcggcggcgcgacgagatcgacgacgacgactgcgccgacgtgctgggcatcgacgtgcgtgggcccgacgctgacccattcgacatccccgccaagcgcgcccccgtcgagcggctgcggcgctggaggcaagctgcacttgtcctgaatgcttctcgacgattcagatacacccttgacctaaaaaaggaggaggagaaggaacaaataagaaggaagataagggcccatgcccaagtcatacgggccgctttacttttcaaagaggctggggaaaagcagactcatgaaacagagttaccagaaattctcccacgagattttggaattggagaggagcagctgacagtgatgactagggatcataattattctgctctgcaagaatatggaggggtcatagggctcgcaaatttactgaaaaccaacctagagaagggaattcatggcgatgaggcagatttgtcatgcagggcaaatgcttttgggcctaacagatatcctcgcaagaaaggaaggagcttttgggtttttctttgggaggcctgccaggatatgacgctagttatccttatcatagctgcagtaatttctttagtactgggcattgcaactgagggcacaaaagaaggctggtatgatggcactagtattgcatttgcagtctttcttgtgatagtcgttactgctgttagtgactacaagcagtcgctgcagttccaacacctcaatgaggagaagcaaaacatacaagtggaggttattaggggtggtagaaggatacaagtatcaatatttgatattgtagtcggtgatatcgtggctttaaaaattggtgatcaggtctcagctgatggtgttgtaatcagtggtcattctcttgccattgatgagtctagtatgactggggaaagcaagattgttatgaaagatcagaagtcaccctttttaatggctggatcaaaagttgctgatggttatggcaccatgttggtaacggctgttggccttaacaccgaatggggtttattaatggccagcatttcagaagacaacaatgaagaaactcctctgcaggtgcggttgaatggagtagcaacattcataggtattgcaggcctttctgttgctgctatggtcctcgtagtcctctttgcaagatattttacaggacatactacagattcagatggctctgttcaatttgttaagaggcacactagtgtgaaatctgcaatatttggttcaataaagatactaactgttgcggtaactattgttgtcgtcgctgtacctgagggcttaccactggctgtcacactaactctggcttattccatgcgaaaaatgatggccgacaaagcactggttcggaggctttctgcctgtgaaacaatgggttcagcgacaactatttgtagtgacaagactggtacattaacattaaaccagatgactgttatgcaatcgattgtcggtgaagtaaagctgcaacctcctgctaatgttgataaactgtcatctactgtagcctcacttctacttgaaggaattgcacagaatacttcaggcagtgtgtttgaggcacaggatggtagcgtcgaggtaactggttcaccaacagaaaaggctatcctatcttggggtcttgatcttcgtatgaaatttgctgaggagagatcacgatcttctataattcatgtctctcctttcaactccgaaaaaaagcgcgctggggttgcagtggttgcgagagattcaaatgttcatgtacactggaaaggagctgctgaaattgttcttgccttgtgcacaagttggctcaatgtggatggctcaacacatgaaatgacacctgataaggaccctgtagaagagcaacaacaaggcacacatatagaagactataacttcacctagagccttcatccgtttaattattgttcttgggtcgttctttaagctactccataatgttacat

SEQ ID NO: 17926 - DNA, 211 bp, Zea Mays
aggtgaagagcaggtagcccaggaggaggtctacaacgaggagtgcgagctaatctaggtggcgtctccgagtcagcgttatggcaccaaggaataattattagtttgctttattgttatcatttattcttgtaagacacttccacaatgtaataatttttgtgacatttatctctatatacttagtcattatatgtgttgttcttctttg

SEQ ID NO: 17927 - DNA, 849 bp, Zea Mays
agagcaaagcatacacgcgcgcagtcactcacgcacgcccccagctctctccttctccctgctcgctcgctcgccatggacgctccgagcagctggaagagtcctgcgcgcgccaagtgaccggagaagctgcgagatcagagtagttgcttgccgctcccgtgccaccaaattagattggacgtagctagcagctagctgagccgtagtgcgtagcggcagctaggctgctagctcgatcgttatagctgcgtactagtggtgtcgcagcagaagcagtagccagcttcagtagccgatccggtggtaaaagcaactttttttggacatggcggcggagggagccccggtgctggtgaggcatgctggcggcgtggaggagctgcggcagctcccgccggggttccggttccgccccacggacgaggagctcgtggtgcagtacctccggcgcaaggccttgggcgcgccgctccccgccgccgtcatccccgtcgtccgcgacctctacagcctcgacccctgggacgccgtcgacgtgccggccgcccctgatgcgagcagccaaggcgagagatacttcttcgcggtgcggccggcgggcggcgtcggaagtgctaggagggcgaccgcgagcgggcggtggaggccggcggggaaggagaagccggtggccctgccccgcccgtgcggcggcgggagcctcctggtgggcgtgaagagggcgatggcgttcgttccccggcggaagaagaagaaggcggcggcggcggcggccctggcgatcggctgggtcatgcacgagtaccgcctcgccgcgccgctgcacaagcacaagagcccgtgacc

SEQ ID NO: 17928 - DNA, 1269 bp, Zea Mays
tatccttcctccaaatctctggcctccccggctaactggtgtatagggacttccttctaagcattagagggcttggactcaaaagtgttgagtgcgttcgtctcttgacgctacatcatatggcttttccagtggacacaaatgttggtcggatatgtgtgaggcttggatgggtgccgcttcaaccattgccagagtctcttcagttgcacctattggaaatgtatgagcttcactaccaaatgattacttttggaaaggttttctgcacaaaaagtaagcctaattgcaattcatgtccattgagagctgaatgtaagcactttgctagtgcatttgcaagtgctaggcttgctcttcccgcacctgaagaaaaacgtttggctacatcggaggatccaaatgttgtagagttttgtcaccaaacatacataaattcaggggctgttggcgaacttgagtggagtgcgaactatcctaagcatgctgtttgtggtaacctgcagccgttcattgaggaaccactgagcccagaacctgaacctgaaaatgtagaggcgaaggacggtgcaatagaggatttctttaatgaagaccctgatgaaattcctactattaatcttaatattgaggagtttacacagaacttgaagaactatatgcaagcaaaccatgttgagattgagtatgctgacatgtcaaaggcattggttgccatcacccctgaagctgcttccattccaactccaaagctcaagaatgtcagtcgtcttaggacagaacaccaagtttatgaactgccagattcacaccctcttctggaaggatttgaacagagagaaccagatgatccctgtccatatcttctttccatatggaccccaggtgaaactgcacaatcaaccaatgcgcccaagacattctgtgattcaggggagactggtcaactatgtggaagtttaacatgctttagttgcaacagtttacgagaaatgcaggctcagaaagtcagaggaacactcttgataccatgccggacagcaatgagaggaagcttcccacttaatgggacatattttcaagttaatgaggtatttgctgaccattgttcaagccaaaatccaattgatgtcccacgaagttggatatgggacctcccaagacgaactgtttactttggaacctcagttcctacaatatttagagctgatagaagcaacgcagctgcaatcaagacttggcaaatcaatgatggcaaagtaatggctg

SEQ ID NO: 17929 - DNA, 1415 bp, Zea Mays
ccgaggccccacgaatccgggtcatcttgcgatcaatccagtccgtccaacccttgccatccgaaccgcaaccctagatttcgcttcctctctgtcccctccgctgcgccgccataacataaatccgccgcccctctccctcagtaaacccctctcttcttcccgcggtctgctcgttcgatctgtgcagcagatctgaggtcccgggcgaccgtgaagcagcttcaatcgtcggcatggcgctcgtattgcatagtggggctggaaacaagaatgccttcaaagcacttattgctgcagaatacagtgggatcaaggttgagttgaccaaggattttgagatgggtgtctccaacaagacccctgagtttcttaagatgaacccccttgggaaggttcctgttctggagactcctgatggccctgtttttgagagtaatgctatcgcacgctatgttgctcgcttgaaggatgacaaccctctttttgggtcttcccgtattgaacaagcccacgttgagcaatggatggattttgccgcaacagaagttgatcctggtgttgcatggtacttgtatccaaaggtggttgaggcaccagcagaagaggaagcaccaaagccaaagccaaagaatcctcttgacttgctgccaccaagcaagatggtccttgatgactggaagaggctatactcaaacacaaagactaacttccgggaggttgccatcaaagcggatggacctgtgccgcaagtacgcctttgggaagatgctcgtgataggctctgagccacccttcaagctgaagggcctttggctcttccgtggccaggatgttcccaagtttgtaatggacgaggtctatgacatggagctctacgagtggaccaaggtggacatctctgatgaggcccagaaggagcgtgtcaatgcgatgattgaggaccaggagccctttgagggcgaggccttgcttgacgcgaaatgcttcaagtgagtgtgcttgcctggagacagaactgtttagcccttgaatttgcctatggaagagtttgcccttttactagtgtcgatgttgatctggtataccttgctatgaactggttaaagtttgtgctggtttgggattttttgtgcatcttgtgatacctcaagtcttcatcatttaaatgtttagccgtaataatctggttattttttcttctcatgactgagatgttgtgattatgtttttgttttatacacgccataaatttcaagccggcagagcccatttaggaacgccaagccggcagagccatttaggaacgccttaaactatatcatggcttcagcagaattttgatccgagttgtagtttgtgctatttgtgcaaactattcggttttagcaaatttatcactttaatattttgaa

SEQ ID NO: 17930 - DNA, 345 bp, Zea Mays
caaagaccttgatgagcagctgcaccaccatgtcattgtcagtgaggaatttgatcatctgtaggatcttatttggtcaactggtctcctaacctgcaaactgcagtatctgatttagaagtagaatactctgaagaacctggaaatttgtacttcatcaagtaccgtgttgctggcggaaccagggatgattttatgactatcgcaaccacaagacctgaaacaatatttggtgatgttgcaattgctgttaatccggaggataagcgttatgcacaatatgttggcaaattggctattgtaccgttgacatgtgggagacatgtccctattattgctgatcgg

SEQ ID NO: 17931 - DNA, 575 bp, Zea Mays
gtggattggtattaatactaaagtacccaaacaaagccttatggcatcaatatctgggtattgaggactatgaggaacaagatgaggatagctcagattcagaaaatgaatatgacaacgcagtcacctctgttagctatgatgaggatcaagacgattttgacgaatcagctgatgaagatgaatatgatgattacgacgatgaagatgacgagattgacagctagtggtttggaattgtttcttgtgatgtgccgctctgaattagtgattctctggacgttgtacttctgtctctgggacatttcgtggtacgagaaaacaaagttgcttcttgtgttcactagtccttttctattagttaacctcaagggctcaaggtttagtttccaactttccaagttgttccaaccagttccatctcgcgaaggacagtgagacggaggaatggatgttgcaaatcttggccccctagattaatttagtattgctcccaagaagaccattatgcgactgggctactggtaaccactaaccacgtaggagaggccgaggaatcgtcagggtcgtgagtg

SEQ ID NO: 17932 - DNA, 1997 bp, Zea Mays
tgctttcgatgttcttctgtgattcgatcccccacaggccacagccagaggccagagccgaaaccaaatattcttccgccgccggccgactgctgcattcaattccccttcgcgccccgaaagccgaaccaacgagcctcgcaggtcggcggtctcgattagggaggaggaagggagtggcccctgatctgggtggcgggcgagatgaggctactgcgggtcgccacgtgcaacctcaaccagtgggcgatggacttcgacaccaacctccgcaacgtcaaggagtccatcaagcgcgccaaggctgctggggccgtcatccgcgtcggccccgagctcgagctcaccggctacggctgcgaggaccacttcctcgagcaggacaccaccgcccacgcatgggagtgcttaaaggacattttaactggggactatacggacaacatcttatgcagcataggaatgccagttattttcaatagtgtgcggtataattgccaggtcttctgcctaaatcgtaagataatcatgatccgaccaaagatgtcccttgcaaatgatggaaattatcgggaattccgttggttttctgcttggacatttaaaggcgagattgttgattttcagctccccgttgaagtctcagaggcaatatcccaggatacggtgccttttggttatggatacatgcggtttatagatgtgtctttggctgctgaaacctgtgaagagctctttacagcaaacgctcctcggattgacttagcattgaatggtgttgaggttttcatgaatgcaagtggaagccaccatcagttaaggaagctcaatcttcgtattgattccataaggagtgcaacccaaacatgtggcggtgtttacatgtatgctaatcagcagggttgcgatggtggccgcctttattacgatggttgttgctgcattgcggtaaacggtgatttggtaggccagggatctcaattctcgttgaaggatgtagaagttctggatgctctggtagatcttgatgctgtatcgagttatcgagcatctgtttctagtttcagagagcaagcaagccacaaaacaaatgtaccttttgtgaaggtaccatataaactttgccaaccatttcggagtggaatggttccgacttctccagttgagattatgtatcactgtcctgaagaagagattgcatttggacctagttgttggctatgggattatttgaggcggagtcaagcatcaggatttttgcttccactttctggtggtgcggatagttcatctgttgcggcaatagtcgggtgcatgtgccaacttgtcataaaagatatagagaaaggagacgagcaagttaaggcagatgctcttcggattgggcagtataaagatggggcaattcccatggatagcagggaactggctaaacgtttgttttatactgtttacatgggaactgaaaatagttctgaagatacccgatcacgtgccaaaaggctagctgaggagattggttcattccacttgaatgtacccattgatagtatagtatctgcttttctttccttgtttgaaacattgactgggaagcgaccacgctacaaggttgatggggggtcaaatactgagaatctgggattgcaaaatattcaagcccgaatcaggatggtgttagcctttatgatggcttctctaatgccatgggtccacaacaaatctgggttttatcttgttcttggaagctccaacgtcgatgaagggttacgtggttatttgacaaagtatgactgcagttcagctgatgtaaaccccattggaagtgtaagtaagcaagatctgagagcttttttacgatgggcagcaattcatcttaagtattcttccttggccgaggttgaagctgcaccacctactgccgagcttgagccaatacgagcaaactacaatcagattaaaatatatagactactcttctcctagctgaactgtcg

SEQ ID NO: 17933 - DNA, 151 bp, Zea Mays
gtgatggcacataatcatatttgatgatcttgattagggtgggctagacctcaccaacagtgcaatgattgagcgacacacgagggccattaaaccccgtgaggtagacccccccacaaaaaatacccataataaataaattaaatatcaa

SEQ ID NO: 17934 - DNA, 1372 bp, Zea Mays
tctctccttcctctcacattccactagaacactcccaccaggccaccacctccacctcgtcgtctcccaccaccgccgcgcgcgagccctagcccgatctagccggcggcaggcactagatcccgccgcttgcggcatcccgggacgcgcctcgccgaattcgccgctcctcgcactgcaacacgcccggaccactggtcatgatggtcgatattccatctatatccatgcatctcgtgaaatacctgtacattctagctccctctttgttggacgtgaaattcgcagtgaaaaggtagtatgggggaggatttcgatggttgatgcagagaagaggctgttagcaaatgcattggaagatgtcgataatcaattttttgtcttgctttctgacagctgtgttccagtacatacatttgattacatatataattatctgatgggaacaaatgtcagcttcattgattgcttcctggatcctggcccacatggaactggaaggtattccatggaaatgcttcctgaaatagaacagagggacttcaggaagggtgcccagtggtttgctataacacgaaggcatgctttattgattctggctgacaacctttactacaataagttcaagctgtactgcaagccagcagagggacgcaactgtattgctgatgagcattatttgccaaccttcttcaatatggtcgatcctggtggaatagctaactggtcagtgactcatgttgattggtccgagggaaaatggcatccaaggtcatatagagctgcagatgttacctatgaactcttaaagaacataacgtctgtcaatgagaatttccgcattacaagtgatgataagaaagttgtgacacggatcccatgtatgtggaatggaacaaaaagaccatgctacctttttgctagaaagttctacccagaatctctgaacaacttgctgaagctattttccagttacacatcggcttgattcaacattttttttgttcatttggcctaggagattcccctagttttttttttctgcttcatgtaaattgtgaaattgatacttagaggcttaacacagagttacgggtacagggccagtgatgtaattctgtgagtcccttggtagggctgaggtgctgtttgtttagtattgacctgccctccctgtcgttcttggtgccgtctgttaggttcctagcgcccattccctgagtaacagggtttttgtcagttattactgattaattctttgtagacatgaagagattacgaaatcagttacacttcatagtttaacctggacttgtttcgagttctagtggcagttgtactcttctgatgagtacggcatcatgttctcatt

SEQ ID NO: 17935 - DNA, 2045 bp, Zea Mays
ggccatgacgactccgccggtccgcccctgcccccgctcacggatgctcctctggacgctatatataagccacctcactcccccctctgccatcacacaccaccgccgctcaccaacaaccgagcaggagcagcctaccccatccacccaccccatcctctgcgctgcacggctgctgctggtgctggtccggccggtccggtccggtctcctctgttccagcgagctccctccgatccatcgggtaggacactccccatggcgtcgcacaacggcaccaagcacctggcgccgatggaggtgtcggtggaggccgggaacggcggcggcgccgagtggctggacgacgacgggcggccgcggcgcacgggcacgttctggacggccagcgcgcacatcatcacggccgtcatcggctcgggagtcctgtccctggcctgggccatcgcgcagctggggtgggtggccggccccgccgccatgctgctcttcgccttcgtcacctactacaccgccacgctgctcgccgagtgctaccgcacgggggacccggacacgggcaagcgcaactacacgtacatggacgccgtgcgctccaacctcggcggcgccaaggtcgccttctgcggcgccatccagtacgccaacctcgtcggcgtcgccatcggctacaccatcgcctcctccatcagcatgcaggccgtcagcagggccgggtgcttccacaagcgtgggcacgccgtcccctgcaagagctccagcaacccctacatgatcctcttcggcgccgtccagatcctcttctcccagataccggacttcgaccagatttggtggctctccatcgtcgccgcagtcatgtccttcacctactccgccatcggcttgtccctcggcatcgcacagactgttgcaaacggtgggttcaagggaagcctcaccggcatcagcatcggcgccgacgtcacctccacgcagaaagtgtggcacagcctgcaggccttcggcgacatcgcgttcgcctactccttctccaacatcctcatcgagatccaagacacgatcaaggcgccgccgccgtcggagtcgaaggtgatgcagaaggcgacgcggctgagcgtggcgacgacgaccatcttctacatgctgtgcgggtgcatggggtacgcggcgttcggcgacaaggcgccggacaacctgctgacggggttcggcttcttcgagccattctggctgatcgacgtggccaacgtggccatcgtggtgcacctggtgggcgcgtaccaggtgttctgccagcccatcttcgccttcgtggagcgccgcgccgccgcggcctggcccgacagcgccttcgtctcgcgggagctccgcgtggggcccctcgccctcagcgtgttccgcctcacgtggcggtcggcgttcgtgtgcgtcaccaccgtcgtggccatgctgctccccttcttcggcaacgtggtggggttcctcggcgccgtctccttctggcccctcaccgtctacttccccgtcgagatgtacatcaagcagcgccgcgtgccccgcggcagcaccaagtgggtctgcctccagacgctcagcgtcgcgtgcctggtcgtctccatcgccgccgccgccggctccatcgccgacgtcatcgaggcgctcaaggtttaccacccgttcagcagttaattcttgctgctgtggatgtgctgggtggggcctggcctggcctgggtttggacgtatgtgcatgatgcattcattgcgttgcgttcaactgtggtcaacaagggagggagacagatgcagatgcagtgtgagatgtttgcatggaggcccctatagaaacaagtgaaatgtttaggcgcccttgtgcacatgctggtcgcattccttgcaagaataccaggggtggggccagaatggcatgagctgggtgttcctttctaactcttcttcttcttcttctcctcttcttctttatttacatttttcttttatgtgttttcgtctaattaaggttctggttttgtaaaaaaaaa

SEQ ID NO: 17936 - DNA, 3218 bp, Zea Mays
ctttaagaaactatatattatatatttgagtcgatttctcaagacagcaaccattaacatcataacaaaggttttcacatggaatacagatgcatggggttttgggccaggaaccacttcgttgtaccagtcacacccttgggttttggctgtcctccctgatggaaaagcattgggtgtccttgctgataccactcggcgttgtgagattgatttgcgacaagaatcaactataaagttctctgccttatctgcctaccctgtcatcacttttgggccatttaatactccagctgatgtcatgacatctttgtcgcatgcaattggtactgtgtccatgccgccaaaatggtcacttggctatcatcaatgtcgttggagctatgattcttctgagaaagtactcaaggttgttaggacatttagggagaaagacattccttgtgatgttgtctggatggatattgactatatggatggttttaggtgcttcacgtttgatagtatccgattccctgatccaatatcaatggtagatgatctccattccattggttgcaaagcaatctggatgcttgacccagggatcaagaaggaggagggttactttgtttatgatagtggctcaaaaagcgatgtttggattcaaaaggcagatggcagtccattcgttggggaggtgtggcctggtgattgtgttttccctgactatacatctgaaaaaacacgagcttggtgggctagtttggtaaaggacttcatctctattggtgttgatggaatatggaatgatatgaatgaacctgctgttttcaaaactaccacgaagacaatgcctgaaagcaatattcataggggagatgctgatattggtggtgttcaaaatcattcatactatcacaatgtctacggaatgctaatggcaagatctacttataaaggaatggaaatgggcaatgcagctaaacgaccatttgttcttacacgagctggttttattggaagtcagcgttatgctgcaacatggactggtgataatctttcaaattgggagcatctgcacatgagtctaccaatggttcttcagttgggtctcagtggtcaaccattgtcaggtcctgatattggtggttttgctggaaatgctactccaaaactttttggaagatggatgggtgtgggtgcattgtttccattttcacgtggccatacagaaactggaagcattgaccacgaaccatggtcctttggtaaagagtgtgaggaagtctgtcgccttgcgctactaagacggtaccggctactgccacatatctacactcttttttaccactcacatacaaagggtattccagttgctactccagttttctttgctgatacacaagaccctgaactgaggaaagttgagacttcctttctccttggaccactcttagtttgtgcaagcactttacctaataaaggagctcatgaatatgcacataagttaccgaagggcatatggttgtcttttgattttgcggattcacaccctgatctgccggtgctgtatctacaaggtggagcaattcttcctgtaggtcttcctattaagcatgttagtgaagcaagtttggaggatgacctgtcactaattatcgcattgaatgaaaatggtaaagctgaaggtgttctctttgaagatgcaggagatggatatgcattcacacagggagactatcttttgacatattatattgctgaactccactcatcagtggttactgtcaaaatcttaaaatctgaagggtcatggaagagaccaaaacgaaatctgaaaataaatatattgcttggtggaggtgctatgataagtacagatggtgttgatggtgaagtaatacaccttacaatgccttctgaatctgtagtgtcaagcttagttgcaaccagcgaatttgagcacaagaaacgaatggagatgattcagcctatacctgatatagaagagccatcggggcaggaaggtgctgagctatcaaaaatacctgttgatttgaaaagtggagactggttccttaagattgtaccatggattggaggccgtattatatcgatggcccatattccttctgattcccagtggcttcacagcagaattgagataaatggttatgaagaatacagtggggctgaatataggtctgctggttgcacagaagagtacaaagtcatcaggaggcaccttgaacaatctggagaggaggaatctatttgtatggaaggagacattggtggtggtctggttctccagcgccagatatccattttgaaggacaacccaaagattgttcagatcgactccagcattcaggcaagaagtgtaggagctggttctggtgggttttcaaggaattgactgtcaaagttttaatgtgtttgagtgtttgcaactcaaaatgatactcttctgtattgcgtggatttgttgtacgaaggttggtctgtttacgagttcatcctacattcaccctgctgcacccaactgaggtagtagttgctttcacggccatcaatggttcaaagcaagagatctccccggaggcaggagaaataacattcgagggagacctcaaacccaacggagaatggatgctagtggacaagtgtgtcgggctgagcttggtgaaccggtttaatcccagggaggttagcaaatgctttgtgcactggggaactggtgatgtgaacatggagctctggtcagaggaaagaccggtgtctaatgagacgccgttgaggatttgccaccagtatgaggtgcagcaaacaacctaaacacctgcccgaagagcagaaataaaaataccaatttggaggatacttcagttgcttgcacttgttttacggtctctgtattgacggtcgcgcaccataacttccatggtattttggagtcgtgtcgttagtcattaccctcttggaggactttgggtctgctgaaaacatggttactcagcaatatctgctactgttcacgactgacattcaaagggttactcagcaatatatggataaaatttgtgttaaagataagttgtgtcgtgtgggttgagttatgtgtgttgtgttgtgctgtaccttcttctatctattaatggaaagatacgtagatctcctgcgtattcgagaaaaaaaactatatggataaaattttatgaaacatcgtaagtgtg

SEQ ID NO: 17937 - DNA, 1635 bp, Zea Mays
cttcctgaaccctgtgtcgctcacggaaccacggtcctagcgccgccgcgagagtcgtgacgacacatggcggccgcactcctgccggagacggcgccacggctgctgacgccggagacgctccgcacggcggcgaagcagtcccagggcatccacctcgtccccctctccctccgccgcgccatcaagcgctacctccgcgaccaggacagggcgcacatgaaccgcaaggtgctgctgctctcggcgtccttcgaccgcgccaagggcaccggagccgagctagccgcggccgccactcgcgccgcgctcctcgacgaccccaacgcgccgtcgggcgccgagcagcggtcggcgcgctggaaggtgcggtcggcctacggcgatattggcctccggtaccgcgaggacgagacagttgcctacgtcgcgtcacgcatgccagccatctacgccgcgtgccaccgcgtgctacgcgaggttagacgaaggttgccagagtttgcgcctgccaaggtgttggattttggcgccgggccaagttcagctctttgggcaatgagggcagtgtggccaaaatcaatagagagggttaacctggtcgagccttccaaggaaatgcaaagagcagggcagagtcttctcgacaatctgaaggggttgccacttattcacagctatgacagcatccaagagttgaaccgcaaaatagaaaaacatgagcgaggccatgatcttgtagtatcatcttatgcacttggcgagattccttctttgagtgaccgaatcacaatagtgcgccagctttgggacctgacgagtgatgttttggttttgttagagcctgggacacctcaaggagcaaagatcataagtcaaatgcgctcttatattctttggatggaaaaaagaaagtgtcgcaaaattgaaaaatcctcaagccgtcctccaagtagcatgaagagtatcgtagcacaaaaagtctcattgaaaaatgggtcttttgtggttgccccttgtcctcatgatggtcgatgtcctttggagaattcagacaagtactgccactttgtccagagattggagaggacgtcatctcaacgtgccttcaagaggtcaaaaggtgtgcctttacgtggttttgaggacgaaaagttttgctatgttgctttaagaagaggcaaacgcccagaggaagcttggccgcttgatgacttgaactttgagacacttaaagaacgcaatgccaagagaaagccagaagatcttgtcatcgactatgacgaccaatttccaagcgaggaagacgaagaggttcatgtcgatggtggggacagtctggtaccatatgcttcagatgaacatgaattaagtcttttccatgacagtgaagaagcagaggcggaacaaacggttcgtgctgaccttggaggaggttggggccggattatatacagccccatgcgaagagggaggcaagtacaaatggatgtatgccgttccaccaaacgggacgcatccgaaggcacatttgagcgtgtagttgtcacccgaagcaagaaccctaccttgcattttcaggcccttaaacaggagacatgtacccctgcccctttcaacggatcatgaactcac

SEQ ID NO: 17938 - DNA, 1294 bp, Zea Mays
tataaagattaattaggaaaccaggcataccagcaagtcctgaggccgcagcgcccatcaagagcgagaagccctgtcgcgcgcggagacgatggaagggccggcggcggcggaggcggagaacggcggcgcgggcaaggggtccggcagcaggttcaggcgggtgtgcgtgttctgcgggagcagctccggcaagcgcagcagctaccgcgacgccgccgtcgagctcggcaaggagctggtgtcgaggaaggtggatttggtgtacggcggaggcagcctggggctcatgggggaggtctccgaggccgtgcacaggggcggcggccatgtcattggcatcataccgaccagtctcatgggaaaggagatcaccggggagacggtgggcgaggtgcgggccgtggcggggatgcaccagcgcaaggcggagatggcgcgcaactccgatgccttcatcgcgctcccgggcgggtacgggacgctggacgagctcctggaggtgatcgcgtgggcgcagctgggcatccacagcaagccggtgggcctgctgaacgtggacgggtactacgacttcctgctggcgttcatcgacaaggcggtggacgacgggttcatcaagccctcccagcgccacatcttcgtcagcgcccccgacgccagggaactcgtccagaagctggaggggtacgaggccgtgcaggacgaggacccggcgacgcccaagctgcggtgggagatcgagcaggtcggctacaacgcctcgctcctggccgagatcgcccgctgatcggccgcgcgacgatcgctgctgctgcgggagctctggtggctccagtccacgcatcgtctgccggccaggccactggcctccacctgctgctatctaccctacccctactaccccatcgatgatcgatgcgatgatcctgcgtatcagatcaacagaagcacgcattcatatgtgtgtgtttctcaagtgtgaccgcagaaacggggcaccggtgagcaagacgcacgcgaggacttgttttttttaggggtgtgcgttctgctcctagtcctagcagctagcagcggcttgatcgtcctgccgcatgtactctgctcctagccacgtactcgtactcatattcctgatcgacgatcacgtgtttgtttactacccagcagcagctagtactaatgtactaagttaatcgtcgtcccctggtaatgtaactgacctccagctccagctagctagctgcgacattattctgtgcatacctctcgcctcaatggcgtattggcg

SEQ ID NO: 17939 - DNA, 144 bp, Zea Mays
cgactgcaaagaaagatggcaacctgcatagatcttacttatggaagagctgtcagtacagcattggcagtagaagcaaagtatgcaggtgctggaaaatccaagggttttggaggtgacaggcctagtcagggcccggtgaag

SEQ ID NO: 17940 - DNA, 2329 bp, Zea Mays
atgtgtgaatctccatcatcctcgatgtcgccgtctccgtcaccgtcaccgccgcagccgtctaggccgccaccggagtacaagcacttctgtcgagtatgcaacaagggattcacgtgcggcagtgcgctcggtggacatatgagagctcatggcgctagcgacgttgatgggttcggcgtcgacgacgacgactcgctcgacgaagagccgacggcgcccgcgcggtgcactggggcagatcagtgggacgtggcgggaacgtcgtcggcgactcacgcgtacgcgctccgggcgaatccgaataggttgatcaggagctgtcaggtttgcaagaactgcgggaaggagttcacgtcgtgggatcttttccttcaacacgggaaatgcaactcatcagagggcggcgagggagaagagggtgagatggatgggtcagactcgctacgttcgtcgctgcctgcctcagaagccggcggcggcggcgaggaggacccggcagtggcagcagccgcatggtcaaaagggaaaagatcgcgtcgtgtcgtcagaacagatgacccttcgtccaccatggtgtcggcggagcggtgcacgtcaggggacgaggacgaagagcttgcaaattttcttgtcatgctctcgtcgtccaaatccaacaacaacgacgaccaaacgatcgttattacagccgaccatcataaggagccagtatgtgcctctactggtgaaggtggtggtggtggagagcctttaccatttcaatcgcaaacaatctctcttttcacgcaaacccaaacacaagagccagttgtgccactgctgccttcgacggtagcggctacggtatctcaatacatcgcacccatatcacgtggagtttttgagtgcaaggcgtgcaagaaggtgttcacctcacaccaagctcttggaggacatcgggctagccacaagaaagtaaaaggttgttttgctgctaggttcgacaacaatgccaccgaaacagcgatcaataatcctactatagctgctgataccaatagtaaggccgttgttgtcaataatgcagatgcaagcgtagacgccgccacaagagtttttgctatcactagcgtcgacaccgatgtagggacaagtaatgaggcaacatcatcgtcgttgtcaatggcacatgctgttcccatacgacacaatccagcatcagccaccaccaccacgttcaccgtcgcagcgcattgcaagaaaaacgtgaagatgcatgagtgttcagtatgccaccgcttgttcacctctgggcaggcactcggaggtcacaaacgatgccactggctcacctcaaacacgtcagatccatgtaacccactagccatcccacccctaactgaagatctcgtcgtcggcgaagttaaacaccacgacgataccctccaaccaacggtggatgccaccgagccactcctcgacctcacaatagcagcaaatccagctgtagcactagctgcttctacaatgcgccccgacatagcatctactgtacacttgaagcaactagttgtcgcagcaccaagtaataatgttagccaccgaaagaaaactgcagcaacgggtagccataccacagatgcggtggttgaggaagatgaggcggatagcatcataatcaagaaagctaagattagcgatcttaaagacgtggtcaatatggatggcaaggccgccacccgcccactccaacctcatgcacaggcaaccgtgaagcatccacaagcaacagtgaaacgtaatctgtgcttgctactcatctgtccaaaagtcctacaggtactggtgggcggtggtacatctgcgtcgggcacaccctgcactgcagcaagctctgtcgcatcctggccggactcttcctatagtacccattccgacaaggtgcaaggatcaggtagcatgcccgctactctaccaccactgatccatatctttcaggtcattgtattgctattttgcaggccatcgactagaacaaagatccttctagagaaccatattgtcgattcagaaatttctcttacagccactgttattttggtcggggccgatgtacatagagatgccagggaaggtgtcctggagtttgagagagctttcagggagaggttctctgcttacacattagctgctaagaggcatattgactccactaccatcttcgacgtccaaggggctcacatggatcatcctcgagcgcaagcaaactttgagatcgcgctgaaagcatgtcatccctggaatccttcagttgggagtaacatttagttccactgtaagcacaaag

SEQ ID NO: 17941 - DNA, 1553 bp, Zea Mays
ctatcacctaaaatctaggatatattattccccccaaaacaaaccctaaccggccggcccaattctcacgcgctcgccgcctaggagcattcacgttggcggcgggcggcggctcggttcctctcctccaccgcacctccaagaatccacctccacgactgagctgacggctcggtagcgccatggcagttcaccggctccaaccttccccatccggcctacagtgctccaccgcccggtcgccagtgctcctccatgggccacggctgacgggtgcacgcaccgatggttggtgcaggtaggagaggtggatttggtggacctagattcgatgtgcagagagcgacttggaggtggctgacatcttcaagcactgcatcatgcagttacaactactgttggccatacagggaaatgctgggcctattataccaattgttcaaagcatggaccttgtataattacatgtttttatcatagatagattaatttctgaaatgcccatagattggtatatttgtggaaatttgtggtataagatttttctgttgatgtttgcaggttatttttccagcacttgacattcgagtgaaaaatgtcgcagggacatattctcttgaacataaaggagaaaatgatctcttcgcacatcagacaaggcttctactctttcagaagaaagtcatttttaggagaatcgtgaacaaaatgaccagatgtttaggcctggttggaaggacatttttcgaatgaatcagagtgagctcgaggctgagatttgaaaaggtctctcgagattctactcttgatccaaggaggaaggcctatctgatccaaaatctcatgaccagccgttggatagttgctcagcaataatcaccacaaccaagcgtcgaaggacataatggatgtacacgatgacctggatgtgttccttcgtaccgagacccagggaaacaaatatttgggctgtgagcattacaaaagaaactgcaagcttgttgctgcatgctgcaataagctattcacttgcagattctgtcacgataaagtaactcaagaggtccacttattgactcttatgaccatgtaattggtgttaatacaactacattaacatgtaaaggttggtagatctggaaggtcttgatggtctaatacctatctatgagtacggaagaaaaggcgggagaagtcggtctctgcagcatcgcgcgtgaaaaaaaatcagccaattccacgagcattgatgttgtcatgacttcaaaagaggagagaccatgctaagaataatgcattatgacatttgtcaggcttacatatcgactgtttgatatggatagatgtataggtttatgaccaatccagttcaaagcaattggagtatagaagaaataaggagaaacaggaaagctctgtacatcttgcattttgctgttgtttgtcgaagtttcaatgtctgtcgcgtgacaaaatatagttgtaatttatattttggcatgcacgaaacaggtgtatttattcatttttgaacgaaattttatgtcaaatcc

SEQ ID NO: 17942 - DNA, 1122 bp, Zea Mays
gggcggcggcggcggactgtcactcgtgccacacggcccccaaacgtcgccgccgtggaggaaggagcaactcgatcgccagtcatgacccggggagagaaccaggagtcgcagaccgggaacgtctccgccgcatctgcggctgcgccgggaccgaagccggcatcggcgggggccgggaagggcgcggagggccagtcggtggtgcggcggctgcagtcggagctgatggcgctgatgatgggcggcgacccgggcgtgtcggcgttccccgagggggacaacatgctccactgggtgggcaccatcgcgggatccgccgggacggcctacgagggcacctcctaccgcctcgcgctggccttcaccgccgagtacccgtacaagccgcccaaggtgcggttcgacaccccctgcttccaccccaacgtcgacgtgcacggcaacatctgcctggacatcctccaggacaagtggtcctccgcctacgacgtgcgcaccatcctcctctccatccagagcctgctcggagagccgaacaacgactcgccgctcaacacgcaggcggcggcgctttgggcgaaccaggaagagttcaggaagatggtggagaagctctacaaggccgccgcgtagaggacagcacacggcgcagatgccgactcaggttcttcaagcaccgatctcacttggatcgattgacgtggatggttttgttgggttgggttcccagtctggtgctgtagcggtgtagcaggaacgcgtgggtagccttgagcctggcgattctgtaattgtcctttgagttctgaaatgttaagagattcatttttacatgactttttgttttttcatttttacactctggatatggacgggactagttgaatttaggaagatcgtatgatctcgaaaatgttcagtaactgcatcaacacaatgttcaaatgaccttcgtccttgttgccgactgggaaggaaaagccacctcgtttcctcttctaacggcgcagtgttgctcggatgatgtatcaaatggaccctatagccaaactacgaatggtgttttgaattgggattttttttataaagacaatcatttttttctaaatagacagccga

SEQ ID NO: 17943 - DNA, 4094 bp, Zea Mays
gcagtgtgtgtgcctgtgccatggtctcggtctgcgcgtcctcttcgtcgtttcacggctcgcgttaccgtcccagccaagccgccgcttctgcctcctcgccgtcgctgacgcccaatccattccccccggatcctcagaggccagccgcttcgattacgcgcctcgccttgcaaaccctagctcccccgccctctccctctcccatgggcccgaaaccctagtacctagtatccccccttcatgcgcgcctccgcggtccccatggaggcctccgcttccgcccgcagatccgccgcgggccccgacccccgcgccaagaagccgcgcctcgcgccgccgcctcgggaccccagatcttacgccgccaccgcctcctccaatggcaacacaagcgccgccgagcaagcgctggtcgacgagctgctcggccagtaccggaccgcgctcggggagctcaccttcaactccaagcccatcatcaccaacctcaccatcatcgccggcgagaaccttcaggccgccaagcccatagccgctctcatctgcgccaacatcctcgaggttccaagtgaacagaaactaccatcactatatctacttgacagtattgtaaaaaatattggaaaagattatgttaaacatttctcagcaagattaccagaggtgttctgcaaggcatataaacaagttgatccttctatacatcatagcatgaggcacctttttggaacatggaaaggagtgtttcctctacctccgctccaaatgattgagaaggaacttggttttcagtcatctgccaatggatcatctagtgctgcaccatcaaggactgattctcaatccccgcgcccatccaatagcatacatgtaaatccaaaatatttggaagcgagacaacaactcaatcaaccaactaaggggatacttggaagtggtgctaagacaactgtaattgctgatacaggcggtgatattgagaggcctaataggctaggtactgatagaaatgcggggagacgattagatgcttctaatgctagacctaacatacaacgcactcagagggacccttctagcaattctcttcatgaaaaacaggcagttagagatgtgggaggccttggattctccaacatttcgcagcaggctgttgtgggaactggtcaagttcgctcaaaacctaaagctcaagatggaattggggggccttattatgcctctggtgttgggtcttctgaagaacaatttgacagacgcagcaacttttatgcaagcaaggatgctcgaccatcaggatctgtacgtttggaaagtgcacttcttccaactccatcaatcaatgccgatagagttggtaagccttcatccaacaaaagctggaaacactctgaggaagaagaatatgtctgggatgatgtacattctaaagcagcagaatatggtggtagccataatgtaataaaaggagaatggatgtctgatgatggcaatgctaagtttgcaaacctccaaagggctaaatgggcagatgcaggacctgtggaacgtatagatcccaacacacataaacttgataacgtgtcaagatttggacttggagcaggtcaagaaagaagaatttcagaatacatggatcaggaagagtaccttcttggcaagcgtgaggtggaagcaagaattgataaggaaattaggtctgatggacaacagttcccagcagctcgaggttctcctctctgggtgtcccaggaaaaaacactcctagacattgggttggagcctaggatatcaaggttttcaactcagccagcagagaggtccaccatttatactggcaccatgtcagcaggtatcacttcatctgtacctgttgggttatcaggaaactatgctggaaggtcaagcctagatactgcaaatggtatgccaataagatcaactgaggcttttgggcagcagaagcatagatattggtcatcttcccctccacaagctgacacatcttcatctactgcaccctttgcacgtcagggttctccaaatcctgccgagtctgatttttatccttccagatcactttctcgccaaaatcctcaagaatatagcaaaagagcattgccggtacttgctaaagattctcatgttgtggttcacaatgatggatttactcagggccaacctagtctacaggcaacccggcagacacaaaagtaccctatcttacagtcgaagtcgcatattaagccatctgatcaattgcaggcaagtttttcgcgtgaaaattctccatcattgttcagaccttccatcgaacttggagaagtctctttacccagtgactccacccccataagctcagatctgacaagtgctagtaatttgttggctagtctcgtaaagagtgggttcaaaccaaataaccacagtgatgcacaggctcttggtccaagtggaccacttccagtggcttctttatcacttcaaaatgctgctggtgaaaataccactttgcaggcacatacaccaaacacttctcgtccaccattgccaccacctccatcaacacagagtgcggagaaagctgcgccgctctcaagtcttctcagttccctggttgcaaagggattaatctcttctccagcctatgattcatcgagtgctgtcatttcacagccaaataaagcatcaagcatgaatgttaaagatgccacagcttcagctgtgcctttgctagctctgagaccttcagttggtaaggcgtcatctaattctgattcatctgctccaacaaacgcttcattaaccaaagctatcgaaattaagatgagtgacctcattggcctggagttcaagccagagaaacttcgcaagtaccatgagcacgtgattagcagcctctttgacgacgaccaaagccatcagtgtaaaacatgtggcaataggttcaggcttgaagaactgagcttgcacacatcaagctgtgggcaaaggaagtctgagactatatatactggtatcgcacctaaaagatggtaccctagcaagaacatttacattgatggatcacatgaaattgaggacagcactgaggcttctgatggagatttaggttctgcagaagaagtgtgtgagtttatggtcccttcagacgagaggcaaattatctgtgcactatgtggggaaccatttgatgacatatattcttttgagaagggggactggatgtacaaggatgcagtgtttttggattaccccaagggagaaagcagctgcagaaacagtgttgagggtgaagagcatgtgcccattgtccatgtaagatgtatgccaagaggctcaaacgatggcatggaggttgactagaatgagtattgttcacagcagttatgctcttgaggggccttgaggtggatgagcctaaagctggggtttgcacgaggaactgtgcatcatcaggttgtctgttgcaattggactgatgacatacatgtaggatgattggtggaaggtggcaggcgttatcagaaacaaaactttggcgaagatctggaactgcccgtggatttctcagtgcccattacaaagtgcttacacaaagaataaagctttagaggaacaatttggccatgcaaatcagaattatcaaaatcttcatattttgggtctccatctgagaaggatctttatgttgatggaaagaaagctgtgcaggtgcatgtcaaaagaatgtatgatttctttacgagggaaaaggggtatggtaccccacatgtaactcggatactgctgttttttgacgatacatttctcgtcttttggagtaggaatttttgtgtagttaagaaactgataatagaacattatagaggtaggactaaacaagttagggtgtgtttggcgtttggctttaacttttgcccactaaaagccaaaagaaaaaacaaaggtatgaatttagaaagtagctttttctaaaagatgactttgtgcaaaactgaaaatatctttgaacttgcttttagtggatttctgatacaactgtaaaaatatatatggaagaatttttagtggcttttagttgtttctac

SEQ ID NO: 17944 - DNA, 1078 bp, Zea Mays
atttagattcatatttgactgaataaagaggttgatatattcagagatgctgcagtgcttatggtgaattatgtcgatgaaattcgagcacaaggttttaagttggagtacctgaatattggaggtggtttgggaatagattaccatcataccgatgcagtcttacctacacctatggatctcatcaacactgtacgagaattagttctctctcaagatcttactcttattattgaacctggaagatccttgattgctaatacttgctgcttcgtcaatagagtaactggtgttaaatctaatggtacaaagaatttcattgttgttgatggcagcatggcagaactcatcagacctagcctgtatggagcatatcagcatatcgaattggtctctccccccactcctggtgctgaagtagcgaccttcgatattgttgggccagtttgtgagtctgcagatttccttggaaaagatagggaacttccaacacctgatgaggtgcctactgcatgagcatggcttccacctacaacctgaagttgaggccgccagagtactgggttgaagaggatggttcgattgttaagatcaggcatgaagagaagctcgatgactacatgaagttctttgatggtcttcctgcttagatgtttatttgtgactgctaggggcgatgttttcttggagataattgaatttttctttgtcaagctcattttgctttcttgtggttgttatggaatgttactggatactggatagttagttcggcctgtaggcgtatcctcctgaacttacctctcattgctgttagttttggcaccaagtttgttcccaattgctatttacggaagttattgcataaagggctgtttggttgtaatcttcccgtaagaataagatgcatgtttttgagttagaggaccatgcctgagcgtgatttgtttgggactgaatgttttacctggtgacttgcctgcttgtgatccaaatctgtcacctgggctccggttattcccatcatccatggattagagtccatggattagagaggattggaaaaaaataagaaaga

SEQ ID NO: 17945 - DNA, 1173 bp, Zea Mays
ctgagctgctctgtttttgaacccaaggcttagaagaacaaacaacacatgttcatggtagtaaggaagctagcctaaaatctggttcaaaccttgcatgcaacactcatgatgggataaatgaccactctggcacactaaagttgcaatcagctgggcaaagcacattgcttgaagtggatgagtacagtgaactgggaaacctttcctcagaagtatcagcaatatatcttgctatgcagcagtctaagttggagtgcattgatgaacagagtcaagattctacctcaacagaaggttatggtgaagctgaggagactgaagagtatgatgattttgacccctactcctttatcaaagatttacctgatttatctatggtggtccccaagtttcgtcctgttctccttccaaagcagacccggagttgtcctacgatgactcttgtacttgatcttgatgttcattttaacttcagagagcacacaatatatgttcgatgccgcccctatctcaaggaattcttggatagggttgccagcgtgtttgagacaattattttcactgctagtcaaagcatttatgcggagcaacttctcaatgttcttgatcccaaaagaaagttgttccgtcatcgtgtttatcgtgaatcttgtgtctatgtggagggaaactacatgaaggatctgacagtacttggacgtgacttaactcgcgtaatgattgttgacaattctccgcaggcctttgggttccagttggacaatggcattcctatagaaagctggtttgatgatcccaatgacatggagctgctgaaattgctcccgttcttagaaagcttggtcggcgttgaagatgtcaggccttatatagcaaggaagttcaacctaagggagaaggtgccaaaggtcgccgtgatgataaatgtaggaccggagctgatatagtggttcttgttgaatgtagcatgtcaggatctcctggctccttgcattattgtatgctctaccgaccgcaatgtacaattttcgctgcagttggcagttgtagacttcacttgcattttgttggcccagttgacatgggaagggcctacttgaacattttgtcgatcagttaatatcgtgttgattcatatattgtctgcgacatgtgtgaaagtcgaccgag

SEQ ID NO: 17946 - DNA, 3180 bp, Zea Mays
gcacgagcatcgcggcggcggaggcgagggcacgcgcgggtatcgcgggagcggggcatggggaggcggagggagcgcgacggcagaaccgtgcactatagtcgaatatgaacgcctacgatacaaacataaggagtagtaaagataaagatgtagagagttttttccgatgacccatgccgcactcaccaaaaatatctgcgggccagcgcgcgtgcacattggacaagtggacaaccgaggtcaccgactagtgggccccacacgtcagcccctcgatccgcttcccatctgatgctcgtgctccgccgcgtctccttcctcctctcgtcgccctcccctcgcgcaccgctcgcaaaacctctcctgctcctacgcccgccccaaaccctagccccgacagcgcggcagctcgtggctatggccgcgtcagtcccgtcggcgggtggggcggggacgatgagccgcgacgcgttccgcgcggccgtgaccaacacgctggagcgccggctcttcttcgtgccctctttcaagatctacggcggcgtcgcggggctctacgactacggacccccaggttgcgctgtcaaagctaacgtcctcgcattctggcgccagcattttgtattggaggaagggatgcttgaggttgactgtccatgtgtgacgccagaagttgtcttgaaagcctctggacatgttgataaatttacagacttaatggttaaagatgaaaagacaggcaactgctaccgtgcggatcatttgctgaaggacttctgtaaggataagcttgagaaagatcacacattgtcaccagagatggcagaagaatacaatagagttcttgctatcctggatgatctcactgcagaacaattgggtgctaagattagggagtataagattgttgctccagacaccaagaactcattatcagatccatacccttttaatctcatgtttcaaacttccattggaccatcaggtttgagcccagggtatatgaggccagagacagctcagggtatatttgtgaacttcaaagacttgtattactacaatggcaataagctgccattcgctgcagcccaaattggtcaggccttcaggaatgagatatctccccgtcaaggccttttgagagtccgtgagtttactttagcggaaattgagcactttgtggacccagaggacaaatcccatccaaagtttggtgatgtttctgatctagagttctggatgtttccgagagaggatcaaatggcaggaaggtcagccacaagacttaaactcggaaattctatatctgagggaactgtgaacaatgagacccttggctacttcattggaagggtctaccttttcttgacacaacttgggattgacaaggatcgtctccgtttccgtcaacacctgccaaatgaaatggctcattatgctgctgattgttgggatgcagagattgaatgctcctatggttggattgagtgtgttggaattgctgataggtctgcctatgacttacgtgcccactcggataaaagcggcgagaaacttgaagcacatgagaagtttgctgaacccagagaagtggagaaattagttataacgccatcaaagaaggaacttggtcttgcattcaaagggaaccagaagttggttgttgagtcattggaagccatgaccgagaccgaggcactggacatgaaagccgcgttggaatccagaggggaagtcgagttcaaggtgtgtacccttgggaagaatgtcaccataaagaaaaacatggtttcaatcaacatcgagaagaaaaaggagcaccagaggaaatttactccttccgtcatagagccatcctttgggatcgggcgcatcatatactgcctttttgagcactgcttctaccaaaggcctggcaagaccgaggatgagcagctaaacgtgttcaggtttccccctctcgttgctccaataaagtgcaccgtctttccattggtcaagctcgagaaatttgaggctgttgccaagaagatctccaaggccctgacagcagctgggatttcacatatcatcgacatgacaggtaatacaataggaaaacggtacgcaaggacggatgagattggtgtccccctggcgatcacggttgatcacaccacgagcgtgacggtgcgcgatcgtgacagcaaggaccagatccgcgtggatgtggacgaggtggcctcggtggtgaaggaagtgacggacgggcagagcacctgggctgacatcatgtggaggtacccggctcacacggcctcggccgccgacgaggatggggcacagccctgaagaggcacagccacaacaccacccaacgatcgttggtctctgatagttccttcctgcgttccttaacagaaacagactgcattgttgtgtttctcttcgactgaaacacttgtcccaggaaaccaagatgctggcctagctgacctcccagcaactgtggctgctgtgaagaatcctaaccctaaggtggtttatgatgagtacaatcatgaaagatatcctcctggagatcccagcaagcgtgcatttgcttactttgtcctgagtggtgggaggttcatatatgcatcactgttgcgtctcctcgtattgaagtttgtcctgagcatgtcagcaagtaaggacgtgcttgcccttgcttcactcgaggtggacctctccagcattgagccagggaccacggtgactgtgaagtggcgtggaaagccagtcttcatcagacgccggacggacgacgacatcaagcttgccaacagtgtggatgtggcatccctgcgccacccagagcaggatgcagagcgtgtgaagaatcccgagtggctggtggtcattggcgtgtgcactcacctcggctgcatcccactaccgaacgccggagactttggcggctggttctgcccatgccatggttcccactacgacatatccgggaggatccgcaagggccctgcgccgttcaacctcgaggtcccgacctacagtttcttggaggagaacaaactgctcataggttaagagctcaaaagctacctgtctatttatctacttcactcaggaagaacattgattatacatctttctggcacattctcatgtcaagaataagcacccgctattatttttcgc

SEQ ID NO: 17947 - DNA, 3059 bp, Zea Mays
taagggtagacgataaatgatgcgacggtagataaagatctgaaaaaatatttgtgcgctctcttccaggtgggccctttctctccccttctcccctcaccggctcaccctctcccctcgacgatacatttcacctccccggatctatctcgccgcgtcggcgcgctggtcacccgacgaagctaggaggcagtcaaggcggacgaagcgctgcaccaaatttgacgggggatcgagcacaggaggcgtagtggaaaatgtttaagtttctcaaggaggtggtcgcgggatccggatcggggctcaaggacttcccctacaccattggtgagacatacgcatccgcctggggttcatggacacaccaccgcggtacctccaaggatgatgggtcacctgtgtcaattttttctctgtcagggagcaaccctcaggacagacacatggttgctggccgtaatggtgttaagagattacgaacggtgcggcatccaaatatcttatcctttttacacagtactgaagcagaagttgcggatggacctgccatcaaacacacgatttatattgtaacagagcctgttatgccactttctgaaaagctcaaggaactgaatcttggtggtacacagagagatgagtactttgcatgggggcttcatcagatatccaaagctgtgagctttctcaataatgattgcaaacttgttcatgggaatgtatgcttagccagtgttgttgttacacaaaccctggattggaagcttcatgccttcgatgttctgtcagaatttgatgctaacaatgaagcctctggtagccccatgctgcaatttgagtggttagttgggatgcaatacaagccaatggagctgtcaaagtcagattgggcttcaattagaaaatcacctccgtgggccattgattcttggggactggggtgtttaatatatgaactcttttctggtgcaaagctggctagaacagaggaccttcgaaatactgcttcaatcccaaagtctctacttccagattaccagaggctcttgaattccacacctactcgtagactaaatccttcaaaacttattgacaacagcgagtttttccagaataagttagtagagactatccagttcatggaaattcttaatttgaaagacacctttgagaaagacagctttttccggaagcttcccaatatagctgaacagcttccccgtgagatagtcctgaaaaagctgctccctgtcttggcttcttctcttgagtttggctcagctgctgctccagccttaactgttttgttaaagatgggttcctggcttcctacggaccaatttagtatcaaggtcttgccaactattgtcaagctttttgcctccaatgaccgagctatccgagcatgtcttttgcaccacatagatcagtttggggaatcaatgtctgctcaaactgttgatgaacaagtttttcctcatgtagcaactggattttccgatactgatggtactatccgtgaactgacattaaagtcaatgctcatattagcaccaaaactatctcagcgtacaatctcaggatctctcttgaaatatctctctaagctacaggtggatgaagaacctggaatcaggacgaacactacaattcttcttggcaatattgcaagctacatgaatgatgggactaggaagagagtactgatcaatgcattcacagttcgtgcactacgtgataccttccctccggccagagcagctggaatcatggcactgagtgtcactggttcatactacgaaatgacagagattgcaactcgcatcctgcctaacattgttgtcctcacatttgacccagatagtgatgtccggaccaaggctttccaggctactgatcagttcttgcaaatagcaaagcaacaccatgaaaagcttaatacgggagacaacagggtggctgaaagtactggtgttaagttaaagcctggaaatgcaggtttacttgggtgggccatgagttctgttacacaaaagggtaaaccttctgaccacgccccaatatctactgcaaatgctaataattctcaagcatcaacagctttgactgccgctccagagactcaggcttccacaccagcgtatgcacaatccacatccagctcccttgatcaagctgcaccagcatcagcaaggtcttcagaagatgggtggggtgagcttgaggatgacaatatccatgaggagaatagtgataaagatggatgggatgatgtagacccgtttgaggacaagccatcaccatctcttctatccaacatacaggctgcacagaaacgtccagtggcgcaaccaaagcaagctgttgcaaactcatctaaatccaacccactaaaagcgccaaaatcagaagacgatcctctatggggtcctatagctgctgcaccacccaaaagcgcagcaaaacctgcagacatcaagccatcaacatcacataacgatgaggatgacctgtggggttcaatagcggcacctcctccaaaatcatctggaaagcctttgaagccagctgcagcgaatagtgacgacctatggggtgccattgcagcacctccaccaggaaccaaagccaggcccttagcctcatcaggtaagggccgaggaacaaagcctgcgcaaccaaaacttggtgctcaaagaataggaagaacatcctcaactggaatgtgatggcttatgatatcaaatgttgtacaagagtgcgaagttttcctttttgtcccccatgctttgagtctgaccaggatgtcattctttgtaaactagcaaaaggtatcaatatatggacacaattttgacaaatgtattaatattgtttcaccattgtgtattaaaatagacacatacgtttttttttgtttttgtattttttgtacatcacagctgtttcgagtaaatattattaatatatttgcccctgccttattttggcttgattactttgacatttcctttttgttgggataaaacttgtcggtgtagcgctgtatagaacttaca

SEQ ID NO: 17948 - DNA, 3059 bp, Zea Mays
ccacaatctctctgtcccgggagtccgtcctttctgctctgtcgttactgaaacccagcgagcaccacttcccatctgctcgtgtcagtcagttcctcggctgtgccgtgagtggcggcggcagggagcggcgcagcgcagcgcagaagcagcggagtggcccaggcgatggcgccgagggaccccaaggaggacggcttcggcgtgggcggcgcggcggatccggaggccgacatcgaggccccgctgctggtttcctccggatcatcgttcctcctggacccggcgctcgaggacggcggcggcggcgacgaggagcagcgccgccgccgccgccggttcctccacggcagccacacgcactccaacaccacctcccaggtcgcgctcgtcggcgccgacgtctgccccatcgagagcctcgactacgagctgatcgagaacgacgtgttcaagcaggactggagggcgcggggacggggccacatcctgcgctacgtggcgctcaagtgggccctctgcttcctcgtcggtgccctcgcagccgccgccggcttcgtcgccaacctcggcgtcgagaatgtcgccggcgccaagttcgtcgtcacctccgacctcatgttggacggcagacacggctcggcgttcgcggtgttcctggcgtccaactttgcgctcaccatgttagccgcggtgctgacggtgtacgtggcgcctgcggctgccggatccggaatcccggaggtgaaggcctacttgaacggtgttgatgcccccaacatattctcactgaaaactctgatagtgaagattgtgggatgcattgcggcagtatcatcatcactgcatgtgggaaaagctgggccacttgtacacacaggcgcatgcattgcatcaatacttgggcaaggtgggtcacgtaaatatcgtatgacatgtaggtggctcaggtacttcaagaatgatagggatcggagggaccttgttacttgtggttctgctgctggtattgctgctgctttccgggcgccggttggtggagtcctttttgctctggaaacagtatcttcatggtggaggagtgctctactatggcgagcctttttcacaacagcaatggtcgctgttgtgcttagggcattgatagacttctgtcaaagtggcaagtgtggtttgtttgggaaaggtggccttataatgtttgatgtgacagcagattatgtcacctaccatttgattgatttacctccagtaatcactttaggggtttttggaggaatactggggagtttgtacaactttttcctggacaaggttctccgtctctacaaccttatcaacgagaaaggaaaagcttacaaactactactcgctgcaacagtcactgtttgtacatcatgttgtctatttggcttgccatggattgctgcttgcaaaccttgtccaactgacactagagaagcttgtccatcaataggccgttctggtaatttcaagaaattccaatgtgcaacagatgaatacaatgatttggctagcctattcttcaacacaaatgatgacactattagaaacctctacagtgctggcactgatgatgaattccacatttcgtccatccttgtgttctttattgcatcgtattttttgggcatcttcagctatggccttgctttaccatctggcctttttgtgccagttattttaactggtgcagcttacggccgtctggtaggcatgttgattgggtcacagtcaactttagatcatggtctttttgcagttctcggctctgctgctctgttaggtggatcaatgcggatgactgtttcagtttgtgttatcatcctagaactgactaataatctgcgtatgcttcctttggtaatgcttgtccttctcatatcaaaggtggtggcagatgcgttcaatgcaaacgtctatgatttgcttgttagattgaaagggtttccacaccttgaaggttatgctgaaccatacatgaggcaactgtcagtcagtgatgttgtaactggtcctctacagacattcaatggcatagagaaggtcggccatatagttcatgtcttaaagacaactggccacaacggtttccctgtggttgatgagccaccattttcagatacccctacattgtatggtctaattcttcgagaccacctgcttgttctattgaggaagaaggatttcatccgtagttgcacagcgtctacactgaatgctttaaaccatttctcacatgctgagtttgctaaacgtggatcaggaaaacatgacaggattgaggacattgaattatgtccagaagaactggaaatgtttgtagacttgcatccattcacaaacacatctccatatactgtccttgagactatgtctttggctaaggctcttatacttttccgtgaagttggattgagacatcttctggttctaccaaaatcttctaagagggcacctgttgtcggcatactaacaagacatgatttcatgcctgaacatatattgggccttcatcctttcctctttaagagtagatggaagaaggtgcgacttggcaaggtaaaagttaccaacatattttgaagcttgctggtgactggtgatttggggaggtcaccgaaggatcatccgaagctgtatacctggtgtcaaatcacgtattttgcagagaataactcaacttgaaaactagtggatcttacttcaagaaaataatttcgttgtaaatgctaagaaggggatggaacatggctgctaagtgctaacaagttattttcccacgaacaagaggaatctcactgtaaatttattatgcatactttagctaacctttgaaaacaaatgctatctgtagtgcctagatgcattccttattaggcccatcagtgcaaaagtaacttcagttccatcctccattcatataggctactcaaaatagctgctcatatcctgcatatggtgtgataaatacaatgtatttcctcagctttgttccatagcttctttttgcaatattcatgtgcttacattgtggt

SEQ ID NO: 17949 - DNA, 184 bp, Zea Mays
cacaggagaagaacatgtggttcaaaaggagccgcttaatgaggagttccattcgatctaggtggcgtctcccagttgactttctagcgccaaggatggattttagttcgatctatatttatattttgtaagacttccgctatgtaataagtactctaattatattgcgacatttatctctata

SEQ ID NO: 17950 - DNA, 3515 bp, Zea Mays
ctcgaaatggccgagggatcgccggccgccgctgggcgcataccattgctcttcgacggcgcagacggccgtgtctcacttgcccgtcggagaaacgaggagtgctccgctcgtattccgatttcaaggacttcagaaaaaattacttctacgggccattaccagcattcattggagaactaactgctctggaatcaatgaccgtgggcatcaatgcactatctggacctgtcccaaaggagcttggaaatcttaccaatctcttatcactggcattgggctcaaataattttaacggcacacttcctgatgagctggggaaactgacaaaacttcgacaaatatacattgatagtaacgacttcagtggttctctaccatcgacattgtcccagctgaagaacctgtcaatcttgtgggcatcagacaataatttcagtgggcagattcctgattatcttgggagtttgactaacttgacccaactgaggctccaagggaactcttttcaaggtcccattcccacaagtctttctaatcttgtcaacttaaaaaaattaaggataggcgatatagtgaatggaagctcttcgctgtcattcattggcaatttgacatctttgggtgaactagtgttgaggaacagcattatatctgatacactagcatcggtagacttctccaactttgtaaatttatacttattggacctgagtttcaacaatatcacaggacaaatacctcaatcaattttgaatcttacatctcttagttatttatttctagggaataatagcctttcgggaagtctgcctgccacaaaaagtcccttagtgaccaatatagatttttcatacaaccatatctcaggaaactttccttcttgggctactgacaaaaatttacaattgaatttggtagcaaacgactttgtgatggatagctccaataacagtgttttgccatggggattggagtgtcttcagcatagtactccctgtttcctcggttctccaaagtctgcgtcctttgcggtggactgtggtggtagtagagcaatatcaggttcagataattctgtctatcaagctgataatgccaaccttagtgctgcatcgtactatgttgcgggtgcacctacatgggccgttagcagcgttgggttattcttggacgcagatgcacccaatgcaagttacatcatctacagttcacgccagttcgagaacaccctagactctgcactgttccaaacagcaaggatgtcgccatcatccctgagatactatggcattggacttgagaatggaaattacacggtcacacttcaatttgcagaggttgactttccagacatgcagtcttggagaagctgagggaggagggttttcgatatctatgtccagggagagcgcaaggagcagaactttgacattagaaaggcagctggagggaaatctttcactgctgttaagaagcagtatgttgttccagtaaccaaaaacttccttgagattcatctcttctgggctggcaagggcacttgttgcattccttataagggatactatggtcctgcaatatcagccctgagtgcaactccaaatttcgttcctacagtccgtagttctgaagacagcaagagcagccataaaactggtgtgatcgctggggttgcagttggtgtttcagtttttgcattgatcgcactggccggaatcttcttgtggtgtcagaaaaggagaaagctattgttagagctagaagaattgtataccatagttggaaggccaaatgtcttcagttacagtgagcttaggtcagctacagagaacttttgttctagtaacctacttggtgaaggaggatatggatcagtttacaagggtaagttgagtgatggaaaagtggtggcagtgaagcagctctctcagtcctctaaccagggaaagatgcagtttgcggcagaaatcgaaaccatttcccgagtgcagcaccgtaacctcgtgaggttgtatggctgctgccttgagagcaaaacaccattgttggtctacgagtacctggagaatggaagcctcgatcatgctttgtttggaaaggggagcttgaatctagactggccaacacgattcgagatatgtttgggcgtagcaagaggtatagcttatctccacgaggagtcaaccatccgcattgtgcacagggacataaaggccagtaacgtgttgatcgacgccgatcttaacccgaagatctccgatttcggccttgccaagctctacgacgacaagaagactcacgtcatcacaaatgttgctggcacgtttggttatctcgcgcctgagtacgctatgagagggcatatgactgagaaggttgatgtgttcgcgtttggcgtggtcgcgctggagattgtcgctggtgaatcaaactatcagaatgctctggacgaaggcacgacctatatctttgaaagggtgtgggaactgtacgagaacgggcggccgctggagttcgtggacccgaagctgacggagtacgacgcgtacgaggtgctgcgggtgatccgcgtggcgctccactgcacccagggctcgccccacaagcggccgtccatgtcgagggtggtcgccatgctcaacggggacgccgacgcggccgaggacgttgcgaagccgagctacatcacggagtggcaggtgatggcggccgacgtcagcggcagcttcgcgagcagccacgtcgggtcgtcgtcgacgcagacgcagccaacgtcttcgtccggcggccacggcggcgcccaggcgagccctgagcccggggacctgacgcccgcggtcccgtcgccgctctacacctccatcatcgaggagggcaggtgacagctagcttgcctcggaatcgcgaatgcctggcagtggcatgcatgcttgcctcggaatcgcgaatgcgttgctgtgctctccagttttgtggctaatacaatactgatgtcgggtcgccatggttgatgttgttgtgaggaatttacttgaatgtgaggccgcaagcagcagatttgatttgggaggcacactgaaatggcagccgacgcagattttgggatggcgtgcgcgtccctgtcaagaatgggatggcgtgtgcgccggcgccaggcctgcctcgccttgcttgccggcggcagcgtgacacgtctggagggtggagaccccgacgaacgttccaagggatgtttctcctgaattcggcatgcatcacctggctggtagatggtcacgtctccccctcctatgatttaagtgtgtgaaacgtggtatatatatgcattagttgtgcaatgtgttgcagacatccacatacaagtcttcccacatattttgattttgttattatatactccctccgttataaatatagtagaaagtaaaacaaatttaaatttgagacagaaagtatgttttatttttcgttgaacgcttaaaataattaagcaccactttaattaagtcgga

SEQ ID NO: 17951 - DNA, 952 bp, Zea Mays
tataaattcatacatttctacggtttttatttatatttaaacataaaatataaatcataaaaacatacgcattatgttgactagatggtagatgtatgtttgaagccgataactatagtttaaatttctatttgtaataacttttagtttttttaccgtttaagcgacgacatgcgttcagaaagccatcgtccttacagacgagacacgagaggcaggagccagcgaccggcaacagttttctcggaaggcagcctcttcctcgtcgccgccgacgtcacccgccgcggctgtcggggatgccggtcagggtggtcgataccgccacgccttcctcgcagccctccccagggcaagaagcaaatactggacacccatctcctcctagatgttcactcttaagtgctggaagatcttttgctggaactcagaatgtttcaagtctgcagaaggatgaagcatggaaagtgaatgtccgcatccatggttgcgatcttgaacagggttatctatgtggaacgatggaagcgcttaatgttccattagcagatacacctgtagtgacattctgggagggggagatagtggatgctaaaaattacacctttttcactggcaagtgggaggcatcaccagaggatgatataagacattggtccaagttcccatcatttatgcctcttctgagtcagattgagacagacggtggcaagtctctggactttagcaactatccttacatatttatgagatggaaagaacagtattttgtcaatgttggagttgactgtgggttaaccatcgctggtttctactacgtctgcttttcttgtagcgatggctccatcagtggattttattatgatccaaatagcagtccatttcagaagctcgaattgaagtgtaccaacgagaaaagttctggattcaccttttcatcctatgagcttcg

SEQ ID NO: 17952 - DNA, 2630 bp, Zea Mays
ctgtgtaaacctatggacattttctggaattccaaggcgcctaacctttactatccctgaccttttctccgagcgttcattcaggaagctgcccggcgacgcgccgctcccccgcctcttccttgccgccgccgccgccgccgccgcagacgcgcggcacggggcggtgcccgtgcaaggcgatcggggccgtaacgctcgactgcccctccacctcctcatcctcaccccagcggtgagtagaacaaggggcggtggtcttcactgacatcgcccaccatgctgcgccggtgcatgcgggatctgcgctcgccgcggtctctcgcgagggtctccagaccgatctccgtcgagagtccaacattccttaaatccagaagcaactctacaaaggcatctccaaagagttcacagaatgctgccccaggtcctcaaggacaaccttctcagtcgggaagtaatgtttcaaagattgttcttggaactcttgtggttggtgcagcagctatgggtgcacatcaacttggttatatagatcttcaatttagggacaagaaatttccttttagcttaaagaaggaagatgtcgtaaaggtgtatgaagatctgaagattccttctgagcagaaggttgaccagacacaaaacgtgtcaggacagaacgccgagattgttcaagagaacaataatgaggctcatactccaaagggcgttctaaatgacgggatgggggcactagaggttccaatcaatgaggatcagcttgttcctgcagaagaaaagaaatcacaaaccctagcccatgagacacatccagttccagatgaacatggatctgatactaaaatgccatctgaagattctctagctgttgagatagagacagttcccatcgatgctaatgaatctagcgaagttcctcatgaacagcaaactgataggatagacagcacaattcctcctacacagtcaaccccaacaacagttagtacttatgatcaccccacagatccagatgcaccaaaggatctctcaggagctggtgctgttgagcagaaatctcttgctgagacatattttctgcaagatgaacctgatgtttcgaaagatgcaaccattaaggaaaaaagaagtgatgaagttattcgtgaaaaaacttctaaagatggtaagattgtacttgatatcattgaggctattcatgccgccgaaaagaagcaggcagatgtagatgcatacatgtattcagaagagagaagaaagttgaagtatgaaaaggagctgaaagacaccagggccagggaactgatgtatgcagaggaggcagcaattctggataaggagctaaagaaagagaaactgaagaatgctgctgcattaaaggaactgcaagaaaaagctgaacaaaaattgcaggatgagctgcagaggaaggatgaagaaacaagccaacaaattgagaaggcccaagagatagctaaagctgaacttgctgcagctgttgcaaaagagaaagcatcccagattgaacagattgctgaagcaaaccttaatattgatgcgctgtgtatggcattctatgcacgatctgaagaaactaggcagagtcattcagttcataagcttgctctgggcactcttgctttggaacacgctttatccagtggatcaccaatccgatcagaagtggagctattgcgtaaatctgttgaaggcatcgacaaagattcactgttagaactggctctttcatcactcccagaagatgttttagattatggatcagataccatgatggggttgaagcaaaagtttaactccttgaaggaaactatcagacacttcagccttctaccagcaggcggtggtggaatcctggcacatactgttgctcgagttgcttcttcaatcaagattaaaggcgataactctggagatggcattgagtctcttatcaacaaagtagaaaggttgattgtggatggagacttgattacagcggccgatgccttggagcaagggttacatggaactgaagcagaggagatagctaccgagtgggtgaagcaagccaggaaacgagcgatcgccgaacagacccttgctctccttcaggcgtgtgcttcttcgaccacgttctcatgattttggccagacttttttttttcttccttttgtttgcttggatttgccggtttcagtactctgtgaaaaagcttgtttttcccagaccatgttgaaaatgcgtggatggtgaacgagaaaaatcagatacaatactatagcagccagccagccactgggtctcaaagtgggggccctgcctaagtttttcatcgtgtaaacaaagctaataagttttgccctgtagctacttgctgttcgtgacattttagtgtccagttaaagcaatgtttttttaatgcaattgctgaaggattccttgcagatgtggtcatgtagcagttctacaaagggtcagtggacactgaataagtctagttacagcttgttttgttccacccagctcaactaaagtttagtttctgtcactgaatgttttaacgataattacgaatattgaatatagtctaattataaaattaattatacaaatgaaaactaaaaga

SEQ ID NO: 17953 - DNA, 142 bp, Zea Mays
ctaaagttgtaattggtatattgtataaaatatgcttagttataggttataagtgtttcatcctttttagcgtaaattatctatcttgtaatatttatactcgtgctcatacatatgcatcgtgcatctcatgaggtacgat

SEQ ID NO: 17954 - DNA, 4788 bp, Zea Mays
ctccttctcccgtccactcagcgtgcctgactgcccgtgcgcgccctcgctcagtcgctctcgcgcgcggcgacaactgagccaccgccgacggtccaactcttcgtcggaccctttgccggcgacgagcacccaccaggggtttcatggtagcgtgacctgtctcggcctagaaaatgtatataaagaaggtcgtaatcgaagggtttaagagctacaaggaggagatatcaacagagcccttcagtcccaaagttaacgtagttgttggtgcaaatggatctggcaaatcaaatttctttcatgctatacgatttgtcctgagtgacatgtttcagaacctgcgaagtgaagataggggtgcccttctccatgaaggtgctggacactcggttgtatctgcttttgttgagatagtgtttgacaattcagacaatcgtattccagttgataaagaagaggtacgcttgcgcaggacaattgcttcaaagaaggatgaatactacttggatgggaagcatgtcagtaaaactgaagtcatgaatctgctagagagtgctggtttctctcgttctaatccatactacgttgtgcagcaaggaaagattgcatcccttaccttgatgaaagattctgaacgactggatcttctcaaagagattggtggtacacgtgtttatgaggatagacggaaggagagcttgaaaataatgaccgaaacagccaacaaaaggaagcagattgatcaagttgtccactacttagaggaaagactgagagaactcgatgaagagaaagaagaactaaagaagtaccagcagctggacaaacagagaagatcacttgagtatactatattggaccatgagcttaatgacgcaaggaatgaattagcttcgatggatgataaccgaagaaaaatttctgaaagtatgtcccttgcggacaatgaagtggtggatgtccgagagatgatcaagagttttgataaagaaataaaagtctcaactaaagggataaatgataccaaggcgcaaaaggaaggtgttgagaagaggcgtactgaagctctgaaggtagttgctaagattgaacttgatttgagagatataaaagataggattgtgaatgagaagcgagcaaaggatgaggcagcgagggatttgcagagtgtgaggagagagagtgaaaagtcaaagtctgaattggctgaaattagtaaggtgcatcaggccaaactaaaggaagaggaggatatatcgaagagcattatggatcgtgagaagcggctaagtatattgtaccaaaagcagggaagggcgacccaattcgcaaacaaagctgctagagataagtggcttcaaaaggaaattgaagatctcaagcctgtacttttatcaaataaaaagcaggaaggtttacttcaagaagaaatccagaagcttaaagatgaaatcaatgatttaactaactacatcgagtctcggaaaagcgaatcaagtaagttagaggaaacacttgcgaaaagacataatgactataacgatttgaggaagcagagagatgtgcttcaagaagaaaggaagtcatattggaaggaggaatctgaggtgacagctgaacttgataggctacaagaagatcttataaaggcacagaaaagcttggaccaagcaactcctggggatatcaggagaggcctgaattctgttagcagaatcattaaggaccatggtattactggtgtttttggtcctgtattagaactggttgattgtgaagagaagttctttacagctgttgaggtcactgctgcaaatagcttgttccatgtggttgtcgagaatgatgacatatcaacaaagatcattcaaatattaactagagaaaaaggtggaagggtgacatttataccattgaacagagtgaaagttccagatctcagctgtccgcaaagtcctgattttgttccattgttgaaaaaattgaaatatcgatctgaccatcgtcgtgctttcgaacaggtttttggcaggacagtcatatgccgagatctggaaactgcgactaaagttgcacgtagcaatggtctagattgcatcacacttgatggtgatcaggtagggaaaaaaggtgctatgacaggaggcttctatgattctagacgctcaaaactaaagtttgtgaagataataagggataacaagacagcaattgatagaaagacgggtcatctagagagtgtcgtaaacaagctaaaagatatccttttttggtttaattataatttagttaccaaacagcagcaaatggatgctgaacgtgatcatgcgaagtcagagttggaacaatttaaggctgacattgccagggctatgaagcaaagggggtcacttgagaaagcccttgtcaagaaggaaaaatcacttaacaacatctgcaaccaaattgagcaagtccagtctagcattgcaatgaagaatgatgaaatgggcacagagcttattgatcagctaacttcagaagaaagagatctcctttcacgattgaatcctgaaattactgatttgaaggagagatttctaatgtgtaaaaacagtcggattgagatcgaagcacgaaaggaagaattggagaccaatttatcaacaaatcttatcaggcgtcagaaagagctagaagcgataatttcatctgcagattctagaaccttgcctttggaagctgaggcaaaggagcaagaactgaaaagttccaagagaaaccttgatgaactaacttcattattaaaggctaatgtcgatgccataaataatttcaccagaaagatggatgatctgaaaagaaaaagggatgatctgaaggctcgtgaagctattttagagcagactgtacaagatggtgccaaagacttagaacagttgatgaacagcaggaacacttatctagccaagcaagaagagtgcacgaagaagatccgagatttgggcttgttgcctgctgatgcttttgaagcgtacaagaggaaaaacaagaaacagctacataagatactctatgactgtaatgagcagttgaagcagtttagtcatgtgaaccaaaaggctcttgaccaatatgtgaacttcacagaacaacgcgaacaactgcagagaaggcgagctgaacttgatgccggtgatgtgaaaatcatggaactcatatcggttttagaccaaaggaaggatgaatccattgagcgcacatttaaaggggttgcaaggcacttccgtgaagtgttttctgagctggtgcaaggtggtcatggatatttggttatgatgaagaaaaaggatggggatgcagttgatgatgatgaggaggaggatggacctcgtgatccaggccctgatgggagaatagaaaagtatatcggtgtgaaagtcaaggtatcatttactggcaagggagaaactcagtctatgaaacaattgtcaggcggacagaagacggtggtcgcactaacactgattttcgctatccaacgatgtgacccagctccattttatctgttcgacgagatcgatgctgctctggatccacaataccgaacagcagttggaaatatgatccgccgtctagctgacatggctgacactcagttcattgcgaccacattccggccagagattgctaaagtggctgataagatatatgccgtgagacacaagaatagggtgagcaacatcgacgtggtgtccaaggaggaggccctggacttcatcgagcgtgatcagacgtacaatgctagctgaggctgctgctgctgctgctgctgctgtgtattgattgatctgcaggcagatgctaacgcagacaggatagttcttgttgtgttatggatattctggcctattgttgtagctgtgtatatgtgtgatgcagttaggtagctattggaccagcttgtttggcgcatcaacgttgtgaatgtagcagctaccaccttggtttggtaccagctttaattaagtttgggaagcgctgattagactagacgtacgttacatgttgccccatgattgttgtatggcacgcccagcccaaaatggcagtaatcagttcatttcgacaattaacgtaagtgtaagtgtacgagtagtggtattcaaatgttttttaactgtatttttctagtacatttattttttgtacccataaatcatgttacacgtagtttcattggagggagcataaacatgttcctttgacagaaagcctaataaggctataaaacaaaaattactacacgtagtttcagcaacgcaaacaaaaaaccccgtgcctgcctaatgaattggtcattaggcatgggcttctgcttctctataaggcgactacgagctcccagctgctcagtagctagggtacatgcccatccttcctatggtgctcctgcagccgaagttgacagagcctcgaggctttctgctgccatttgccttcgtggtggatttcgcaatcctcttttccttgcccgtgaacttatcactgtctcgagctctttctttcgaccgtgccacttttgtcattgacgagagagagctttaagtcagtaccaggtcatggcaaaatcaaatggaaactaaatagtatagcaggttatctgaacacaaacaactctatttggaagatctgtgaaactagagtcataataatctggggctgtaggcattaccttagctagcctctccttaagctttggccttgcagatactaccactcttgctggttgacggtccgcgtttt

SEQ ID NO: 17955 - DNA, 2514 bp, Zea Mays
gatggacacagaacacagatccatgagcagtgcccaacaggagaatcctagttgtggcagttggagacccttctgttgcagaaggatacctacatgaactacagtcaggcgctaagttacacaagccaagcactaagtcagaacctagcaggcttaaggaaaaagagtccaattcgcaagataagtaccacattgagttactatttggaggataattggaaacgcctatgggtgcttgcattatggattggaataatggctggactgttcacttggaagttcatgcagtatcgcaacaggtatgtctttaatgtgatgggctactgtgtgaccactgcaaaaggcgctgctgaaaccctgaagctgaacatggcaattatcctcctcccagtatgccgtaacaccattacttggttgagaaatacaagggctgcacgggcattgccatttgatgataatattaacttccacaagactattgcagcagcaatcgttgttggtataatcctccatgcagggaaccatcttgtgtgtgattttccacggcttataaattcatcaaatgagaaatatgctcctctgggccagtacttcggtgaaacaaagccaacatactttacattggtcaaaggagtggaaggcatcactggtgtaattatggttatctgtatgattattgctttcactttagctacacggtggttccgtcgtagcctggtgaagcttccaaaaccatttgacaaactgactggcttcaatgccttctggtactctcatcatttattcataattgtgtatttggctctcattgttcatggccagttcctttacctcattcatgtctggtaccgaaaaacgacatggatgtatctggcagtgcctgtttgcctgtatgtaggggagagggtgctgaggttcttcaggtctggcagttattctgtcaggctattgaaggtggccatatatcctggtaatgtgttgacactgcaaatgtccaagcctccggctttccgatacaagagtgggcaatatatgtttgttcaatgtccagcagtgtcaccctttgaatggcatccgttctcaattacttcagcgcctggggatgattatctaagcattcatgttcgacaacttggtgactggacacgagagctcaagagggtttttgcagcagcttgtgaacccccagtgggcggtaaaagtggccttcttagagcagacgagacaaccaagaaagccttaccaaaacttctgattgatggaccttatggttctcctgctcaggattacagcaagtatgatgttcttctacttgttggattagggattggtgcaactccttttatcagcatactgaaagatcttcttaacaatattataaggatggaggaagaggaggatgcttccactgatctttatcctccagttggtccgaacaagccgcacattgatctcagcacacttatgacggtcacatcaagaccaaagagggttctaaggaccacaaacgcttacttctattgggttacacgtgagcaaggttcttttgattggttcaagggagtcatgaatgaaattgctgaactggaccaaagggtgcatagtaccaattgaccacttgttttgtttgagttacattttctaattgtcagaattcatatgttcccttaagtgggttttacttacagttgcctttgctccattctagaatattattgagatgcacaactaccttacgagtgtttatgaggaaggagatgctcggtcagcgctcatcaccatgcttcaagctttgaaccatgcaaagaatggcgttgacattgtctctggaactaaagtccggacacactttgcaagaccaaattggaaaaaagtcctatctaaaattgcctcgaagcatccatttgctaagatagcatttttgtcttggtatgttcatctggagttctggacgaacatgagagcaaagtggagaagctaccatcaaatgcttaacagctgacggcctgcactctttgttaactgctcctaaatgaaccagaccaccaagaagtgggatttttgtgtacatatacatgtgatgtccaaacgtccatctgcagattggacccctcaactgtgaagagattcctcccaggtggtcaccaatgtacagagcacacatgaagataaagagtagttgggattgtcggtagcatgctattcgtataggacaggagggataccactagtcacaacacacaaggctatttaattgtatattttcatgcagctgatgccctgcactttctgctgctggccaatgcggcaaggacagaagcattttttctcatttgtaccgcatacagaaaaggcataacaaaaaagaggtgaaagggagaatagcattttagcacacttatgggtccctcgatttatttgaccctgcggtgctacgagcctacgaggaggagatgaagtagaataaaattgtcatttcattaaataaagcaaatgtttagaatattttaatat

SEQ ID NO: 17956 - DNA, 3350 bp, Zea Mays
acgacttgaaaacagtgttcatacctttcctcattgatgatggaggggaatatgtggctcaatgatactattggagttattcctaaaaattcttggtcaattgacccatttggttattcatctacaatggcttatttgcttaggagaatgggttttcataacatgttaatccaaagaacacactatgaggtgaaaaaggagcttgcaatgaaaaagaatcttgaatatttgtggaggcagaactgggatattgaagaaacaactgacatatttgttcacatgatgcccttctattcttatgatattccacacacgtgtggaccagaaccagcaatctgctgccagtttgactttgctcgaatgcgtggtttcagctatgaatcctgcccatggagatctgatcctgttgagataaatcctgacaatgtggaggagagagcaacaacgcttctagaccagtataggaaaaagtcaaccctgtacagaacgaatacacttctcattcctttgggcgatgattttcgatatgttagtatggaggaagcagaggtacaattccgcaattatgagaaactttttgattacataaactcaaatcctcatcttaatgctgaagtcaaatttggtaccctggaggattacttctccacattgagagatgaagctgaaaagataaactattcacggccaggtgaactgggttctgctgagctgcaaggttttccaacactttcaggagatttttttacctatgcagatagaaatcaggattactggagtggttactatgtatcaaggccattcttcaaagctgttgaccgtgtactcgaacagacgcttcgtgccgcagagattctgggttcatttgttctaggatactgtcagaagtttcagtgtgcgaagctccccatcagtttctcacacaaactgacagcagcaaggaggaatttggcgctttttcagcatcatgatggggtaactggcacagctaaagatcatgttgtggtggactacgggactcgaatgcacacttcactgcaagatctgcaattatttatgtccagggcagtcgaagtgcttttaggagatttccatgatagatctgaccctacattattatcacattttgagtccgtgcaggaacggtcaaagtatgatgttcagctggtacataaggttcttcaccctcttgaagggaaggcacagtcagttgtcttttttaaccctttagaacagacaagggatgagattgttatggttgttgtaagtagccccgatgtttctgttctcaattcaaatggatcttgtttgccaagtcaactttcccctgagtggcagtttgtcagcgatgaaaatatttcgactggtcgtcatcgcctttattggagagcttatgttcctccactaggtttggagacctactatgtggttactgggcaggattgtgaaaaggctattcctgctgcagtgaaaacatacacaactgaacaggaattttcttgccctcaaccatatgattgttcaaagctggaagccaaaacagtggaaatgaagaactccaattacactctttcttttgatacaagtcgtggtctcctccagacagtaactcgtcacaaggacgggcaacaaactgtgataggtgaagaaattggcatgtacaaaagccatggaagcggggcatacttatttaaaccagttggggatgctcgctcaattgtcgaggaaggaggacatttcatccttactgaagggccattggttcaagaagcccattctcttccaaagacagagtggcgtaagtcacctctctcacatagtacacgcatctacaattgtggggacgctatacaggacatgctgatcgagaaggaataccatgttgagcttgttggccatgcttttaatgatagggaattgattgtcagatacaagacagatattgacaaccaaaggatcttctattctgatctaaatggctttcagatgagtaagaggcagacatatgataagattcctctacagggaaattattacccaatgccatcacttgccttcttgcaggattcacatggtaatcgattttctgtacactccaagcaatcattgggcgcagcaagcttgaaaaatggatggctagagattatgttggatcgtaggttggttcaggatgatggccgtggtctggggcagggagtaatggacaacaagcccatgaatgttatatttcatctcctcacagaatccaatgtctcagctttgcctaaaacccatagtttgcatactcttcaaccttccatcctctcgcatcgtgttggggcgcacctgaactacccgatgcatgcttttatgagcaaaaaacctcatgaaaaatccttcaagcgggctcaacagtcatttgctccattaactgcttctttgccatgtgatatacatattgtgaacctgaaggtccctcggcccctaagatttcctcacaccgaatcagcagagccaaaatttgctgttctgttgcagaggagaggctgggacgcatcatactgcaaaaggggtggactgcagtgtacaacagttggggaagagccagtaaatctgttctacatgttcaaagatttgtcagctgtgaatgtgaaggcgacttcgctgaacctcttacacgatgacccagaaatgctaggttaccttgagcagaccggtgatgttgctcaggagggagacgttcttatctcaccaatggagattctggcatacaagttggacctacaaccaccatcatcgcaggaagagtagttttagtttgtgaaaacagtacatgcatattgaacagtcctacatgacagtgaagatggatcttcccgaaatacttgatagcggcagttagatagtactggaacagcaatgctgcaatgctgcatgtatacgtgtcattttcttggcatacagttagtgcttgaacctctagaatttgctggcagttgcagccttgtcatccacgaaggtacatacacttgttcttggtattatgctcaacagatcggaagatttggggcacattgaagcagagctaacttgattacggtaaaaatgtgtgttaacacaactgtgttgctccggccaacgataacttgtatcagagcaagttttgtataattctgttttgcttgcatcctttttgtagtgccatcatcctactgtcaaaaacctgagatagtttagatacatggttcttgctttcgagatctttatattgtatgtacacaattctgcttctatgcatgcggggattgctgggaatgcttcgcccgttttctttttcagggcattttcatgtgtcctggctacaaaagctc

SEQ ID NO: 17957 - DNA, 2086 bp, Zea Mays
tggcggtccaaaagtcacgtcaccgttggcgagatgaggtcatgctcatatatctccaatcattgctctttgtctatatatacacgcgtttaacacaaagagttaggcacagcgctgcacaccaccttatcatctctaatcggagatcaaagaagcacagccgttaacgatggcttccgacgagctggcaaaggtcgtcgagccgaggaaaaagggcaacgtcaaacatcggggtgatgagtggagcggcgatgtacatcaagaaggacctgaggatcacggacgtgcagctggagatcctgatagggatcctgagcctctactcgctcttcgggtccttcgccggcgcgcgcacgtccgacaggatcgggcgccgcctgaccgtggtcttcgccgccgtcatcttcttcgcggggtcgctgctcatgggcttcgccgtgaactacggcatgctcatggcgggccggttcgtggccggagtcggcgtgggctacgggggcatgatcgcgcccgtgtacacggccgagatctcgccggcggcgtcccggggcttcctgacgacctttccggaggtgttcatcaacatcggcatcctgctcggctacgtgtccaacttcgcgttcgcgcgcctcccgctccacctcggctggcgcgtcatgctcgccatcggcgcggtcccgtccgcgctgctggcgctgctggtgttctgcatgcccgagtcgcctcggtggctggtcctgaagggccgcctcgcggacgccagggtcgtgctggagaggacctcggccacgccagaggaggccgcggcgcggctggccgacatcaaggccgcggcggggattcccagggacctggacggggacgtggtcgccgtacccaacaaggggcgagacggcggcagtagtgagacgcaggtctggaagcagctcatcctgtccccgaccccggcggtgcggcgcatactgctgtcggccgtcgggctccacttcttccagcaggcctccggcagcgactccgtggtccagtacagcgcccgcctgttcaagagcgcggggatcaccgacgacaacaagctgctgggcgtgacctgcgcggtgggcgtgaccaagacgttcttcatcctggtggccacgttcctgctggaccgcgcggggcggcggccgctgctgctggccagcacgggcgggatgatcgtgtcgctcctcagcctcggcgcgggcctgaccgtggcggggcaccacccggacggcaaggtggcgtgggccgtggccctgtgcatcgcgtccaccctggcctacatcgccttcttctccatcgggctcggccccatcacgggcgtgtacacctcggagatattcccgctgcgggtgcgcgcgctgggcttcgccgtgggcgtggccagcaaccgcgtcaccagcgccgtcatctccatgaccttcctgtccctctcgaaaggcatcacaatcggcggcagcttcttcctctacgccggcatcgccgccgtcgcgtgggtcttcttcttcacgtgccttccggagacccgcggccggacgctggaggagatgggcaagctgttcggcatgccggacacggacgacatggctgaagcagaggacgctacagcaggcaaggagaaggtggcggaagtggaaatgtacatgccaagtaagatgtaaagcgcggctgcggctacagcgtcttcgtccccgggcagaggtcaactggaatagacggacaagatttttttttttttggagcaaatggtaaccagatgggcaggaataagattggcctatgaggtcggtgactcggtgccgtcgtccaaccgggattcttctgctcgttttctatctggaagtaccattccctgtcccgttcgacgtcgtttgcggatagtgcgatgtcgggagttagtggtgtcagagtcgcgcgtgtctgttctacaatgcagggctaatggacccagaataatcagtagcaactgcagaaaagtgccatgtgcttccacgttgtgttgtgcgttccaatttccagatgccatgctcaatgttccttttgggattactcaatggatttttagggctag

SEQ ID NO: 17958 - DNA, 1444 bp, Zea Mays
cagaattcgttcaggtttcagtgaactgttgaccaggatgcatctggaatagctgcacttgatgtgaaaaaactcaaagatgctggtctctgcacagtggaatctgtagcatactctccaaggaaagaccttttgcaaattaaagggattagtgaagccaaagtcgacaagataattgaagcagcttccaagttggttccactcggatttactagtgctagccaacttcatgcacagagacttgagatcatccagcttacaactggatctagagagcttgatcaaattttggacggtggaatagaaacaggatctatcacagagatgtatggtgaatttcgctccgggaagactcagttgtgccacactctctgtgtcacatgtcagctcccattggaccaaggtggtggtgaaggaaaggctttgtatattgatgcagagggtacattcaggcctcaaagaattctccagatagcagacaggtttggcttgaatggcgctgatgtactagagaatgtggcttatgccagagcatataacactgatcatcaatcaagacttttgctagaagcagcctccatgatggtagagaccaggtttgctctcatggttgtggatagtgctacagccctttacagaactgatttctctggtagaggggagctatcagcaaggcagatgcatctggcgaagtttcttaggagccttcaaaagttagcagatgagtttggagtggcagtggtaatcacgaaccaagtagtggctcaagtggatggtgctgcaatgtttgctgggccacagatcaagcccattggagggaacatcatggctcatgcttccacaactaggctctttcttcgcaagggaagaggggaggagcggatctgcaaagtaatcagctctccctgcctggctgaagctgaagcaaggtttcagatatcatctgagggtgtcactgatgtcaaggactgaaagcatcctcatttgcagtccacagcataacttgccaattcagacgaatctctgatctgctgcactcgtgtcggtcccttgtacaatcaaaataccagtacaggcttccagaatgcgaatgcaaatccgttggagtgtggcactgtcatcctgttgtctttaggtaccatctaaagttggcattgttgtaaagtggtagagcgcaaggctctactttgtagccgtggattcgagccctatggtgggcgttatttaatttttttggcgaaaaagcctttaattgagttgtttaggtgatatgaataactctttaggtcatggagttcgactccatgggagtttaagctgggttaaaaaaaattatggtcacgatctttttcacatgggctactgtaacatctcgtctactcctgaaccgatgttaagctttttaggactatagatcatcttcatatatcaacatgagtttttt

SEQ ID NO: 17959 - DNA, 1472 bp, Zea Mays
ctagttgctgagagatggagatcgtttggttgcatatcggcttcctaaagacaatgaagatgccccaattgtggtgttcagaaaccagcgtatggagtcatccctttccagttttgggcgtaagtcatggaagacttttggcactccactggtgtcaagccttcctgatacagtaactggaagtaatatttacaatcttttcctaaaggttatgactccattcagagtatcaagaggtgatgctgctgttgctgatcaaacacttggtgaaagcagtctggttgatgaaactgaagatatcaatatgagctctgatgcctcagagcacaccagcataaacaacaattctgtcgaggatgaaacagggactgaagatgtgatgcaatttttcctgactaatgagagaatcccagaccaacgcatgaagatagaaatggatctatccattacggtgaatgatccgcataagcgtctgcatgtggctgtgtgttgggaggacagtggactggaccaatacaactttagttctttgaattctcttccagaagtttacaaagcggtgctgttttctaggaggccacaggacacatgttctctatatgcatgtctggaagcttttattaaggaagaaccattaggcccagaagacatgtggtactgcccaggttgtaaagagcatcggcaagctagtaagaagttagacctctggagattacctgaaatccttattatacacctgaaaagattttcatacagtcggtataccaaaaacaagctggagacatttgtggacttcccgattcatgatcttgacctgtcgaagtatattggtcacagatgccaagacgttcctcacaattatcgactgtatgctactagcaaccactatggaagcttgggaggtggtcactatacggcttatgtttatcatgaagggaaaaagggttggtatgatttcgatgaccgtcatgtgggccccataaccgaggacagtataaagacatcggcagcttatgttcttttttaccggcggatacaggaggatagcttagatacagttacagacatagattctgatattccaacctgaggaggcggtggaggcaatttttgagcccaagtcccggacagtgtatagtttcattggtttagggggacagttgtgcggcaatgccgcaacggaagtgagaaatagaacaggtggggaagagtttgtgcggcaatgtggttcagaggggggagataatttgtcgcggttccttccgttgcaaattcctttgttttttttccgttcccttttagcacctgtaactgatagcggtaaaattttggctaatggcatgtggggaagatatttcgtcccagattctcaacacagttagggttagttttggaaccctatttttaaggaatttctatttttctaagagaaactagtttattttttcttggaaaaataggaaacctttcag

SEQ ID NO: 17960 - DNA, 1523 bp, Zea Mays
cagaggcttcatttgtgcctccgcccctttgtttccacgcttgcgcctcactctcgctaaacatgagcaaggggcttttgggttgaactgatcgctaatgcgctctactacaatcctgcgctgacccttgagattttaaataagctcggggttgcagctgacatttttaaccattggtttgctatgctacgacaagttaaaaaaagtggggcacgtgttaatttcaagagggagcatgataagaaagtttgctgcttgggcttgacctcccttattgcgcttccagctgctaagattccagcagatgctttggatcggatcttcaaagcaacacttgagctgcttgttgcttacaaggaccaagttgcagaagctaagaagcaaaatgaagaggctgctgatgatatggatggttttgatgctgatgaagaagatgatgacgaagttgactctgataaggagatgggtcttgatgatgaagacggggatgaagtaagcagtcttcagctgcagaaattagccgcagaggctagaggcttccaaccagccgatgacgatgactcagatgatgatttcagcgacgatgagctacactcaccaatagacgaggtggatcctttcattttctttgtagaaactgtccaaggtttgcaggcatctgatcctgccaggttccagaaccttatgcatacattggatttttcttatcaagcgcttgctagtggcattgcacaacatgccgagcaaagaaaaaatgaaattgagaaggagaaatctgagaaggcaaatgcacagtgacgtcataaagcatttctggttcccttcgattgttttgccattttgccggtatagcattggtggacggttaatttcctgcgatttgcaggccgcaggtaagagtttttgcagccttagccaaagtgtaggacaaattcaatcttgtgagatagcatcttggataacctgtcacctcgaccatgttcgtcgtggccagttgtagacgtcttggttgtgcaagaaagtttctctcgaggacagttgctcgttttgttagggccatcaatttttttgggcggcttgtaagttatttgagaatcccacctcaggttgaggggttgtattctcgagtcgtcaaagtttagtaccggtgcggtgtagattgtatatggtttcagttgtctagaacgttgtggcttcatggacgggctgtggtataagtttttattattttttaatttttttgtcaacaagacattgtaattggggtttgtttgtttggtaagagcaagaaaggtcggcactgttatttcttcggtatcattgtccacttgtttcgatattagcagtttacctaatcctatatccaaactccactcttccatattcaaactccactctgaacaatgtaatctatagtgcttttgagtaaactatgaaaagattgctgcagatggttttacaatgatggaaaatgggtattgggataagtggtattgggataagtatcataatgatattgcttg

SEQ ID NO: 17961 - DNA, 663 bp, Zea Mays
atcttgatctttaatgacagtggatgagggaattaactgcgagatagtccgatcagtgcttatggagcgtgcaaactgcccttatctagcagcacaaacagcgaccgaaatggaagcattttcgagaacagaaacatttcaaaaaatcgttgaagcgtattcaaggccaacaaggatcatccgtggaaaagaaattgagtctgctttggaggttgacccacacgtatttgagaaagatgaagagaaagttttgtggagcgcctacttggaggttgctgataagatccatcctggtgttgatattaagacctttgtggatgcttctcttatcctgatacaacccctagaagatttcttcaatagtgtcttcgtgatggcggaagacgagagagttcgcaacaaccggctaacgttgctgaggaagattgagagtttgcccaaggggattgcggacctgtcagttttacctgggttttaagctgcctattccagccagggggtgtgagcaatagccgtagcggagagatgattttgattttacaagtatttctgattaaaggaaaaaaaaacgtcgtcgcagtagggcacggcaatcccagtaaacgctgtacttgtaattctgattaatacagtcaacaaacggaatcatatctcaaatcttgt

SEQ ID NO: 17962 - DNA, 889 bp, Zea Mays
ccacttgtgagaattattttctatctgcagcaactgaggttgaattgaagcacgaatttaataaaacacacgagcacttaatacaaaacatagagaacatgctactataaaatcatggagaaaaaataaagttccatttgaaccacgatgtccagaggtacattagttacccggactgacaccagtataattataaacaccgtgtcagaattcaggtgctattcggcatttcaaaaaatctgctaaatcatacacctaaatcggacattgatacccagacacatgtggttccatgtccatgtatgtcaccccttgtagctccacagatggtcagtgactggtggtttagggccatccataaagatggcaaaaagttaaatatccccctttttttgctgcaccatggcctttcttcttcatctcataaattgaatggtcacataccgttgttcttccgaaacagatagatcacatggattacatgagcaaccattcacggtagggtgcagaattagtgacatcttacaacaaaacctaccaataaaaacaatacgaggaacatgatttgcaggaaaagaacatacaaccagacctccagatctacaacgaacgctacaccaccaggggatcccgatctcagaggttaaacattcgactgaaaagaaaagcgtacgagaggataatgggggcacgagagaaggctgtgtataccggcgcggggtgggaacgaggtgcgcgatccggggaaccggcggagctcggcgtgtccgtgcgcgaagctgcatgtgtcgcgggaacagccgccgcgctgccacagcgcgcacaacttcgtcttgtaatgccgtccgcaaccgcagcagccagcaggtgcacgcggcagttactttga

SEQ ID NO: 17963 - DNA, 1052 bp, Zea Mays
tttcagcccctccattttaggatactttatgtatgatggaatgaagcactattgcttagaaggcactcatattgtcaacctcttctcattctcaaaggcttatggaatgatggggtggcgtgtaggatacatcgcttttccaaacgaagtcgatggcttccacgaccagctcctcaaagtgcaggacaacatacccatctgcgcctccatcatcgggcagcgcctggcgctctactcgctggaggccggccccgagtggatcaaagaaagggtgagagacctggtgaaaaaccgcgcgctgctcgtggacgcgctgtccccgctcggtgacgacaacgtcaggggcgggcagggcgccatctacctgtgggcgaagctcccggacacctgctccgacgatttcgaggtcgtcaggtggctcgcgaacaggcacggcgtcgccgtgatccctggcagcgccagcggaggccccgggcacatccgcatctccttcggagggctcaaggaggaagacaccaggctggccgctgagaggctacggcgcggcttgcaggaactggtggctgatggaacggtacagtaacggctccattggtgtaggtaaaaagcacagcattgtagttttacacaacgactccgattttccaatggcataactccgccgggattgattcgagagaagaactggaccttgttatgaagactgcattgttcggacgagagctgggacagaataaaaggcatccggtctgcagtcatctttgttataaaatatgagtactacatattataatcagcagtaagtatttgtttctgtttggttttcagttatctatattactgatggcacccatttgtacagaatcaaaagcataagcaagaaagtcctgacgtacggagctgcctgttaggccgtttccaacagtggacctaaagtttacctcaaagcactttttacattgttctgcattgtactgtttatagagtggaatttgaatataagtacaaggataaataaactgctcgacctcttggtctcttctttattaagg

SEQ ID NO: 17964 - DNA, 571 bp, Zea Mays
tagctgagcctacggagtactgagaacagagcagcggaggatcatggcacaccttcaattcttgcggcgccagaagcagcggagcttgagccggcgcgctaggacattggcgatcgcgacggcagcggcggcagccgcggcggcgtcagcgacggggtcgagctggcctcccgtgacgacgcggctgccgatgaggcaggcgacgaggagaaggggcaggcaccagagcacgaagtcgagcaccgagtcgaggtcgacgtcccagtcccactcccacaccctcagcatggccattgggagtccgaagccggaggaggcaagcacggacggagctggactggacgagcgagcgaggacgctgagaagggagggaaaaaaagaggaaaggtgtggaacgagcgagcagctagagcggcggcagctggatcaaggtggagaatcgctgcggctggactgcggcggatatggatcggcgcaggccggcggaaaaaaaaggtggctggggttttgcgattgcagcagcggggagagacgtgtttgtaatcgatcgtgtggtctcgtggtcggctga

SEQ ID NO: 17965 - DNA, 2420 bp, Zea Mays
tcaggttatggatcaaaacggcagtataaagaagcatctgcacagcgggagtgaaccaactatgcagtcattttgaagcctatagagatgtgcccaagataacagaattgagagagaaattcaagaacatcaagaaaatcctcaaatctcatgtattttcagatttttcaagcttaggaactgggaaggaaacagaagattccatgctattgcagcagctatctgatgcttgtttggtggttgatgcattggaaccatctgtaagggaagaactagtgaagaacttttgcagcaaggaactcacctcatataggcagatctttgaaggagcagaacttgccaagttagacaagaccgaaagaagatatgcatggattaaacgtcgactaaggtcaaatgaagacacctggaaaatatttccaccttcctggcatgtcgactatctgctgtgtatccagttctgtaagattacaagggcccagcttgttgatatccttaataatctcaaagaaaaaccagatgttgcaactttgttattggcgttccagagaaccattgaatttgaggaagaattggcagagaaattcagtggtggaactacaaatgctagaaataaagagacaacaagtgatgatgaagatgagggtgggggacacaataaaattgtttcggacatacgaaagaaatatgagaagaaattggctgcacccagtgatgaggacaaagataagcagaaagatttgtcagttcctggtgctgggttcaactttcatgggatcatatcttcttgttttgaaccatatatgactgtatacattgaacttgaggagaaatctttagtggatcaattagaaaaacttgtccaggaagaaagatgggaaatcgaggaaggaagtcagacgaacattctatcaagcagcatgcaggttttcttggtgattagaaaaagcttaaagaggtgcagcgcattaacaaagaaccaaacattgttcaacttatttcaggtatttcaaagaatactcaaggcctatgcggctaagttatatgccagattaccaaaaggtggaactggtattgttgcagctgccactggcactgatggacagatcaggacctcagacagggacgagagaatgatatgctacattgtcaacactgctgaatattgtcatcagacatcaggtgagctagctgagaatgttgctaagatgattaaccctcagtttgctgacaaggtggacatgtctgaagttcaggatgaattctcagccgtgatcacaaaagcactaatgactcttgttcacggacttgaaaccaaatttgatgctgaaatggttgcaatgactcgcgttccatgggctacccttgaaagcgttggtgatcaatcagaatatgtgaatggtatcagctctattctgtcaagcagtattcctgtgcttggtaccctgctttcacctacctacttccagtatttcctggacaaacttgcagcatctcttgggcctcggttttatctcaacatatacaagtgcaaacatatatcagaaactggtgcacagcagatgcttttggacacccaagcagtaaagactattctcctagacatcccagctcttggaaaacagagtacaggtgcagctagctactcgaaatttgtcagccgagaaatgggtaaagccgaagctctacttaaggtcattttgtcgccagttgattctgtcgctaacacataccgtgccctccttcccgaaggcacgcctcttgagtttcagcggatacttgacctcaagggcttgaagaaagcagaccaacaagctatcctggaggacttcaacaaacacgcccctgcaccagcccccgccatcaaacaccctgccgttgctccgacggtggcgacaccagttgccacagcatctgtccagattgtgccctcggtggcaactccagctgtttcgattacaccaagcatggcctccttgaagggagcactggcgaaccaagaggacgtcctcgcccgagctgccgcccttgggcgcggagcagccaccacgggcttcaagaggttccttgcattgacagaggccgccaaagatcgcaaggatgggccgttccgcaagctcttcaacgcctaaaatgtcgctcaccgttgtgttcatagttcgtgcccctcgtgcagtgaacatagatataggaaatcctttccacatcgtgtacacaccattaccgttaaccgacagtctataacaaccattttgacagattatcctatcccatcctgcggagaacgattagctcagttgtagcatagagattttgagacagtttgagctattagataagtttttccccctggttttgtgcatgcaaacccaagattctatactcgtgattgaataatcgtttctctccttttttttttc

SEQ ID NO: 17966 - DNA, 1180 bp, Zea Mays
gttggacactggccccatctattaatgttccaattgtgaaactgaaaaagagaaaagtgaagaatatgtgatgaagggctttcctgcaatttacatgatagactgcacatcaaatgaatgccaccatttactaaaatctgcaggcatggaagaactttatccggcattgttactcttccctgcggagaacaaaagtgcaatagcatatgaagggggaatgtcagtgtctcacttaatcgaatttttggagtctcatgtgagcaattctcgctatctattggaatataaaggatttatgtggaagaagagaatgacaccacagcacgatgcaccacaggcaattcagtttaaagtcagtgataaaggtagcggcaatgttggttctgagttaccaagtcatccaggtgtcgttacaggatccatccttactgccactaagaagctcgggaccgcagttccatttgataatgccaaggtgctcattgtgtcagctgattctcatgaaggatttcatggcttgatcatcaacaagcgattaagctggggtgtcttcaaggatctggatagctcgatggagcctattaagcatgcaccacttttctatggtgggcctgttgtggtgcagggttatcatcttgtaagcttgtcaagagtatcctcggaggggtacatgcaagtcataccaggcgtctattatggcaacatagttgccacaagccgggtagtcacacggatcaagttgggcgagcaatctgtcaatggcctgtggttcttcctaggctactcggggtggggatacaaccaactttttgatgagctaactgaaggagcatggcttgtgagtgtgaagccgattgagcatttggactggccgaagagttgaaagggttctgtggacctcacgcctcagctgtttctttaggaaaattcagttcatcttgcacatatctgccactctgcccacactgcaccgtgacattgtactgagcttttttttggaacatagcagcactgtgttttcataccattcacaccgtactatggtcacatattttttatacatagtacttttcttatagtgaagaacgttttctgtgttcttccttttgatttcattttttgttcgagattttgggcctgtttggttggcacggctccggctccttaaaaaataactccg

SEQ ID NO: 17967 - DNA, 1688 bp, Zea Mays
gctaagatatattggttgaaaatgtgggtatccagaaactcctcctgaacagtatcaatattggggacgagggtgccaaggcactttcgaacatgctgaaaaagaataaatcaatacgtattctacagttcagcaataatgcaattgaatacagtggttttgcaagtattgcagaagcccttttagagaataatacgatacggagcttgtatctcaatggcaactatggtggtccccttggtgcatgcagcctagctcaaggaattctagggaataagtctttaagggtactacttaagacacttggttatatacttccagtcttccacatagttttaatgtttttttttttgtaaaattttaaatgtttgaaagtgaagcagattgaattccatctttgcttatgcatcaagttatggagaagtgtctgtttcagctttctgaaggggtagtagtattttgaaactttcaggaaattcacttgcatggtaatgggattgggaatgagggaatacgtgagttgatgtctgcattatctgctcacaaagggaagatcacagttgtggatattggcaacaacaacattagcccggaaggtttacatcctgtagccgagttcctcaaaaggacaaagtccttacagtggttcagtctctacatgaacgatattagtgatgagggagctgaaaaggttgctgaggctctgaaagataacaaaacaatttctaccatagacttgggtggcaataacattcactccaaagctgttagtgcagtagcggaaactttgaaggataatgcagtgctgacaacactggatttgagctacaatccaattggatcagacggagtaaaggctttgtgcgatgtcctcaagttccatgggaagatccaaacccttaagctcggctggtgccagataggcatggaaggtgcagagtgtattgccgactgtctcaagtacaacacaacgttatcgacattggatctgcgggcaaacgggcttggaaacgatggtgctatatgcttggcgcgaagtttcaagataatcaacgaatcgttgacgtcccttgacctgggtttcaatgagattcgagacgacggagcattcgcattggcacaggcgctcaaggctaacgaggatctggcggtcacgtcattaaatctcgcaaacaacttcttcacgaaattcggacaggtcgctctttctgaggcgcgggaccatgtgtacgagatgaccgaacgggagatagacatttatttttaggggggtaccggttcccctgtgcacacagttagcacaggacatgaccgatgcttgtttgtcgagtaggttgaagaataaggtcgcgcggtagagcgatggtttatcctttgtataggaaaattttggtgggttagttaaatatttttagttactatgtaggttagccattcgatcaggtgtctatatgcaagttttgctggaaacgtcggtgtcgttttgaaccattcgtattattggttgaaaatggaatggatatgacgggcatcacatgcaaactgattcttttttgtggaggacttcactgatgtggtggtgtgtgttcctcggaagttgaaatgtattctcatgccatccatgtgggatggtgttggtaacctcagacctgtcgtaggctgttgtgaatgtcacacaaagatttcgc

SEQ ID NO: 17968 - DNA, 634 bp, Zea Mays
atgacatccatgaataggaacattgcagcatttggtgctggaactgggcgcctatccactgatcagaagaaaaagcttctttggggtaacaaaaagggtaatccttcggaggagacaagtaaacgttgggacttgttttctgatcgtgagcgccaagagaaatttaacaaactcatgggtgtgaagagcagtgccccggttcaggaaaacatggtcgcgagcaaggccgcgagctcagcggaagaagccaagaaactggaggagctcgacaccaacctggagaagcattacatagcaggcctccgcaggaaagatggcaggacagtcggccttggcctctagaaactctgcttgcagatgatgcagcgttaaaaagttcagatagcttgctctgtacaatctacagtatcgtttttattcttgcacttacaaattttcctggctggtttatgttaactgtgttgccgggttatcttgaagctgtaaaacatctatgcctgattgactcctgtattgcgttggcataacccgtcatctggggtagtaatttgcaggctatttgctctttgcgcccaaagttgtttggtttgaagctgaattatgcctaccaagaaaattggttacgactaacgca

SEQ ID NO: 17969 - DNA, 2361 bp, Zea Mays
cctcctccctttctgctgcccagccgccgtccgtccgcgcttcactatccttcattccctcccctgtcagcgacgactgggtaggctaccgccgccgccctacgctaggtgcccatctcttcgccggcgaagagcgcccaccaagctccggccaagggcgtgatggcggctgtaggcagcttgaagccggggatggagactcttcatgtgcaggactacaaggacgcgcctccggccaaggccgcggtagagagcctccagccggcgatggagagtctgcatgtgcaggactacaaggacggtaacatgtattatggtgcttacccggcttatgcctatggagcctatggtggctggggggagtacccatacctgagccatgatggagcacagacaccaactgctatttatgggtctcagaattaccagtacccgtcgacatacaccaagcaacagaactctactgccaagctgtcatccaatggtataagtgagaaattgactccagcgccgcaaacggatgtatctactattggtgtggatgaggtgaaaggtttgaaaaattcaaattcggtgctgaagacagaccggaacatgccaggttccaatggttcatatggccggtctagtgtgcgttctggcagctatcagaaccagactagttggtcacactatccatattatagtagtgagatgttctctgacaagcagcaaaagttcaccggcaaccacaattcgacttccaaccctaaaaccaaggggcagtcgaggaatcaaaacacgaggcagtatcctcatctcatgggtttgcaaacaccaacttcatcagtgtactcagctaatggaatttatgggtatgatgggagctatggacccggcctttggtatggatcgcacatgtataattctggattatatggtggatggaattcactgtatgatggaaagtacagaaccagaggaagaggtaacaatgggtattatgtttatggtaatggaagcatagatggctttaatgagctgaaaagagggccaagaagtggtatgtacaaaaaccagctggggcttgaagctactacccaagcaccagcaaaagagcaggatcttttgtttgctaatggttcacatcctgccatgaaggatcagtataatcaggctgactttgcggaaacatactcagacgctaaattcttcattattaaatcttacagtgaagatgatgttcacaagagcgttaagtacaatgtgtgggctagcactcccaatggtaataagaaacttgatgctgcctatcaagaggctaaagaaaaatcaagcgaaactcctgtttttcttcttttctctgtgaatgcaagtggccagtttgtcggccttgctgaaatggtgggtcgtgttgattttgaaaaaacagtagagcattggcaacaggacaaatggactggttgtttccctgtcaagtggcacattgtgaaggatgttccaaacagcttgctgaagcacatcattcttgagaacaatgaaaacaagccagtgacgaacagcagagatacacatgaggtgaagcttgagcaaggccttcaagtgcttaagattttcaaggatcatgtctgcaagacatccatactggatgacttcggcttttatgataatcgtgagaagatgatgcaagagaggaaagccaaacagcagcagtcgctgaaaaaggtcattgatgtgaagctgcccagcgtcaccgacatggagagaagtcctaaaggggagactggatcaacagaactcactggggttgggactgacgtcttgaacaaagagcgtttattaggcaaagcaggagagaaaaatggcgagaaaggaaatgatgtcgccccacaggacctgaaaacacaaactgagaagttggcgggtctaaatggctgttaatatttttcgttagctcaagccgttgacagtggtgtcggggtggaacctaaggctgtggtgggttgtttgaggaaattctgatgtcccattgagcttgtttcctatagttcataggagctagaggcttagctagttgcttgtgtttggtggtagtcatggtctgtgttctggcgtgtcaggtattttaggaatagaaggatgattaactgggttttgcaatgatggatcatgggttttgaggctgtatttttcgtttatttgcctttcctctctggattctagttcctctctctctctctctctagattctggacaagtgtagtgcttattttaagttggttggtttaagaacctgaaatgaacatgggaattctatcaagcatttacaaacttactttcctctgtacaatatgtgaaaaccgtctacttccatactttctg

SEQ ID NO: 17970 - DNA, 2427 bp, Zea Mays
ggaggattcccgtggtaatcgctgttttccacttgcctggcaaaagaacatttgacttggaagagcaaacactggaagctttgtggtttgtcctaagtgatcctatcaagttctcataggctgcatactggtacagcattttctcctgtgttttgggccacagaagaggggggagccaaggatttttctatctcgtaagccgcggccttggtgctcatagttaccctagtctgtaagctggagattgtaaaaagccatatctgttcctctatcactgtatatagagatctacataatggacgagaggaggactattttgatggaccgttacgaaatcgggaggcagttaggccaaggaaacttcgccaaggtatactttgctcggaacctgaccgacgggcagtccgttgcgataaagatgatcgataaggacaagatcacgagggttgggctaatagtgcagataaagagggagatctctataatgaggctggtgaagcatccgaatgtcctgcagctcttcgaggtaatggctagcaagagcaagatctacttcgtattggagtacgctaaaggcggcgagctgttcaacaaagtatcaaaggcgaagctcagcgaggatgccgcgaggaggtatttccaccagctggttaatgccgtggactactgccacagccgaggcgtctaccatcgcgacttgaagccggaaaacctactcctggacgagaacgagaaccttagagtctcggacttcggtctgagcgccctgtctgaatccagaaggcacgacggcctcctacataccacgtgtggaacccctgcctatgttgctcctgaagtgcttggtaggagaggctacgatggcaccaaggcggacatatggtcctgcggagtgattctcttcgtgctcgtggctggttacctgccgttccacgacccgaatctcatcgagatgtacaggaagatctccagagctgaatacagatgccctcgctccttctccggtgagctgaaggacctgcttttcagaatgctcgatccagatcccagtaccaggatatccatttcaaggatcaagagaagcacttggtacagaaaacctatcgaggcaaacgcggcaaagatcaagcacggcacagcaagagacaccaccgtgcgcgacggtgaagccgccacggcctcgagctcgatagagtgcagtaaccggccagaggaagaccaagggtcgtcaagcctccctaacctgaacgcattcgacatcatttctctctcgaccgggtttgacctatctaacctgttcgaagaaagacacgggcggagggaggagaggttcaccaccaggcagccagtgggagcggtgtttggtaggctgaaggagctggctgagcggttgaagctgaaaatccagaagaaggagagcggggtcttgaaactggctgcgcagaaggaagggatgaaggggttcctggagctcgacgccgaggttttcgagcttgccccttcgttccttctggtcgagctgaagaaggccagcggtgacaccattgagtaccaaaggctcgtgagggaagaagtgcggcctgcgctgaaggatatggtctgggcttggcagagcgaccggcaccagcagcagcagcagcggtgcgagcagtctgtgcaaggagaggaccagcagcagccgttgtcgtctttgccgacgcagcagtagtcactgcaccaccagttgcgaccgccataaccagatcacgtcaaaactgcaccaagccgcacaggactagtaactcccacttgcatcgacgcttatgtgattgcggaattgtgtttcaggttacctgcctgctgcggtaggacctaaaacgcctacctgcctaccatttggcatttttttgtatactgtacgtacattagagtaataaacaaacatgcttaacttttcagctttcgattggaatgtgcttttcgatgtaactctgtaaccagtgtaggtacgaagtcgattagccacagggtctggccatgttgacctcacgtagccctggttcattggtgtaacagtttgttggctgcggctttacattattttgtctctatggattacggctgcgactatgtgtagctgaacaagctggtatatgatgagccctggaaacgtgtgtttactgcagctatttgcagccagtgactgttgatacaaacgacgaagtagagttggttgtttatgtaggcacgcagcatgaccataattatccatgaatcatggatagatgcacaatgtttaggaaacaggtgtgtgtggctggctggtggtgcgagaagagatgcgctgccttgatgtactgtactgggactgggagggatgcgtctcgcagtacagtctgtactatcatctctacacgcacgcacgcaggctcgacgtgtcggcggcgg

SEQ ID NO: 17971 - DNA, 873 bp, Zea Mays
ctcacaacacaattagtaagttttggtatctagatgtacattttaagtttggggacgtaggtgacactccaaggtacaagaatatgtcgaagctgcaacactctgtagattttgcaagactggcactctattaagccttgctgaaatcaatgattctttactagcactaagtggtcaatctgttgagcccttacagttaaatgtgcttgactatcttttaggggttgctgatttgtccggagagcttatgaggctcgcaataggccgtatatctgatggggaagttgaatatgcaaaaactatctgtgcttttgtgcgggatatttacagggagctgacccttgtggtgcctttaatggatgacaatagtgagatgaagaagaaaatggaggtcatgctgcaaagtgtagtaaaaattgagaatgcttgcttcagtgttcatgtgagaggttcagagtacattcctctgctagaatcatcagcagatccaggctattcttattttggtgccccggactttgatcaatgaatgttttgaagcaagaactaactgagtgttaaaggagcttagatcaatttaaggagagcggttgtgtcaaggctactcttaggtccacagttgggtgtttgattttatcgccagtttatgttgcacatcttgaagtctgtaaatctaagccccaacgtggtaatccgggagaatcatgttgcaatacaacctttttatggtgcagacttgtaatactcaaattgtaagggagaattaaaggaggaattgtctcctttgaatgtgtgtgtgcatctccatttatcatcacatgtgactgaccatgtttaaaaaaatgagtaaatccttaataagaaacaattaaa

SEQ ID NO: 17972 - DNA, 2270 bp, Zea Mays
atcccttccctcctccagagtccagaccccactcttcccgcccgcgcacgcgcagttggtgcgtcatgtccgtggctgcctgcctctgcctgccttccttcctccttggcctgctggcctagcttccccttcaccccaaaggcaccaaccagtggtggtggtggtggtggtggcagcagcagcagccccagccggcaggaggaggacctgcgcatcatcgggagcccgggaatctagagggtgagagtgggcgaggaacgaaaagccgcggcagatagagagacttgctctggacaaaagcgagagcgactgccgcgggagcaggaggaggagagaggccgggaccatcgcttggtgcctccttcaagttcttggggggctgactgcgatcatgagctctcggcgagtgaggagcagctagtagggccctgacgagcctccgacagcgctgaggcccagagagagccgcgctgcccctggggtcggtcgtcgagagagaaagagagatagagagaggggaacagagagtgattgggaaagagatcgatgaagatgagcttcaacaagagcagcggcagcaggggctgggggcagggagcggctgcaggaggaggaggagacgagctggtgctgcgaggctccatctccaagaagtggaccttcctcctctgcttcggcagcttctgcatcggcctgctcttcaccaacaggatgtggacggtgccggagccgaaggagatcatcagaaggtcgacgttggaggtggagaagatgagccttgtcgacggcgactgcgctccgaaaagcgccggcgatgcaagagacgttcccggagaggttccaagaactcaagatgtcatccagacgctggacaggacgatctcgaacctggagatggagctagcgtccgcgaaggcgacgcaggagtccatgctccacggcgccgccggcgccccggtgcccgagcccacggggaagcggaagcacttcatggtcgtcggcgtaaacaccgcgttcagcagccggaagaggagagactcggtccgcgcgacatggatgcctcaaggcgagaagaggaggacgatggaggaagagaagggcatcgtcattcggttcgtcatcggccacagcgcgactcccggcggcatacttgaccgagcgatcgacgcggaggacaggaagcacggggacttcatgaggctggaccacgtggaagggtacctggagctggcggcgaagaccaaggcgtacttcgtggcggccgtgtccacgtgggacgcggagtactacgtcaaggtagacgacgacgtgcatgtgaacatagcgactcttggaaacacgctggcgaggcaccgctccaagccgcgagcttacgttggctgcatgaaatctggccccgtgctagcccagaagggcgtgaggtaccacgagcctgagtactggaaattcggcgagtgggggaacaggtacttccgccacgcctccggtcagctgtacgccatctccaaggacctggcctcctacatagcactcaaccagcatgtcctgcacaaatacgctaacgaagacgtgtccctgggatcctggttcatcggactggacgtcgagcacgtcgacgaccgccgcctttgctgcggcacgccaccagattgcgagtggaaggcgcaggcggggaacgcgtgcgtcgcctccttcgactggagctgcagcggcatctgcaaatccgctgaccggatcaaggaggtccatcagcgctgcggcgagagcgagaacgcgatttggaatgcagagttttaggccccagataaatcgcacgcttttttacaaggaaagcacgtacatacatacgtacgtatacaaggggacaacaaaaaaaacagggctcaacagtgtgtgcctggctgccaccgaaggctcactctgctttgcaagtgcaggaccagactgaagggcttcagatcgagaggggcaatgtacacccaagtgtacatgcgttatggtagacacaaggggtgtatgttttttttttggggggggagggggggtgtttttggattaggaattggattattgtaaggggattttttctttttctattttggtgctcgaaaagatcccacgttttttttactgatataaagacaagctaggagaggatcatgatgaggaagagagagagtgaaaggagtgggagactgggcatctccccccaccattcttggcgagatcctcatcgatgttactgtgaaattgaattctcagctattttg

SEQ ID NO: 17973 - DNA, 1157 bp, Zea Mays
accgatcggacaggatacttgttggttcggtcggttgtgtagggcttttgagggtcggtgacgagggagtgacccttcttgcttcggaggtcgagggctccccgatcaggttcgcggacgcggcgatcgaggcatccgacggcacggtctacttcagtgacgccagcaccaggttcggcttcgaccggtggttccacgacttcctagagttcagctccaccggccgcctgctccggtacgacccgcgcagcggcgagacgtccgtcgtgctcgaccgactcggcttcgccaacggcgttgcgctgccgagggacgaggccttcgtcgtcgtctgcgagaccatgaggttcaggtgcatcaaagtgtggctgaaaggggataaggccggcgaggcagagacgttcgtcgaccttccggggtggccggacaacatccgcctcgggtcagacggtcacttctggattgccgtcctccagctgaggtcgccatggctggacttcatcacccgctggaccttcacgaagagagtggtggcctcgttccccgcgctcagcgagtggagcaagggggcggcgaagggagccatggtcgctcaggtgtccgaggacggcaccatcctccgcgtgctcgacgactcccaggggaaggtgatcaacttcgtcacgtcggtgacggagttcaacggggacatcttcctcggcagcctcgcgaccaacttcgtcggcaaactatctctggcgcgggtggcacagaagcagggagcagtatcttcgtagacgtttgggttcttcatgtcagtttagccctgtttgtttatcctttatattatataatccagtttaaataagttaatagacaaacaaacaaaacaggttattagatgtattgtataatctagatacctagattatgataatacataaacagataattatgtgcttattatataatccataagctagattatataattctgaaaggaaaaaaaaaccttaatcaagggaacatatacacatttgagttcttcatgtgagtttaaatagacactctttgctctttaagcatcgtcactactcaattctcaaacggctctgatgtacaataatcggctaccagttaagatttgcatgtaaaccgaacaagtttatccatcgaga

SEQ ID NO: 17974 - DNA, 438 bp, Zea Mays
gacctctccagattttctgttttctgcagtgatgagtacaaatgttgttttgctgcctggatacagtacaaatgctgtttccattgatcagaggcctcaacggcattttctttttattagcaaacatcagacaacaaagtaccgcattacatagagacatagagtacgtaaattaggacgacggaaacaaaagccacatgcgaagagagcagctagcatcaagtgttttacaagctatcaaaccaaacctcccctcaaaatatatgctgtcaccaaacccattgcgcatacgccaaaaaaaaaaaactattcttttagcgagatcggccgaggccaagcgacgaactaagccacttgcagaggtcgtccagttcttcagggatcgtataatggcccaacctgcgttgtcacaagtcacctaatcaatctggttgtctg

SEQ ID NO: 17975 - DNA, 879 bp, Zea Mays
aatgaatgccacctattcttttttctccgcagccaaaacacgcttctcccttcccatcttttcctttcctctccctcgtctcgtctcgtcttcgttcccctttcctcctgcgcaccccgtcttctcctcaccgcgtcaaaccccagcacaaatcaaccgcccgccgcctccgctcccctcccgtcccgaatcagccgctgcggtgcccaatccggccgatcccccctcctatccgccgcagaggcggcgcctctgggcctaccccgatgtatagcaacttcaaggagcaggcgatcgagtacgtcaagcaggcggtccaggaggacaatgccggcaactacgtcaaggcgttccctctctacatgaacgcgctcgagtacttcaagacccatctcaagtacgagaagaaccccaagatcaaggaggccatcaccgccaagttcaccgagtacctccgccgcgccgaggagatccgggccgtcctcgacgagggcggcgcggggccgggggccaacggaggtgacgcagccgtcgccacgcgccccaagaccaagggcaaggacggcgacgggggcaacggaggggatgactccgagcagtccaagctcagggcggggctcaactctgccatcatcaccgagaagcccaacgtcaagtggaacgacgttgctggcctcgagagcgccaagcaagctctgcaggaggccgtcatattgccggtcaagttcccacagttcttcacgggcaagcggaggccttggagggcgtttcttttatatggccctcctggaacaggaaagtcttacttggcaaaagccgtcgcaaccgaggctgattcaacatttttcagggaatagattattttatttgaggacagta

SEQ ID NO: 17976 - DNA, 1895 bp, Zea Mays
cacgctagtagaaatccctccaaacccaacgcctacaattacaaagatacaccgcctcccgcttccttctccgccatacctcgtgtccgacgagccctagggaacgcgagaccggccgtcggcgagagaaggactcgaatggagtgcgcaagggagttgcgggttcgctccacgtttacggcggcggccatggcgtccaagaagcaggtggggcctggaggcgcggttcccgctcaggaacagatgaacggcggcgatgccgccagactggtcaggaagccaatggatacatttccacagccagcggcggcaagaggccgtagggcacttgtcgacgttggcaatcttatgaatggccggccttctcttgtgaaccatcagaagcaagcggttgcggcagcggcaaccagtcataaaccactcaacgtcggcaacaagaagccacttgttcctcaggcagcagcaagaggcctgcgaccccttgccgacgttacgaatcttatgatcaaagaccgtgctgctcctgcaaatcgtcagaagcctgtggatgctgtgtttaacaggaacgggaaggcagtaaagctgaaggaatgcaaggtgaagcctgaagtcattgtgatcattccagattccgagaaggagaagaaaggcaaattccctggaggtcagagagtctgtaggagggtgccaacactttttgacaatttgacaaaatgcagcagggcctctgatgggattaccaccccgaagaagaaggatccatatgacattgatgcacctgattcttgcaatgagctcacaggctgaaatcagtgagagaatgagagctatccttatcgactggattatcgaggtacagtacaggcttactctaatgccagagacactttacttgaccgtctacatcatcgaccagtacttatccatggagagtgtaccaagaaaggagctacagctcgtcggcataagtgccatgctgatagcaagcaagtacgaagagatatgggctccactggttaaggacttgatgtgcctctgtgacaacgcatttaccagagaccagattctgaccaaggaaaaggccatcctggacatgctccattggaacctgacggttccaacaatgtacatgttcattgttaggtacctgaaagccgcaatgtgtgacacagagcttgagaacatgacattcttctactccgagctggcattggtccagtacgcgatgctggtttaccctccatcggtgaccgcagccgctgccgtctatgctgccaggtctacacttgggatgaatccacagtggactgatattctggaacatcacactggcctagctgagccacagttactggactgcgctaggcggctgatcagcttccatgccctggctccggaaagcaagcaaaaggcggtgtacaggaaatactccaagcccaagctcggctccgtcgcgcttcaatcccctgacaagaagcttttgtcaggttgaggctcgctgctgctcattgtattgtatatcatcgcttcgatggtaccatttgtttgggtcgtgtgctctttgcttttctactgaagcagagcatgtgttggttagtcagtttgcttaaacgactactgaagcagagccttgtatgtgtgttgggagaatgtgatatgtgatgtcaagctcaaacttcttctcatcattggataaactacttgttggcgtggcattgccgctcgtcatgtggcactactgcgccccatcactaccgcgcctcacagcacagtgcaactcgtcaaaaacgccataatgtttttactctgaactccatttctatagatagattatcgatctaactgattttaatttctacatgtgtagccatgctgtcgttcagaatgggtttacc

SEQ ID NO: 17977 - DNA, 566 bp, Zea Mays
gtactacggcgctcttctcatcaatgggatctggctgggcatgacgctcgggactctgcttcagacggctatcctcgtgttcatctcgtacaggaccaagtgggagaaacaggctatgcgggccgaagaaagggtcagggagtggggagggagggccgacgccctgccgtcggccacgcaggtcgcgccggcggccgaagatgcgggtccaccatcaaatgcgagtgcgacctaagttctaaggtcgtttaggattaattaatggcagtgttatgtgtaggcatcaagactttgctgcagcaacagcccgaacatcgccacagcggaccggacccatgtgtacagattgatcgagtggagcttaattaatttatacagtgctgcccgggacctccgttgtttttcgttttttccccaatcttggcgacttttatccccacgttttttttgttagaagttcatacactatacttaggttcatgttcagtaatcaaacatttagagcaaataaactatatatatatatatgtttccttttattactttcagttcaaacagtaaccact

SEQ ID NO: 17978 - DNA, 468 bp, Zea Mays
tggtccataacccccaatccctacaaaatcaaggtccaataaatgatgacaaagaaggggaacatgtccatgacaaaaactattctaagttatctcccaagtttagcgagaagaagaattatggccaggtacccttgagcaaacagaaaagtcaaggccatggtggaaaaaggaaatctataccggtggccaagatttactcaagccaaccaaattcaacaactcatgccattgatttaaaggagcctgatcatcaaagttcacttcccagtaaattctctaagaggaggaagcaacaactccaaaaatcatcttctatttattctcgaaaggacttaatgtccttgcatcttcacaaggtgacaagttccaatcttggtggcgctgaagcacatggagggcacccaaggtggcaagaaaggactaaacacattagtcatcatcattgcttgagtgatatggaaacat

SEQ ID NO: 17979 - DNA, 1340 bp, Zea Mays
atagcctccaactactccgagccttctggagcaatttgagagggaagtgaatgctgctgcattctctgacaagtcaaagtcaagagaaaatgcaatcttaaaattcaggcaattcattagagcaattgcagaccagatttctcaggtggaagaaaatttggagagtcttaggctaggttctagcagaactccaaaacatttatactcaagtgaacatgatggtgatgggctggcatccttcctttctggttccagcaaggatgaccatgcatatcattccactggtacagatgaaattgtggagcttaagcttgacaatgttcctttagtaaatggttatcattccacccaagaacatacaacatatgaacacaggaattcagataaagatgtggaaggagcggggaaacgtaaatgttcatgtggagaaggtgcatgtgaaggggatcataacaatagcaatatgtttgttttggatgttgatgattctacaagtaggagatttttttgcaaaaacaaactgagcagacaataccataattttataagaaacctatggtttacaaaacgacgtcgtgatcgtgaaagctttaccaagaggaggaaggatggagaagatatggatagcttgagaaatggaaacatgctaccttctttcaatctacctcaatctggaagggttatgtatttctggcctgaagtcattaagaggagattatgtagatctggttattttacagatcataatcattctcaaatccgtttagtgacagcagtactgattgcacttgctgttctctgcctgctggtatcacatgtgaaatgaccgaatcccgttaatagttttggttcacgttgtgttatatattaccacagtccacgctgtactcatagtgatcacgcttgtgctgtgtcatggattctggaggaccatcattgtttcaaagcatttcaatgttgtgctccaatgtgccatgccctacagatggtagttctggttgcttgcttgtcagtggcatgatctgtcataaaaaatattattcactaatccctgtatttattcagcaccaacacatgatgtaaaagtttttgctcatgcatcatatataactcagaattggcaggtcaacgagagtggaatttctggggtgcggttacctagtgttaatatattgttatgaaagtgaaggtcgaattgaatagaaatgatccattgtattgaacctatagtttgtaactgcccttacctgggatattgtatcaaatacggtttcctgcatggacctggaactctctccaattgctgccatttcgtttgacttatcagattcattgagcaa

SEQ ID NO: 17980 - DNA, 2857 bp, Zea Mays
gtcgagacggcagtatgatctggcgaaatatttatagtcgtccccttctaacctccagatctggccactcccacatgccccagtctcctaaaccctacacatctctctcggccacggtaattgccatcgccatggccgggaggcgcccggcaccggtggccatcctccttctcctcgccgcggcattcgcccccatctcctccgccgttcgcccagtctccgacgcgcacagatccgctgccgtggagcttttcgccccctccgctgacggatccttcggcgatttggagagtacgtatgaggcggtgaggactttccagatactcgggctggagaactataagagtctgtctgggaaggcgtgcaagtttgccgcggagaacctggcttcccccggttccaccacgaaagatctgttccatgctgtccggatcagtggcgcgcttggatgcgctgttgatgccggcgtgtacgatggtgttgtggcgaggctcaaggcagtgattcaggatactaattccctgttggaattatactatcctgtgggaggtttgcttggcatcaaggaacaaggccataatgttgttctgtctgatgcagaaggtacattccatgccactaaggcacttagccaaagtgacgggagatggcgttatgacactgacagtgctgagtctagcacatttgctgctggtattgcactagaagcattagcaggtattgtttcactggcagatgcagcggttgacccatccatgatgggagtggttaaaaatgacgtcgtgaagctgtttgacaccatcaagagctacaatgatgggaccttctactttgatgaaaagcatgttgatgctactgaatacaagggccctataatcacatctgcttcagtggtgcggggtgtcacctcttttgcagctgttgtttctggaaaattgaatatccctgccgagaaaatacttggcctggcaaaattcttccttggtattgggctcccaggtagcgcaaaggattgctttaatcagattgagtctttgtcattcttggagaacaatagggtcttcgttccgttgatactatcactttcttccaaagtattttcattgacttcgaaagatcagctcaaggttgaagttacatcagtttttggatctgctgcaccttcactcaaagtgaatcttgtgcaagtgttgggatctgactctaaagtcatcaccagaacttcaatacgaccttgacaacaatgtccattacttggacattgctccattgaaaattgatgttgggaaatactcgatagtttttgagatttcacttcaggaaccagagcaggagactgtttatgctactggagggagaaacactgaaagtgtaattgtcacaggactgatcaaagttgacaaggcagaaataggaatctctgacaatgatgctggggccgtggagtctgtccaaaagttagatcttctgaaagatacaaaagtgtctctttctgcaaaccatctgcagaaactgtgtttatcttttcaactaaccacaccgcttgggcacacatttaaacctcaccaggtgttcttgaaattgaggcatgagagtaaggttgaacacttattcgtggtacctggctctgcaaggcagttcaaaattgttcttgtgagtatctctacactggaattggcttcgttagttctttggatgctcataattcattgtggcaatgtagccaatactctagaccaggcactgaactatcttgagaagttgcacctatataccaacaaagtttttgaacctggaaggtaatatttaggcaatgaagcctgtattcgagtttttactctatagtcatgcttatgggaagcagcactgcgggtatgtaggtggcaactgacaaattgaggtttaaaacatcacccagttgcattttggtaaagataggtttcgttcaatatggtatattgatggagtggttgaaattttctgaagcgtttaaagacattgatttctgacatggttccttatattgtgctactttaacttcttgtaggacttcctaggtttggtggagaaattttactacctttctggaagatatgaccttgagcttaccgttggtgatgctgtaatggaaaattcatttctacgacctcttggccatttggagttggacctgccagatgccccagaaaaagccccacgtcctcctgcacaagctgttgacccattctcaaaatttgggccaaaggcagagatatcacatatattccgcgcaccagagaagaggccacccaaggagctctcgctagcgttcacgggtctcacgcttctgccgtttattggattcttgatagggctcgttcgtcttggagtgaacttgaagaacttcccgtccttgccaggaccggccgcatttgcctcacttttccatgctgggataggagcagtcctgatgctctacgttctcttctggatcaagttggaccttttcacaactctcaagtacctcggcttcctcggcatcttccttgtgtttgtgggccatagggctctatcctacctttcctcggtgtcgacaaaacagaagacggcatgagtggacagagttttttccgaccatccatttcttgagggggggccattgcaggcccttgggtgtcttatgagggagggctcggtttatttcagttggctttgcagaatactgataactagaaaaagtagtaggacctcaccttcgtgtattatgatgatgcacatacaattttctgagtagaatggatgttgaatcatagaactaatgaataatatgaacactcgccttcgccccaagtgctagtttggaaacttaggatgtgtt

SEQ ID NO: 17981 - DNA, 1835 bp, Zea Mays
tttatgttttcttttcgttcaaagaaaccgtactgataggaaacagttgatattttacatggctctaaaagtttataataataaagaatttaccaacccaggtggaattaataataacaggaggacctgtatctaaaattagaaatccttgaaggagaacacaggaagaccacccaccatgtcagagcctatttaaaccgcgctttgggcagccatctttcacacaacacaagagccttctcgctctgatctgagcaggaggaggaagaaagccaaaggccttccttgcgcttccagggcaaagaagatctgaggccgcggcggagcgtgacgacgacgaagtcggtcaggatgagccgcgaggataccctgaaagtgcagaccctcgagctcaaggtgaacatccactgcgacggctgccttaagaaagtcaagaaggtgcttcacaagatcgatggggtgtaccagagcacggttaatgcggcggagggcaaggtgacggtgtccgggctcatggacccggacaccgtcatcaggaagctgcacaaggccgggaagccggcgcagctgtggggcgccaccgccaagcctgccgtggcgacccagctcgagaaactgcagctcaaggatgccgggggcaagggccagggccagccgcccaagaacgcaggcggcaagggtcagccgcccaagaacgccgccggcaagggccagggccagggccagaagcagcagcagcccaagggtggagcgggcggcgccggcgccggcgcgaaagtggtggcgctgccgcactcgcagccgacgccgcagcagctgatgcagatgcagcagcagatgcagatgaacgggatgaagtttgctcatccggagctcatggccatgggcgcaggtcgcatgccgatgccgatgccgttcccggcggcagcgcaggcgcaggcgcaggccgccgcggccaaggaccccaagaccgtcaagttcgacctcccggggggcgaggagttcggggacgacggcagcgacctcgacgacgagttcgacgaactagacgacgtggatttcgaggacgacggcctcgacgacgacgacgacggcgacctgtacgacggccccgggatggtgatgaagcccatgggcatgcccccggccgctgctgccggtggcggcaacggaaacggcggcggcaagaagggtggcggcgggaacgaggtcccggttcagatcaatgggaacgccgccggcgtactactacccgatgccgcagcgccacccgcacgacagcatgttcagcgacgagaaccccaacgggtgctcggtgatgtgaggcgaggcgcggcggcggcctgcggggggctccggagaaagtgaaccaggcaaccagccagccagccaaccggaaggagggagctcgggcccgtcaggtcggaggcggccgccgtgagtggaagagtcgtcgtcggtatacatgaagaaaaaaaaaactagctatatgctatagcaccagccgtaacctcgccgccccatttcgttttcgtctttcccctagtttgttttcacctttggtactttttgtttcccttctctgaacaaagaaagagcggcatgcagcttcctcttccttgagtggaaggtaggtatagtggtaacaacaatgatagtggtgatgctagctgatggctgtcttccttcgcttctttctttcttgcttgcttgcttgcttgcttgcttgccccatatctaatgaatggacaatgtgcaagagcagtgcctctctctgcctgcctagcttgttgtgtgagagagacagagaagaatcatcatggatggaggtagat

SEQ ID NO: 17982 - DNA, 858 bp, Zea Mays
cttctccctgtccattcggtgttatctctggcacttcgtggcgccttattgggtcgcgggtgcggtttgcgctctacaaattttgggtttggtttcgctgaaccctcatgacccaagcgaagtccactcctgggaggagggagatgggccgggcgcgatcgccggaaccgctcgatttcttcatatggactgtcgaggatgttggattatggctggaagaaataaatcttggtggctacaaacaagtatttcaagaaaatagtgtcaatggagaatatctagaaagcttgtccatgtttactactgagcagattctgcgctttattaggcggtgccatatgaaatggggagactttatcacactgtgcaaagagttgaggcgcattaaagtggcgtgccttaaaggggagcaagaagtccgcaggccatggtgggcgccggcatgcctctccgtagttttcgtgagggcagccaagcagaacaggaagtcccgtgttgtctcgttgaagctggaaccataatgcttgtcaagcacttcgaaccgtcgtgcgctagcctaaagtgaattcccagaagaagaagatgaaattcaagaagtggtttctgaagaggagtctgctttagtgcctgctcaacaagtaatgggagccatctaactggggtttaatagagggatttagacctccgtctctgcaacaaaggagaagttttattcacttatctttgggttagttacttcatgtggaggacttgaagcttagaatgtttttatatatctcttatggaaaggcttcacccttccaattattgtaataagttatgcacttcgagtactatcaggacttgtaataaatacat

SEQ ID NO: 17983 - DNA, 1198 bp, Zea Mays
ccccacccttcgcacattgatgcctgccgccccattctccatcccggccattactcggccacgacttgccgactacgatgccagcgccaagcctccgccgcccagctaaaaatcccccaggcgttcctgagcacccgtttatcatcacatgaccggagtcggccagaatttgccgtagctctcgcccccgctcgccgtgcgcttctcgtcccattcccccgggatcgtagattctcgagctgagctgagctgagctgagctgagcgatggatcgcgagctcagccccaggggcaatgctccagggagagggagcggcggcgcgtcgtcatcgaagcacaagaacggcggcggcggcaagaagccgatcaaggtgctttacatcgccaaccccatgcgcgtccagaccagcgccgagggtttccgcgccctcgtgcaggagctcaccggccaacacgccgatccctccaagtacagccccggcgaccttgactccggcgctgccgcacagggtctgagccccagggccagggtcgcggacgtttcgtcggaaaccatcgtcgcaagccacagccctggcagtaaggccgcgccgcacggaggggactactacgacgtcgaggaagacgaagatgacgtcttcaggtcgcctcacatgctgctggagaacaattatacggtgttctcgccgccgacgctactatatgaccatcacccgcacagcaaggctacttctgaatcggaggctgggttcgcagcggagcatgacaatttctggtccaaatgaagctgaacaagttaatacgactatagctacgaatggtttcagtgaggagcatagcacaagacaacactggtacaagagactataagcatgaatacgaagatggctacgtacggcaatggtggtgaaggctacgacgaaaggattgcggcgatattacggttgatgaatggcatgatgtataattttcttgatggacaaaaggatatatacacctccgatctgttttgtccattgagcagcaatctatgtaatcttatgcctaatgaacaggctaaggatgttttagacacaactactctagttggcacaatgttggattcggaagggaaacattgtaaaacgttggttgcttccttgtgtacatgttgcgcgcagcattatattatatgtctattgtttgtcatggtggcata

SEQ ID NO: 17984 - DNA, 1433 bp, Zea Mays
  misc_feature (1432)..(1433): n is a, c, g, or t
agttttgctaggctgggccactcctttggccatcctaggtctcgtgtacagtcgtcccctccgctcctcgcctcctctcccgagtcccgaacggccgatcccgacgccggctgcgtggctcgcctcagagccccagccgtatcctgccacccttgtccatgagcgcccgctatcagcgcagctagtccctccctccgcccgctatcttgagcggtggtgatggagtttactttcgaggatgcagcggaactgtgcgcgctcgtttcgaatcagcaatcccacgtcgacgagaagcggaggtggctggagtcaatgatcctcagaccggatggctgcatcaggcgcgcgaagcgacccaagtttttgcatgaagtgtacttgcctgagtcatatatcaggagtgatgacagatcttgtgataaagtgagaggtaacattaaaaggatttggagttcagagtgcaatggctatacccatcacttagttctggagggcctccagctttttgacttccagaagaaggaaaatgaaccacttggaccagaatatcttggtgtcatgcaggacacaatcagcaaattgacctatgaaacacttcagtcagtggcttgtgttgtcagtcatgacaaggttacttttgataagactaggtctgtaatggaaaaaattgtaaattctcaccttccaagttacttggccagcttggatcagaatgatattgcatgccagctattcaatatttttagaaatccatgcagctatcgatctggttctgtgaggcttgtcacacctgtgtcaccacaacttttgtcttctattaagcatgcgttggatgagcttgatggaatgccaatgcagggtcttgttgcaatgaataggaagattaaaggaaaatcatgtgccccaaaatttggattaactgctagcttttccaaaagaatgcatataatcaaaatgataagaaaaaggtgcaacaagattttaacagaacttgaggaaggtaattacctgccaaaggaattagcaaaggcaatgtcagtggtgaacttatatcagaagcagaagctgaaaaatgtgagtatttcacaatcagagtttttcccctttgcaaaagaaactatttctttgcagaatgatatcctgaatgccctttggtcacttccaaatctcaagcatgcgaagctgaaattgctgcacaccatactggatcatgattctaaatttgaaaggaagcacttagcaactttgaggaactacttgacagaatgtttgtttggatgtgatgatggtctaccagatgtggccctccaagccatagcctctataaatcagatttctagatgtcagcatgttgtgttaacggaagagagggaggatgctgaggtagatgctgtactgaacttgagcagtcatctcaaagctttagctcatnn

SEQ ID NO: 17985 - DNA, 1591 bp, Zea Mays
tctaattatactaggagaagtaatattcatttgtcagaccaccgcaggttcaggaagatactggcaaaaggtcgctgatgaaagaagaaagaagccagctagaataacccttgctgataaaaatgcaccaaatgaagaagtttggaagcagatcgaggatatgtgtgggtccacaaaggcagctgctgtccctgtggttcctgactcagaaggcacggattcaaatccattttctcttgaggctcttgccgttttcatgtttcgcgtcctccagcgggtcaatcatcctggaaatctggacaaggcctcacctaatgcaggctatgttttgctaatgttttaccacttgtatgatggcaagagtcgaagagaatttgaaaatgaactttatgaacgttttggctcccttgttaagatgcctctcctgaagccagatagagcgccattgcctgatgcggtgaaagccatcttagatgaggggattagcttgttcaagatgcatcggagcaggcatggaagagccatcaaaaggttcatacgctaaagaatgggcacaatgggaacaaaggttgcgtgcgaccttgtttgggaatgctgatcatcttaactcaattcaggttccttttgactatgctgtgaaagcagtactggaacagttaaaagctgttgcaaagggtgatctcaaaacacctgatactgggaagcggaagtttggaaatatcatgtttgctgctgttcgattaaccccgcctgatatattgggccttctccgtaaggtggcagagaaggacacggctgtcgacagttttgtgaacaagataagactggaggacaacctaacgaaggttcacgtcacccttgcccacaaacgaggccatggtgtgtctgctgtcgcaagctatggcatctaccagcaccaggaagtccccgtgtcattcaacgcattgtactacactgacaagatggccgctctcgaggcacagctgggagcagtaaacgatgagccgatcaattccaggaacgagtggccacatgccactctgtggacggctccaggcgtcactccaaaggaggcaaacatgctgccgcagctggcttcagaaggaaaagcagaacgggtgccgattgaccctcccatcaccatatcgggggtggtggacttctactgatttgtctcctcggttttaggatacggatgtgcagaggtgaaggtggaataaagaataatttgctgctgcgggccttacgttattagctgattgtggacaagacaatcgtcgagtcttacaccacataaatttttgatactataggactgacctggactgctgcatttctacttccatgttttccaataagtgcaagataccatcgattttttaagccagcacttagcactagaggagataattatctgtatagcaagcacatcattctactttctagtgtatttttgaatttccagaggccgtttgacaggacagttgaccagaaataaagttcgtgttggtggtatgttacctttattttgtgtacttattacaaagttgcaacaccgaatgcttcgttgactggctaacataatgctggt

SEQ ID NO: 17986 - DNA, 2557 bp, Zea Mays
gttataaactgttcaggattccctcgtaggcttttcatgttctggtactggatgtgcagttttgggaggcattgctacagagataggacttctagctgaaattgttgcccattgatcacgctttatcctattcctaagttatttgatgaatgttcatgctgtttgtgttctcagttgtcactatcaaataggtagttatccgagggtggtctcattgactgcagatctctaggtgatagctgggcatgaaggaaccagtttgcatctattcagacctacaaccttcaacttgcattgtgtttgttcagtgtcttctaccttgaagtagttaatgattagggtcattattgcaggtcttactgctattttttgcttgggcttgtcatcgtggattatgtgttgggggtactaacttatccaatttactaattcttgtatatgaaccatgatacttgtgagactgcttcgaacctgtgacatggtgacttagagcaactctcgctattgtaccagccctgcttcaaacccgtgacatggtgacttgagacctctctcgctattgtaccaggccagtcctttacgaaccataatactatgttaatataatattcagatacttctaatttaatctgcagttgtagaaggtaatgagcatgttttaacttcggagattcaaccagagatagctagaactacaacactacaactttcatttaatcaagcttgtttctgctttatcttgctatgctctgaccaaagctttaattcttgtgctactggtatttctgtgttctgcagatcatttagctcaagtaattggtagttcaattgtgataagtaggctgagcaaattgtactgctagtgtagtttgttttgtttgatttgtgtgggcacacttgaaattggcgtgagtctagtaacataagttgtgtcattttgctcagaagccttacatatgagttctttctggttcatctgatgtccacactgagtttatctgatgtccacactctgagtttatctgatgtccacacactgagttttggcaattaatttgcctgtttagaagcagagttctagaacctaaactgtctgtctgaagcagagctctagatcctgaactgtctgtctgattggttgctgcttactttgtgctgcactgaaattggtagtggtgtctgtctagcccattggaagttttcttctcatctctgtttcgttactgcacaggggaacttggtacagccatccatggtatcagaatatgacctgggaggagaaggggacctgttcaaagctccagaagccatcatcgaggaaccgctgctcctgaactgtctgtctgattctgttcatttgttgttgtgtaggctgggcttgtgccaagcttgaatcctcttgtgaaggagtttctcaatgctgctgatgacaagcggaaggaagtcctctctaaaatagaagaggatgttgctaagctcagcggttctgcagccaaatctcgcgtctagaattgccgctagatgggggaggtgagcggctcctggtctcttcgatccaatgtaatggtcagctaagaagctacaagtgaatgccgaggagagcagcgatgacttggctaacccaccgaaggtagaggagaagcttggtgctgtccctcatggcctgtccaccgactctgaggttgcccagagggaagccgagtctatctctaggaagactctcaggagctcagccgagaagtttgagttccaagctgaggtttccagactcatggacatcatcatcaactcactctacagcaacaaggatatcttcctgagggagctcatatctaatgcctctgatgctggataagattaggttcctttcccttactgataaggaagttctgggtgaaggggacactgcaaagcttgagattcagattaagttggacaaagagaagaaaatcctctccattcgggataggggtattggtatgaccaaggaagatcttattaagaaccttggaacgattgctaaatctggcacttcaggaacaggagctgctcgagtctcttgtcgaagctgatacgagaaggcaggaaagagctaaaaagatggaagaaaagaaagtgtatctgcaactatacgaagcaatggaggcgttggtcaagatcaatctggagacgaacaagatcatggacttcatcaagtttgacgtcggcaacgtggtcatggtgactggcgggaggaacaccgggcgtgtaggagtcatcaagaacagggagaagcacaagggcagctttgagaccatccacgtgctgcttggagctttttgctatgtctagttttctcctatttgttgtacaggaaaacatagaatagaattcaaatttggtggtcgcaaaagtgtggagactttaattcatataaagttaggcttaacattagtgcaaacagttgtattttagtttagatttagagtacacttatgtatgcattgtttgacaatgtttatttatgatatattaaatggtacttatttatattatattaattataatgttgttcaat

SEQ ID NO: 17987 - DNA, 4984 bp, Zea Mays
atcaccatgacggactcggggaggaggccaccaactaccaaacccatcgcacacgtcctgctcccctccccttctcgtcgcgtcggcattgcattgcacgcctcgcccggcgcctgctcccttgcattttccattgacctcccccccgccccctctcgtccgtctcctcctccccaaagcttcgaattttcccgagccggagccacaccttctttctccccgcgtcccacgattcgccgtcggaaagaggcaaggcaacggaaaccgagccgtcctgcgtgagctggggcggggtcccccgtctgggtgccttccgtgccactctcctgcaacgcggggcgcattgtcttgctgcccccttgagaagggaagattcccgccatctattaatcctcctctcgtatgccgttttctgcctggggaggacacaaacgcagcgccgcgggaaagccgggcgccgcatggatcgaggcatccggtgttcctgtctcaagacccagttttggcgtcttggcgtagcgggacggaggaggacgacggggtttcggagcgcagggtcgcggcggcacgccgggatctccgaggcgccgcgctgttgagtgttgacgccttctcgttcctgggaggaggtgatttctctgctgagggcctggggagtctcttggttcagtccctctccctctgcagtttatttgctttttttaggtaggtggagtgtggagttgttgggtgggagagggcctggaatttatttcgagctgcttctttggagaccattgtttctcgaatctgagttcctcttcttcggagggagttgtcaattgcgttctgattgatttggacaagatcggaaggaactggcactctcggtgggcgtacaaaaactctgagcttgtggccttatcgacttcttgggggcatctgggagtagcttcagcgattcacttgagtctggaggaatggcgccgaccaagaggatggagaagctcaagctcagcacattgttgactttcatgcgttgccacaggggctctagtgatgaccactcacggattgggacagtggggttctcccgagtcgtttacgtcaacgagcctgatatgcttgaagaggagggattcaactaccccttgaatgaagtgtcgacgacaaagtacactctggccaccttccttcccaagtccctcttcgagcagttcaggagggtggccaatttctacttccttgtctctggtatccttgccttgactccacttgcaccttacacggcagtgagcgcgcttgcaccgctctgtgtcgtgattgtagccaccatggcaaaagaaggggttgaggactggcggaggaaacaacaggatcatgagctcaataatcggatagtcaaagtgcataggggaagtggccattttgaagagacaaaatggaagaatatcaaagttggagatgtaataaaactggagaaggataatttctttcccgctgatatgattctgctttcatctagctatccggatggaatatgttatgtagagaccatgaaccttgatggtgaaacaaatttgaaaattaaacaagctctcgaggtgacattggatttacaggaggacacaaagttcagagaagtcagacaaacaataaaatgtgaagacccaaatgcgaacctctactcctttgtcggttcaatggaatggagaggccagcagtatcccctgtcacccctacagcttcttctccgggactcaaaactacggaacacagactacatatatggggctgtcatcttcacaggtcatgatacaaaagtgatgcaaaatgcaacagatccaccatctaaaagaagtaagattgagaagaaaatggatcaaattatttacgttctgatgtcttctctactcatgattgcattacttggttccatcttctttgggatctggaccaaagaggacgtaagagatggtgggctcaaacggtggtatcttcggccagatgctactactatattctatgatccaaagagagcagctctggcatctttctttcatttgttgacggccttgatgctgtacagctacttcatacccatttctttgtatatatccattgagatagtcaagatcttgcaagctctatttatcaaccaggatattgaaatgtatcatgaagaatcagataagccaactcatgctcgtacttcgaatctaaatgaagaactaggtatggttgatacaattctatccgataagactggaacattaacatgcaacatgatggagttcatcaagtgttcaattgctggcacagcctatggtaagggcgtcactgaagttgagagagctatggctatgaggaaaggtgacagtttagatgatgacattgaaaatggagactacaaagacaaaaaaaatcacaacagtcccaatgttaaagggttcaatttcaaggatccacgaataatggatgggaattggattcatgagcctaacaaagatatgataagagattttttccggctcctagccatctgccacacatgcattgctgaaatagacgaaaatgagaaggtttcatacgaagctgagtcccctgatgaagctgcatttgttattgcggcaagagaactagggtttgagttttacaagaggtcactggcaactataattattcgtgagcaggatccaagttggaatgttgttgagaaaaggtacagaaagtatgaactcttaaatatattggagttcagtagctcaaggagacggatgtccgtgatagtcaaagaaccagagggaaggatattacttctcagcaagggtgctgatagtgtgatgttcaaaaggcttgcaccaaatggaagaaaatatgaagaagaaacaagaagacacataaatgagtattctgactctggtctaagaaccttggttctagcataccgtgtcttagatgagaaagagtacaaggaattcaatgaaaaactgaacactgccaaagcatctgtaagtgctgatagagatgtaaaaattgagcaggctgctgatagcattgaacaggacttgattcttcttggtgctactgcagttgaagataagctccagcaaggggtgcctgaatgcatagacaagcttgcgcaagccggaattaagatatgggtcctgactggcgacaagatggagacagctatcaatattgggtttgcatgtagcctgcttaggcaagacatgacacagataattgtcacactggaacaacctgacatcatcgcgttggagaaagatggtgacaaatataaaatttttaaggcatcaaagaaaaaggttatgagtcagatagaggatggaatcaaacaaattccaccttcaactaaaattagcactgcatcatttgcactaatcattgatggtaaatcaataccttatgctttggaagatgatgtcaagtttaagttcttggatcttgctatcaactgtgcatcagtgatatgttgccgatcttcaccaaaacagaaggcactggtcacaagatttgttaagcaagtaacacataaagtgactttagcaataggtgatggggcaaatgatgttggcatgcttcaagaagctgacataggggttggcatcagtggtgctgaaggaatgcaggctgtcatggctagtgatgttgctgttgcccaattccgctttttggaacggctacttctggtgcatggacattggtgttaccggcgtatttcagtgatgatatgctatttcttctacaagaatgttacttttggtgtcactctctttctctacgaagcatttgcatctttctctgggaagccagcttataatgattggttcttgtcactctataatgtcttcttcacctcccttcctgtcattgctttgggagtctttgaccaggatgtgtctgccaggctatgcatacagtatccacagctataccaagaaggagtgcagaatatattattcagttggtgtcggatacttggctggatgcttaacggtgttatgaatgctgtcttaatatttttcttctgcatcacaacctttgaggaccaggtgttccgccgggatggtcaagttgcaggcttggatgctctaggcgtcgccatgtacacttgtattgtatgggttgtcaactgtcaaatggcgctctctgtgaactacttcaccataatccagcacatattcatatggggcagcattgcagtatggtacctcttcctcatagtttatggttccatgaacccgaggttctcaactacagcctacatggtcttcatcgaacagctggccccagccctctcattttggttggtgacactttttgttgtgctggcaacacttgtcccctacttcacgtatgccgcgatccagatccggtttttcccaatgttccacaacaagattcagtggaagcggtacttggggaaggctgaagacccagaagtggcaaggcagttgtcatcacgacaccggacgtcgtcgcagcagaggatggtcggtatctctgctcgtcgggacggcaaggctatgcaaataacaagggagacagagatagaagttcaggagtagcattgtcagtagattttgcgttttgtacagcttataggatattgtctccggcaggatgacagctgaactgattggaaaccggaatgtttctggattgctgcttctatgatggctgtcatggaagctgatggtagagcaagactacaaattgcttagataggtcacaactcacaaggaggccaagagatcctgttgtaaagttcaattttagcagttcaaggctgtgtttcccccccccccccccctgcttctcttacatcatagatgcttgtaaccagattggtagaatttcgttgtttttattcctctttaccccccttgcctgccccctctcaactgtattttaaacaataatgtaaggcatcttgtttgagtggctttcatgctttattttggaaagaatcataattgag

SEQ ID NO: 17988 - DNA, 1369 bp, Zea Mays
tgatgctgttcttcgatatcagaaattaggatatcgatttaggtatatggacaaggtgtctgaaggtactaagtgagatggataagaagaaagggaccgatggcaccgaaccaggaccagctccatctcgtgccgtcgacagatttggttttataaagccagaacaaggcaattcacctgatggaattccaaaaggcaagtctatacatgagcgtgaaagggaggaaagaaggataagaaaatggaggaagatgataggtgttggtggtaatgactggaagcattatgttagaaggaaccctcatgtggttaaaaggcgaataaggaaaggaattcctgattgtctcagaggacttgtttggcagttgatttcaggcagtcgggacctcttactaatgaacccaggggtttacgagacactggtgatatatgagacatcggcctctgaattggaaattattcgtgacatatcacgcacatttccatctcatatattctttcaacaaaggcatggtccaggccaaagatcattgtataacattttgaaagcatattctgtctatgacagggatgttggatatgtgcagggaatgggatttttagctgggctgctgcttctttatatgagtgaggaggatgcattctggttattagtcgcgttgctaaagggagctgtccatgcaccaatggaaggcttgtatcaggctggtttgccgcttgtgcagcaatatttgtctcagtttgagaaattagttattgagctcatgccaaaattgggacaacactttgttgaagaaatgataaacccaagcatgtatgcaagtcaatggtttatcacagttttctcatattccttcccatttcatctaactcttagagtttgggatgtgtttctttatgagggtattaaggttgtattccaagttggattggctctattgagactctgtcacgatgatttagtcaaattaccttttgagaaactgctctatgccttgagaaatttccctgaggaagcgacagatccagatgtattattgccgcttgccttttcatttaaggtatcgagtcgtctcgaggagcttcagaaggagtatcagaagcgacaggagggcaccagtgaaacttcaagcggcgagcggctacagcccctcgtatcgaagacgatgagcagggtcggtagccgtgttgtgtcgaacttaacgaccgctgacagaaaatgacagacacgttctcttgtttgtttgtaactcgcatgtacactgtacagaaagaacggccttataatccatccatctaacagtatttgttttgcgtttctgtcaccattgcatttgcttttataatcctggatcgcaggaacaaaaaa

SEQ ID NO: 17989 - DNA, 2419 bp, Zea Mays
gccctgtttccttttctgttaagacttaagactgctaccactaccagtgtgctgcattcgggaggaatctgggcggtggtggagttgaaggggacgatggcatggaagatttcgatgctgaaaggaagtccgggatgctgcacatgttctgcaaaacgcttacggcctctgacacaagcacgcatggagggttctctgttcctcgccgtgctgctgaggactgtttcccgcctctggattataatcagctcaggccttctcaagagctggttgccaaggatttgcatggagccaagtggaagtttcgtcatatatataggggtcagcctcgtaggcatctcttgactactggatggagttcatttgtcaataaaaagaaactggtttcaggggatgctgtgttatttctccgaggtgatgacggtgaactaaggctgggtgtgcggagggctattcagcttaaaaatgaggccctttttgaagatttcaatagtgacagcacaaagcggcattctttgacggctgtagctgattccttgaagaacagaagtgtttttcacatttcttacaatccaagagctactgcttcagaatatattattccatacgctaagttcctgaagagcctcaatcatccggtctgtattggagcaaggatcaactttcagtgccataatgaagatgttagtgaaaggcgatctggagtggttgttcgcattagtgaaatagatcccatgaaatggcctggctcgaagtggagaagcctgctggtaagatgggaggacggtgctgaatgtaatggccaagatagagtatctccatgggagatcgagatagctggtggttctgtctctgtttctcattctctttctgcatctagttctaaaagaaccaagttgtgtcctcagggaaatttggacgttccagcaatgtggaatggttgtactgactccatggaaactggaaagttacccagggtcttgcaaggtcaagaattgatgagttttaggacttgtcatgttccgtgtgctcctcaaactgctgaggctgcaaaacttcaatcttctgatgctagtaggttccttagtaatgcacatggctgcgcattgggtggtccaacaagcagactcgcagtgcatagctctggttttacctaccaatgtgtaggcttcaatgaatctattggattctcagaggtcttgcaaggtcaagaaatttctcgggcggttcctaagttccaaggaatgatgtcggaagcttgttcactgaaagacagatatgggctgcatagttatatgcgtgccccagttgctgttaatggattatcagctacaactcaagaatgttctctcgcactatctactccgccaggagcacaagtgccctctctctaccctggtaatgttgttaaccgaactgtggttccacaacttggactggcaaggaagtttggtggtggaggtacaaatggccagcagtctggcccatttgataggccgagggaactttggaccaggccacagcatgaaacacctgaccaaatgaacttggatcagtttgagactagaagaccttcagtgcctgtagatgctgctaagcttgggtctggtggaggggaggttcgcaaaactagctgcagactttttggtttctccttgactgaaaagatcttgccagcagatgatgatgacgtcaaggaagtgagctatgagactgagtgccagaacccacggatgctggacctgttcgggtacaactgctcaacaccgagtgccgctcttccagctctgtgtgctgccgccccctttggaatgtgatgctgcttcgaatctttcgataactttgctccatgtactcttagaagttttactttcccagtaccccagtgtagtcataagctgcttttgacatcattccctttggtctgcctcaagttaagcagtcatttgcacaagtaaacgaaggttcgttggtgaaccactcctcgacatgcctcaccctgtcacccaaactattgtggttagtctcaggatacccagagacaccacattgtaacttatgtcgatgatccttcagaactgttgtgcgatgaagctaacaatttgctctaaaagtactttgcttgctctaaaagtaccggctatgtatatttaaatcagcacctgtatgagtttttttagccctcacaagccctggttgcagtcgactaggccgtgtgattgtattagtatgctatctttttaaactgtcgcttatgagtctttattctagtgcattgtgtgaatactctgttcatcgcatgcaagtcttgtcttctgtttctgttggcttggtaggagatactctgattttataacatgtcagatttttattggtcaattcaactttgaccatcaatatacaaggaatttggtgaata

SEQ ID NO: 17990 - DNA, 1007 bp, Zea Mays
caactgccaaggtcgccgaagtcgacggtgaggatcgaatcatgcgccgtttataaaaaacgtcttagcctgctacacgcacaccgcgcaggaacaaccaccaggcacagccaacaagcttgctagtgtgtggtttctctcatcaggtcaggaggagcatggccgaccataaggaggagcagtctgtgatggacaagatctccgagaagttccacggcggggactcctcgtcgtcgtctgactcggacgacgagaagaagaaggggtcttcttcggcgtcggcgacggaggccatgaaagccaagatctaccgtctcttcggccgcgagaggcccgtccactctgtcctcggcggcggcaagcccgccgatcttgtcctatggaggaacaagaagatctcaggcggggtactcgctggtgccacggccatctggctcctgttcgaggttatggagtaccatctcctcaccttggtgtgccactgtctcatcgtctcgctggccatcctgttcctgtggtccaacgcctccagtttcatcaacaagtccccaccaaacattcctgaggtgaaaatccctgaggatgtgtctgttaatgttgcactgacactgagatacgagatcaacaggggctttgctaccttgagggagattggacatggacacgatctaaagaaattcctaattgttatcgcaggtctctggctcttttcagttcttgggagctgttgcaacttcctgacactgttctatattgtctttgtggcactgtacactatacctgttctgtatgagaaatatgaggacaaggttgatgcttttggtgagaaggctatgatcgaactgaagaagtattatgccatcttcgatgagaagtgcctatcgaagattccaaagggcctcaaggataagaagcactagattggtagtaagattgttgatgagatctggaaaggcagctagctatatatatctatgaatcgcgctcaaggggcatttgtttgtttc

SEQ ID NO: 17991 - DNA, 163 bp, Zea Mays
agcccggttggttcgttcgctaggtatgcgagcggccgtatatgggttcgatccccagcatcgagactacatgcctcattttggggtttttctcggtagggtttacacatgcgtgatctgtgtagtggtgtgagttcgtagtatccttgtacctttaaaaaac

SEQ ID NO: 17992 - DNA, 644 bp, Zea Mays
atggtccatcccccacatttaaatggatgcacaattcacaataggacgtcccagcaatatgtccgtagccttgtggtacccagacgatggcaaagcatggagcaactccgatcattactcagccagctgcaactggttggttttggatatacaaccttcgtccgaagctacgtattaccgtccagctcctaatcgctcttgggatgctgcaactggctttgctttacttctttcagtggtagccatttgcatgtccatctttgtgggctaccgattttctaggaacaggagcactgcccagtttacaccacttgaacagatccagtttgctgaagaacgccattgattggaattgagattaggcgaagcatcaagcaacaatgtttcatctgttccaccattgtacctccaaagttgacagattgctgcattgaagttttgaaccgggttgttgtgatccagtatagggagatattgaaagcatacacgatacataatttaattacagactgccggtttttatcgtaggaaacaatttctatatgctatacatcaaaccggttattggcggctcatgactttgacgattgtttcattggttgcataatatttgaatatatctaaatttggttcgaatgctgaag

SEQ ID NO: 17993 - DNA, 1260 bp, Zea Mays
ctgaaaattcgaagcatctatgtttatcttccatgtgctactatacactcaacatctgttccacataggacaaaactttactggaaggtcctgtgttcaatgcattctgggaaaggaatgttgcagaggctgtgcgccagggagatgcaaggccatttgtagaggaagctgtgctgcaagtatctgactggggtttcagcttatctgacatccaaatgcagaagaaagaggctgggggattttttgagctcatcaagtctctgttcaatcaggccgaaagagagtgggtgggatttctgggcccaatacatatatggcaggggatggacgaccgagtggtctcgccggcagtggccgaatttgtgcggcgggtggttccaggagccacggtccacaagcttcttgacgaaggtcacttctcatacttctgcttctgcgacgagtgccacaggcagatattctccaccctcttcggcattccccagggccctatcaaccctgcaccgccgcagccaggcgaggtggtttcagagctcaccgaggaaacaacagtgccagacaatgccacagatgaggaacaaggaaaatcaggcctgccctgattcaagatcggtttcaggacccacaagtatagatacgagaccttactgctactaaaacacaatacctcaaatagacgggcttttcttcgctgcccatgggagcagcctgtgaatcgagctgctcctcttgcggaagtcgtgaaggcaaagcattggatggaggaggttgtgccgtctcagttcgatgtacaaaaatgctcatcacaaattcgcacggcacctgctcggtgcgcttttagtatagtcggtattacaattcgattaacctgttatgactcagctatattataggcttctttttgcacattatggttgaattgcgcccgcagctgaatttttgttcctttactagctatggcatgatccaacatcccgatccagcttaaggccagtaatgtattcgcctcttgcatgatgtaaaaaagttcgtctcttgctgcggatgtgcggtgctgtgtgataccgtgtgagtgttttgtgtgttaggtgttgtagagcgcagtacatttggactgtgccaaacgggctgggagcctgggacaaatcacgaaattggaggcacgatctaagactgacacggccacgaaattggaggcacaatctaagactggcacagagtagattaatcgtgggcctaagccggtatagcataatatgt

SEQ ID NO: 17994 - DNA, 898 bp, Zea Mays
atatctctcgctcgccctttccccttcgatgcaactggtgtggcggcggcggctgcgggcggcgtgatacggcaccccctcctcccgcccccttatgcaagcgggcaatcagaactccgatcacccgcacgccggcacgccagtgtcgtcttcgcaaccatgaactccatcgagcctttcaaccggctggtgaggctggcggcccgcgccttctacgacgacgtctccatgaagggcgacaaccagcccaagacttcccgcggggacaaccgcggcatggccgtcgtcgtcctggacgcgctcaccagacgaccgtgggttcgggaggaagatttggctaaagcattgaagctccactcgaaacagctgcgtcgcattctccgtttctttgaagaggagaaactagtcacgagggatcatcgaaaggagtcagcaaaaaacgcaaaagcacataatgctgcagctgctaatgatggtcaaccaattgctaaggagggagaagagaaagtaaagctgcacacacattcatactgttgcttggattatgctcagatctgtgatgttgtaaggtaccggattcaccgcatgaagaaaaaattgaaggatgaattggacagcagaaatacaattcaacactatatatgtcctagctgcaataaaagatactcagccttcgatgcactacaactggtaagctacacggatgagtacttccattgtgaaacttgcaatggtgaactggttgcagagagtgacaagcttgcttctgaggaaatgggagatggcgatgacaatgttagaaagcgcaggcgtgagaaattaaaggacatgcagcaaagaatagaaattatacatagtctgtttgcccagagtcaagaaaaaaattgactgataccag

SEQ ID NO: 17995 - DNA, 1792 bp, Zea Mays
cgcgaacgcgacgtccgtccacctcggcccccgctggtttgcgttcgcgcagtgactgaccacgcggccgtgcgggcgcgagacgggaccagtgagtcagtgaccaccacgcgctcgtggctaccggcttcgctcccagatcccgccgcgcgcgcgagccccgaggactgaccatggaggagcccacggagtccaggccagctggcgcggaggatctcgcgaacggcgcgaaagacccggaggggcctccgccggaggttgaggaggaggaagtggaggagccgccacgatcggcgacggcgaagcaggaggaggcgaaggaggtactagggtcggaggggtctcgcccgttcaccatgcgggagctgctcggcgaactcagggaggacggcgagacggcggtcggcggcagcaccgcgagatctgcgttcggcgacgggaacggggtcggatccgctgatgccgagggctcgtcctacagccaagatagcgcacagttttcatcacaccatgatgtagcgatggacttgataaatagtgtaactggagttgacgaggaaggacgttctcgccaaaggattctttcttttgctgctaaaagatacgtaaatgcaattgaaagtaatcctgacgaccctgatgcatattataattgggctctagtcctccaggagagcgcagacaatgtggatcccaattcgagttcctctaaagatgcattgctggaggaggcttgcaaaaagtatgctgaagctactcgacttagtccaactctttatgatgcatattataactgggctattgctattgctgatcgggctaaaatgcgaggtcggacaaaagaagccgaagaactctggaagcaggcaatactgaattatgagaaggctgtccagcttaattggaatagcccacaggctctcaataactggggtcttgggctacaggagctgagtgcaattgttcctgcccgggataaacagaccatcataaaaacagctatcagtaagttccgtgctgcaattcagctgcaatttgatttccatcgggcaatatacaacctcggaactgtcttgtatggtttagctgaggataccatgagatctgggaagccagatgtctccccaaatgagctttacagtcagtctgctatctatgttgcagctgctcatgctctgaagccaaattactcggtctatcgtagtgccttgcgactagtccgctcaatgttgcctctgccatatctcaaagtggggtatttgactgctcctccagctaacaattccatcgcaccacacggggattgggaggtatcacagttcattttgaatcatgagggcctccagcaggctgatgcttctgaccagcctccatcgcaatcccctgggcatttggacaggggcagaaagcctgtcagaataaacgttgcagatattgtttcagtgtcagcatgtgccgatttaactttaccaagtggtgctggcctctgtatagaaactattcatggtcctacgttcttggttgcccatagttgggaggctcttgacggctggctagatgccatacgccttgtctacactatttttgcgagagggaagagcgatgtgcttgccggtattattactggttaaatggcttgctgcaggagggaagagcgatgaactagccgggtgttgttactgccactggagaggcgcgaagttttggtgattcagcgtcagccttatcaggagtagaaaactcagccatcgcacgaaacctacaagcaaagaatggggttgtttggttgggg

SEQ ID NO: 17996 - DNA, 2908 bp, Zea Mays
gagatagcgagggcatgtggcgccgtggtgccaaggatttttccaccacacacatgcatccttttggatttgtttagttcataagcccttcagactggcagatatcaagaggtcatacacatctcgcacctctaagtgggtgtgggtctgcaacaattctgcaaccaccttatccttgcctttgggagtaagcccgacctacatctggaggcttcgtcgagccttggaaggcctttttgttgattacggctaatttccaatggcagctgagatgtaacaaatttgctcagttcagttctctaggaaaagttcccgtggttcagcaatgtgattggtttcataggttttttcgtgtgttggtgatcaaagcaatctggtgtaagcttgcgtagttgacatcagagtttgtttcttatggttaggttcttttgcttttcatcctctactgcacatcacagatccaaggaggttttttccccagcagatgaaaccatgcatgcagcgtcaaagaaggattatcagttggagtccatgactggctcagttcgttcaaaccagatgacagaagaaaataaccgttcagctgttagtggtcattgtggcagtagcccatcatctcatcaagaatgctgtaggtcagaagacttgaatagatatgtgtgctctgatgagggcaaggaggttgggcacctaaagaagagtcagtcgcttgtaaacatgcttcaaaaggatcatggtcgtaattctagcgaaggctctgaggttgatgttacaaaccatgaacacaaatatgatccctctaatttgaagagatctgaagttgttggagaatctagtaagctgtacagactgaaaaatgaggatgattttgatgcctcatctgacctaatcagccatgacttttgtgaacctttaggtgatcacactgttgattctgatagccatcatgacatgccttattcccaaagcaatctcccaagatcacaatctgcaatatttcagaatgattgcaccagtgatccagaaggttctgtcgattctgagatactagggtgcagatctgttgacggtttatgttcactgactgatgagaaatttgactacctgagaggtggtgaaatgtatcactgtaaatcaaatttggatgtttattgtgcaccttctccaaatatgcaccgggcatcaaacattgacgaccatggttcagtaggttgctctgatgttgctgcagagggtcaacggtccactggaagcacagaagaattttttgtcagggatgggatcctagtaggtcacgaatactgggatggcaaatacatttgtggcgatcactcgctgggtccagttgcccttttctgtgcagattattaccattctgggaatgatgtcgacctcagtgaagctacaggtcaagagagagagctgtcgaacagagatagcacactccaccagtcgcttgtagtggaagtacctgagtcggtgagcatttctgatacaaacgacattagtggggaacctgaacacagtagaactgacattgatgaggacccaagtgaacttactccaagaacctacaatattaaaagaatcgaggattggatcaatcagattgatatcaatgatatcgctttggatgggcaaggagagaattcagtttctgctttagccaaatctcgtgaaccgatggctggcgttcctgctgtgcggcctgatgctaaaagcccgcttggtatggagatagcttacacttatatttcgaagttaactcctgcttcatcatcggcacagttggcaaaccttggtttggttgcgatcccaagactgagcgcattctcaggtttgcgcgtattaaacttatcagggaactcaattgtgcgagtaacagcaggagctcttccaaaaggccttcacatgttaagcctgtcaaagaataacatatcaacaattgaaggccttagagagttgacacgattgcgcttgttggatatcagctataatagaatatctagaattggccatggattggcctcctgttcctcgttgaaggagttatatctggccggtaacaagatcagtgaggtagatggtcttcaccggcttctgaagctcaagattctggacttgcgccacaacaagatttctacatcaaagggcctcgggcagctagctgcgaattacaactctctagaagccattaaccttgccggcaaccctgcacagaagaatgtaggcgatgagcacctgaagaagtacctgcttggtctcctgccaaacctcgctgtgtacaacaagcagcctattagggcgactggatcaaaagacgtctcggaccgccatacccgcaagatctcttcttcgcaccattctgaccgtggtggcagacccgaccgcagatcttccaggttggtgggtgccccgtctgctcacaagccacagagctcgcggcatggacgctctggatatgtgtcaagctcagcgctcaagtacacgagagcccgcaacacgcacaagacctcgctggggtcaaggccccttgaacatgcgagtgccatagatctggcgaagcaaacccagacagagggaaggacacagtaagatcagtcaagcacgaccatcgatatactaccatggtattgttgtgaagtaaagcgaggcaccagttttgctggtggattttttttctctctcacgtgaataaagctcaaaacagtaaacagagcagtgctttcatatcagcccatatttttttttctaatattgttgagtggtattgatggcaattgggaattgtatgatttacttgccttatgaataaagcttgaaagaaacaaaataaagattagtattttttttcaagatgtcttctataagactgtactattgcttggtggtgaaattttgtgaacat

SEQ ID NO: 17997 - DNA, 1618 bp, Zea Mays
ctcgcccacacgcgaaggcacctagcagccgccactcgccgaactgaggaacacgccgggcgacgggatacagcagcagcgcgcccctctatccccgacgcgacggcgccctgcagctgcagataaacctgttccaatggccaaacaaaaagagggtgtggacaaaagaactgctaggaagatgatccgatctacggaaggctgtgcaaagagcattactttggagaggaacaacaaatcagacgatgtgcagcttcacgatctgccgaatgacatcctaggtagcatactatcacggttgacattcagagaatcctcacagatgggccttgtttctcatacctggcggcggctgtggagaagctgttgccggaaactggtcttcaccagtgccaccatgttccaacccggaaataggagcatcaaacatacaaggaccaactttgccatgagagtcaacagtttcttgcgtcagctacgcactcatcctactcttaataagtttgttattaagttcgggctgcgcaggaagcacactcgccatgtcaacagatggattcgcttctgctccgtgtcgcgagcaagacacatcactattaatttcactcctggagtgaaagattttttcatgggtccagccaacagcaagtacatcttccccctgaacgttttcagtggtccagaaggctcctctacacatgtcagaactcttcatctgggctatgtctgtctggacacaacctcgtctgatttcatgatctttgcaaatcttaagaagctcactctgcacaaaatttcctttttgggagacctccagtgcctgatgctgccagaatgcaattctcttgagtgtctgagcatcagcttctgttccttgcctggtttaagcacatgccaaccgctgcaacgtctgcgatgtgttcgtttgcactactgctatctaaaaaagattgagctggaagctccaaatctaacatcgtttgacttgaccaaccaaccaattccatttgtgcttggtggatctctgaatgtaatggaagccaacattaaactgttagctaaggactcaccttatggtgataatctggactacatctacactgagcttcctgctgcgctgtctcatgtgcataaactctcgataacctcgggtctcttcgtttatgatcagctgcaagggttttccaaaacctcagccagattcatcaatctgaggcatctgaccatgtatttgcctctttatggggaacctaagtcaattagtgggattcttcgcttggcctacctactggaattggccccagctctagaagaattggaattgcatgtgaatggcggtggcgtggatgttgggtgggcactcagacggaatatgttaccgtactcacacaataggctcaagagggtccttatttcaggagccactgtatgggaggggctaatggagctggcatactacattcttcggagtgccaatagactcgaaagtatggtcttagatccaaagataaggattgggggtcctcagctggatggttggatgattgatattggtagggagacgatcaaaaatatttttgagggagaggagtttcagagcattattactattctgtaa

SEQ ID NO: 17998 - DNA, 269 bp, Zea Mays
  misc_feature (1)..(1): n is a, c, g, or t
nttgatgtttgtggctaggcggcgagctatggtaggacggtggttcgacgggcgctaacgaattacggtggtggtgctccccatgctccgatccagggtgcgcacccagcggtgcctcggcatagagcgccggagccggtgcttctaccgctgggaaggcatagcgagacgatgcagcgctgcagcaggaggagaaaacagcggtaagagcaacaaggagggcaaggcccttcatgttcgtgatgcccatgctttggttttggcttgcc

SEQ ID NO: 17999 - DNA, 1300 bp, Zea Mays
ttgcagcccaacccgcactcaccaacagaaagggaaaagaccatcctacccacgccagctccggagttccgacgcaacttcccattccgatccacatcagccccgtcgctgtctctccaggatctggagaccctacccgcctgagccctcagccggccgcgcggtgcggcaccgcaccaccgccaccgagccacgaacccgccggagtaccgacccgcctgcgccctccgctggccgtgcggcgtggcagcgcaccacctacggcgggctgcggcaccgccccggccctcgcaccagttccgcggcgacgtggtccagcagcaccgccaggccgcctacggccatttcactcgcggcttctgagcatctacctgcacttcttcaattacctgcagctttcatcgtatttcctttgcattgcataccgtgcagccacctctgcacatgatgtttcggatgttatcttattattaaaaaactagatttactcatgtttttcttcctctgtcattattgctgatttggtaactaatctttctgtggggtttatgcactgttaatttttccctgtcattttaggtctaatttgtattcgacactctcatcgtagtaactgcctcataggttttgtgccctctgtatacatctctatcggctccatgtccaaggcactgcaccacccttttgttatcaggttttaaaccggcttttggaattgtacacatggatcaatttgtgggagtggaaattagagcagatttctgtgcttttttttttccagcacatctgccagactagtatcatcagcaattgtccatcgcagcatagggaccccaaacaaaagttgaattgtacacattgaatcacatggaatgagccagatgcaatgagggctgcctgaaagtgtataggcaggcagagcacagcagcaactttcgcgttagatatttgcggatgaatagggcggcgaggaaactatctgttgacctggcagggcgctttgcggcttttcctgtgtatttacgcccgctacctcacgctcgaggttccaaaaggcggaacggctaagggggagtggcaacgactgccacaaaacccacctcgtggtcattgctttggaatccccttccctttccctttagccaaagacgctctgctcagcataaagagaagggcgggcggcatcttctcctcccttccctttgccctaccttttgctatactacaagagcttcaaattctccgccttcattcatgcatgctttctgttggcaaacaacaaacatactagcactgcttt

SEQ ID NO: 18000 - DNA, 1107 bp, Zea Mays
ctcaaagacgtcctttcgcagttggcacacatcagagtcctaccaagtggcaccaaagctcgttctcccgaccccgactgtccccaatgcgcagtccgcgaggcctcctcaccgcctccggctaccttgcgggccggcacgctccgtcgccctccgtgtccaccactggccacaactccctactcgctcgcaccttccaaatcctagcccagccggagtccgtccgtctgcagaagcacccggcacccaactccgggatcttagagctgaggctggagcggccggaagtcaagaacgccattaattgggatatgatgaggatgctgcggagcgccatagagaagattcaggccgacacgacggcgaaggtcgtccttgttgcgagctccgtgccgggggctttctctgcaggcgccgatctcaaggaaaggaggctaatgagttcttctgacgttggggggtatgctagatccttgaggtctacattttcgtcttttgaggcacttcctattccaacaattgctgtcattgaaggagctgcccttggtggtgggctagaactggctttggcgtgcgatcttcgaatatgtggagaaaatgctgaacttggactgccagaaacaagccttgctattatacctggagctggtggtacgcaacgccttcctaggatcatagggaggtccagagcaaaggaactgatattcactggccgcagatgtggtgcagctgaagctgtaacgatggggttagcaaactattgtgttccagcaggagaggcttaccagaaggctcttgacattgcctgtgagataacccagaagggtcccatggggataagaatggcaaagaaggcgatcaatgagggggcagaggttgccgacatgtcctcggcgctggctatcgaaggggagtgctacgagcagctgctttacacgcaggatcgcgttgaggccctagctgcatttgctgagaagaggaagcctgtgtacacaggaaagtagtagtgtcagaaaggatgataatcgtcttgagagtctgctacaagcagagatggtggcaatggataccccaaatccatacatccaatagccgggttttgttttt

SEQ ID NO: 18001 - DNA, 1343 bp, Zea Mays
cgacttgctaagagagttcatccccaccctgctagttaccctctttgtgatcagaaaggtgtatcattgatcatcaagctcttccccgcctcctgaatttattgacacagaaccacaagaaaagcattaagaaagaggcatgctggacgatttcaaatattactgctggaaacaaagatcagatacaggctgtcataagtgctggtattatcgctcctttgttgcaactgcttcaaggagcagagtttgatatcaagaaggaggctgcttgggccatctcaaacgctacctctggtggttcccatgagcaaatcaagtacttggtgtctgagggctgcatcgtgccgctgtgcgaccttcttgtttgccctgatccgagaattgtaacagtttgtctggagggtcttgagaatattcttaaagtaggggagcacgacaagaccatgggcgcaacaggtgacattaatgttttcgctcagatgattgacgacgcggaaggcctggaaaaaatcgagaacctacagagccatgataataatgaaatctatgaaaaggctgtgaagcttcttgagacttactggatggaggaggaagatgatgcaatggctactgctggggaagctgctcctgctgtttttgactttagccaaggtggcaaccctcctggtggtggtttgaacctcaactgaatacagtatttgaccaaaagggtgttaattccctcatgacaacctagtctggtcgattccatgtgggataatggtttgtggttggtccagtaaattcgagatttcaagggagatgggttagcattattcccaagctgtcatggatatcagtatcgcagggtctgtaacaggaccataatcgtcgaacatgagtctgggtttttgagcaggctactctctagggtttgcgtcatttatgttttatatctggctactgtatagcctgagtctaattatctgcaatgccgtaggacattcctgagtggtttggttttgaggttcctcaggaatggtctgcgttgcaggttgtccagagttgtaaaccttcaagtggtttgagtatattgctcggccttgctttactacggtcgatccaacctgttggaggccaaatgacttataaaaagctgttggcagctgcattgttggcggttggtgataaaatttgtagggaaaaataaggcgaaggttttgacttttgaagccaaattcaatttcgagttccacgcagtaacggaggctgatacaatgccctttacaactcaaatacaacaaatttccgctcaacagttatgtgttttttttgacatttacaaagcaatacctcggtccaat

SEQ ID NO: 18002 - DNA, 2696 bp, Zea Mays
ttaactctcctcgcctccgttaccgtcttccccctttccacctccccccaccccgctgtgctcatccatcgaccgcgacgagcccccgcccgccgattcgactacgtttattttttttatttcatttgatttgattgcaaagcaccgcagcagcaggaggaggggaagggagggatcgttggaccgtcgttcggctggatggtggaggcggttcgtcgatttgagggcaccgggtttcttggacctgcgtaggtaaaaaacaccagccccatttccctctcggccggcggatggacgcgagggaggtgtgaagcctggtcgctaactgatgctcgtggagagattcggaggagaggagcgcgccgtgcggaggcggtggaggaggaagcgccgacgatttggacagcgcagcgacggaaggggagcagcaggcggacgaggagcgagccgccaggaggacgacggccgccgccgccgccgccgccatgggcgagtcgctgctcaccgcgctctccatggacaccgccacagcccaccacccgcaccagggcccctccaccttcctctccatggacaccgcctcccacgacgacttcgacctcttcctccagccacaggggcccttccgccgctgcctacatgccgcggcggtcgccccccctgacatcaaccttcccctagccgccgacccgtctccgccacctctggcgtcgctcgacgccaacgttgacatgctagatgtcggcctcggcggctcgcagcactacgactcggattcgcccgctgccgctgggccagtctcggccccggcagcagcagcgaccaccatggtcgccgtgtcccacaccaagggctccggttccagtgctgcgcgcaagtgtgtcaagaggaatgttagcatctggggagcgtggttcttcttcacccactacttcaagccagtcatgtctgcggacaaggctggcaaagcgaaggcagccaccaccaccggcgggaacggcaatagcgccacactggacgctttcctggtgcagcacgacatggagaacatctacatgtgggtgtttaaggagcgtccggagaatgccctggggaagatgcagctgaggagcttcatgaatgggcactcacgccttggggagccacagttcccattcagcgcagacaaagggtttgtgcgctcacaccggatgcagcgcaagcactaccgtggcctctctaacccacagtgtcttcatgggatcgaaatcgtgagggcgccaaatttggcgggtgtacctgaggctgatttaaagaggtggatgcagctcactgggagggacgccaatttctcggtcccaactgaggcgagtgattttgagtcctggaggaatctgccgagcacagactttgagctcgagaggccagcaaccgcggctcctgcaaagagcagttcacatggacaccacaagaagttgctgaacggttctggccttaacctctcgacgcaaccatccaatcacagttctggggatggcatggagatcacagccacctgtaacaagcgcaggaaggattcctcaccgaccgcaatggaagaggactgcagcaattcgaattcggacaaggcccaagacatggatgtgatccacaccttcgagccatcatggatgaatgacttctcaggtgtgatgcgccatgcttctggaccagtaaccgctgcaaaaacaatatacgaggacagcaagggctacttgatcatcgttagcctgcctttcgctgattttcagaaggttggcggatcctgctcctgagcattgcccgccgggagagtttgtccgggagatcccactccctacccgaatccctgaagacgccactctggaagcgtactgcgatgaaacagggacagggctggagattattgtcccgaagttccgcgttggccctgaagaacacgaagtgcatgtgtccatgaggccaccctcgtcctggtgccaatgaaacctgtttccaagcttgcggggggagacacacatacggtgtggaggtttgccgtaaggctaaggctactgcacaacaaatgcagctcagttttgctaattttgatgggaaacagtccttgattgattgaagcattctggtagttggccgccgcagcgtttggaacattttaggaaatatgctacgggtcgcaaggaacatgcttgcattacttagttcttgtatggggatacacctagtgtgttacatttcgtttccgttgtgtcgaaagactggttgtctgctcgatgtgctgcaatccgtgcatcgcccacccgtcacgagcaacaatctgtttgtgttgtacacagaatggcaactggatgtataggggcatttatagtcattttccatagattgaggtttgctttgtgggcatcgtgtaaaattcgtctcagattgatggaaactaggaagaaaaagaagatggcagtgtctttaggatttggcgaagttgtaatggggattaggcggtgctgtagcattctgtctagtttccaggaatttgtagaagacaaatgtaaatctgttgttccgtcatcaatatagaaaagtggtctgtgtctaccagcaaatgccttgtgtacgatcttaaccatccagcacgttttgtgccgtactttaatgaggcagagcccacgggtgttgttgcgttctggtctcaactcatgaga

SEQ ID NO: 18003 - DNA, 169 bp, Zea Mays
cggcatgtggcgcggtcccgatcccgtggacttatcgggagccgggagagggcgcccaaccggcaaccggtgggcacgggcggccatggtttggcttctccggcctccgcgctctctcgaaaccagccgcgccgggccacgggctccgattctgcgagccatagctgcc

SEQ ID NO: 18004 - DNA, 4788 bp, Zea Mays
cccgaatccccaaccattcgaacgccacggccatccccctcgaatcccctccaactcgaacattccggaatccatggaggccggcccccaaaccttctagagcgtgcttctccggtcgccatgagccgccgcgagccggacacctcccccttctgcgacctctccaacctccgcaccccgagacccaaccccaaaaccgtacctccctcgcctcagttcttcaccgcctccaaatccgccctccaggctcccactccgacgtcactccgccgccggaggcctggcgacggcgtccctaccccgacgcccctcggccgccgcctccacgccctcgaggtcgaccagtcgcgctccgcccgccgcgccgagtccggccgtgagcgcgccctccgtaccttttccgcctccgcctcgtcatggctatccctcctcctacgcgacccctccgcctgcgggtgcttcccagggttcaccggttccgccgcggccgcgcagccctgggctacggggaaacgcggcgcgctcgatggagaccgggcgcgtggggggcgcagcccgaagaggtgccgcggtggtggtgatcgcggcggagagaggagcaaggagatgacgccggcgatggtggccgcgttaagggaatctcttaaggatgcgtgcagcctggaggatgtcacggagaggatggagaaacacatgagtaagggcgcgtgtgaggaggtgctctttatgatgtttcaaatttgtaagaacatcgatgaaggcagattgaagatgaaagcacggtgcccccttgttactgaccttaggctcaaagagaaagcaactagggttttcatgtcctacaatccatattggctcaggattggcttgcatattgttctcggtggtgattccttgctgcagactggacaaggaaaacgggacaaggaggttcattttctaaaactaattttggagaagcatatgctttctcaaatcatgactgcaaaatcatgtggtaacaagaagctggtagaagagcaccatgtacaaggttacagtgatgtgctgggcaatattatattgaaaagaatttttcttcttgttgttgcactagacagaaccaaaatagaaagtactcttcctctcgaagctggaatcgatggccttgatggtggatcccctcttttattttgtcaccaaagtcaaataaaatctagtcgtcaaatcattcaagagtctttgagggagaccatgcatggagaaggtgacattctggtacacctcacaactatgggatataaactaaattatcaacagcctgctttgtcagaatatgatttcacaatgaggaatttatttgaagatctccaagatggcataattctttgtagagttgttcagctgctcctcgcagatgcatcaatcatttcgaaagtaattgttccctcagatacagacaagaagaggcgaagtaactgcaccactgctatacaatatatcaaacaagctcgggttccattatctgattctgatggagtcacaatttccgcggaagacatcgctgctggggataaggagcttattctttcactgctgtggaatatgttcatccatatgcagctaccgttgttagcaagcgcaacctcgctagctcgtgaactaaccaagctaaacgtacatgtaacggaacaacaaatatctgagaacaagccacacatgggtttgctttacaattgggttcaggcaatatgctcaaagattggcatgactgttgaaagttcatctcagttagacagaagagcactgaactgtttcatcaactattatttgaatattgatatttcccccttcaaggaaacaccaactggatgccgaaaggaattgttcacctgtcaccaacttgatactatatcagatatcgctggctggccatccagcgagatggggaaagtactctccgatgttcttcaggcagttgatattccagctagtggcatcctagctgatggtgtattatttgatgagaggagtaccattcttttgctagcattcctatcttcgcatctgactaatgatgaaagattggatcaactaaagaatttgatcaacatgaggttgtacaagagtgcggatactaagattgcagcaagacgtatatctcgaggaaagattgatataaagtatcatccatctcagacagataaaaatgatggtgcatgcaccaaccaggagtgggctgcaactattatacagactcaggccagaagtcttattgcaaagaataaatattgtgagcgtaagaaggcaatatttatcctgcaaggtgctttaagggcatggtcagccatcatctcgaacaggaaccgtagttgtctaagtattgctgcctctattccctggcaagcacaaggaaacaacagatatttcatttttataatggaaaggcatcgatttgttcagatgagaaaatctgccattatgattcaactggctgtaaggatttggattagaggaagaaaaaaatttaagaacagtgattctttcaaaagctgtgagttccttgaaggtaaaactccacccaaaattagtagcattgctccttcccctcaggagcattgtagtggtggagataaaacaatagcttcgcccacagcatgcaagcactgtgagcatgtgctcacagtgagagcttctgctgctgctcctattctttattttgatggcatggacagtctagactcaacaactccactacagtttagcggcaatcaaagcaactttataacttctaccactcagctgtgcaaaagtgagcatgactgtcggtcgtgtgtggttgagaaatccaattcagtttccgtcagtaagcttgtgagtgcggatgacattcagtgcagcagcagtatttgtttccctgtctgcaaggaactagtggctgctcaaacgatacaaagtgcatacagaaggtttttgaacaacagaaacaggataactggtgcaattaaaatccagagccactggcgatgctattcagtacgcaagtgtttcatgaaggaaattcaggctattgtaggaatccaaacatcaataagagtattcttgtgctaccaagcttttcaacgccaccgacttgctgcagtactgattcagcgagttgtcagaggatggctggctagaaagagactgttaggttcctcttcactgcgaacctacacaagactttgtgtagtcgaccaaagtcaaaagagaaaatgttatcaaagccttgagttgaacattgtgctagactctgtcataaggctacaaagatgctggaggaagttcctgctgcgtcagtctgtcaaaacatatgtgatctcaattcagtcttttgtccgtggctggttggcacggaagcaactaaaccaaactttccgttgcatcaacatcattcaaagatggtggcgaaaggttcttcaaacgaggaagcgagctgtgattgtcattcagactcgtttccgtggttgggttgcacgacaagatgctattagaactagaaactctatctgtaacatacagagatggtggagaaaggttttgttccttaaattgaggaagcaagcggcgttagttatacaggctcatttccgtggttggatagcacgacaagttgcttttagaactagaaaaagtattactataatacagtcctatgtcaaagcctaccttgtgaggaaggcttcgaagcaagaagttgcacatataagatctagactgcagaagtcatcttcacaggttgatgatagtatgcgcctgatcaacagactggtgtctgcattgtcacaactccatcgctgtcggagcatacacagcattcgtcaaacttgtgcaacattgagtactgctacagagtattccaagaaatgctgcgagaagctggtcgctgctggtgctgtagatatattgctaaagcaaatatatttgctgaaccgtgggattgctgaccaggaggtcttgaagcaagtgttccttactctcaggaacattgctcgatattcaaatcttagacaggtgttagccagcactgcagaatctgttgaaatcatcttccaggaattactgaggaacaaagcagacggattcttcatcgcgtctgatattctaaaaagcctatgtgaatccaaggaaggccgtgaaaccgtccaagcgctgagtcacctcatcaaaaggctgcgcaatctggtgcatgacctggaaaagaaggtagagcttgataagaggaatgggcgcaccggagccgtgaaggcgaccaacctgcggcggcttcgggaggccgccacactctatcatatcctcaccagtggtacttaacgcgtcggcagcatagctagaaaggctaatctgacgttttgttgtacaataatttagtctaagaaggttttcatgtaactggaggtgactacggtgcaattgtcgaaaaccttcctaggtaaccaggatcttctaagttctgttgctgcagttggttttgtgtggtaggtgtgagaatcatcggcttgatgtattggattacctcttataaagagtgaagtcgctgagttaaccgtcctcacgtgtcttggattaaccgccttttatgttctaacaaatcatcagctcttgatgtgattgttagtatcacataccagtaccaaacagaaaaacgagtcatcctattcattaacttgcagaaatggattttctgaaatagtttttttttgcgtaatatataaatctcaaatcgcggaaggcaacatcgatacagctaggcaccagtttacaacaaca

SEQ ID NO: 18005 - DNA, 1491 bp, Zea Mays
aagcacgccgatccctctttctttccgtcgtcctcctcgtcccaagttctaacccggccgccgcacatcgccaaaccctaactagggttttgccaagccctctccttccctatcctcacccccatggaccccttttccaagaagcgcaagcccgacgagaacggtgccgtcaccgcctctcccgccggtggggctgccacgctgggcctcacccgcgacgacgtcatccgccttctcgagccgctctcccgggaccagcttgcggacatagcggccgccgccgcgctcgtctcctcgcaagcgctcgacgccgtgcgcgcagccgccgaccgtgacccggccctccgcaagctcttcgttcgggggcttggttgggagaccacatccgactcgctccgcgccatcttctccgcttacggggacctggaggaggccgtcgtcatcactgacaaacccacggggcggtccaagggctacgggttcgtcaccttccgccacgccgattccgccgtcctcgcgctcaaggagccatccaagaagatcgacggtcgcatgactgtcacgcagctcgccgccgccggctcggctggtgggcccgccggtgggcccgccggcagtggcggtgctcctgtgtctgatgtgtcgctccggaagatcttcgttggtaacgttccggcagacatggcatcagagcgtctccttgcgcattttgcctcctatggcgagattgaggaggggccgctgggttttgacaagcagacgggcaagttccggggttttgcactcttcgtatacaagacaccagaaggtgcgcaggcctccctagtggacacggtgaaggtaattgacggccaccagcttgtatgcaagcttgccttagacgggaagaaggagaagcaggggcaatcacagcaacctggacctggcaatcaccagcagcagcagatactgccgggtggtccgcaggacattcagggagggcttgggcttgggtcacaaatgggagcacagtatggtgtccctggtactggtatgccttcatttggttttggtggtgttggcggcgggtttgggggtccaaatccttatggtaacatgccatcttccatgggtggaggtggcgcaggtggtttagggtcgatgggaggccaggtgcccagtggtttggctagtgctggggctggtgcatttgggcctggcggattgggtggtggttcatttggtgtatcatctcagttcggtgctgctgggatgggggcatatggtggccttggaattggtggaggctctatgtaccgcatacaacagggagcaggtgggctgcctgcaggcacatttggtgatggagggagctacccacctccaggttctggtttccggggccaggaccctcaaggtggaatgtctcctcctggtccaggtggcagggctcctcctatgtatcccaacgtgccaccttatttctaagtggtatggtgagacaaggcattg

SEQ ID NO: 18006 - DNA, 1359 bp, Zea Mays
tttctgactcttcaattacacattgtttgatttgaacgcatattatcttcatcaagtgccagtgaaaatggtgaagtggttggtccggaagacattactgtcaggagtagttctgaactggtgaacaagacttgcttgactgaccatgccctgcaggaaaatggacatacaagtggtgatatttttgtgccatctcaggcagcctccacagagcttagcacaatatctatgcaggatatcagtgcactcagtgaagttgaaattatgcaaaccgaagatgctagtgcaaaggacatgactgcagtatgtagcattgattgtattgaaatgaaacaggctatcaacactacagcaaatgatacatatgcagctattgttgaagaaaagaagttgattgaaggcaccactgcaaggatgaatggggtgcgagagacatattatgttgaagaacagacacaagctagtgacacaaaggagttgagtgcagtacagaacatagggaattctgaagaaaataagcagactgaaaatactgatgcaaaggagactaatgcacggtttaatgcaaacgatgttgagcacaaaacacagactgcaaaggagattgctgcagccgaaagcacaagcagcgttgaagagaagcagcagctaaacatcgtggttgtccaagatggaagcaacaagaagatgaatgaagagattgcatcgacaggtgcccaactgaattcaggaagagttcgtgtcccgctgaaggtcctcctcgccgaggcaagcatggagaaccaagtgaagaaacccagcactaaggaacgaatgctgtcgttccggcgccaggtgaccaaggacaacaacttgtcagtgaaatcggggtcacgcaaatctggccctgatgaccaccattggagctccccagccaaactgccacataaggacgttgacaagatttccagagaaaagaagcagccgtggatgccgttcatctgctgccactccgtgcgctgataatatattttgcatcagttgacaactctacatacatgtgctgctgtaactaatgctatccgtctttgtgtagatagtctgcaatctagtatctgatattttgaatcagtgcaattttgatgtatccgctacctgacttgttagacatttgcgcgtgaatctgtcctgatgttcagattcagctagtgtttctgtggactgaacaggcctggaatcttgtaccggattaagctcggtgtggcctgctggtaattttgcggcaacgaaaagaagcaaagtgaaattaacgaaacgatttcatgttcatgggactgccggatctgatgacagttggctggagagtggggagaagtcaga

SEQ ID NO: 18007 - DNA, 2556 bp, Zea Mays
cgagacatgacgaaggccgtgatgcgagagcgacaaaaaaacggcctcggcggcgccggcgtcttcggattctccgcccgacgcgcgccttatttccttccctctcagtctccgcgccgtcctgccaccctgcgtttcatcacgctcgcaggtttctaacaccaaggcacctgccaataaattttgcctactggcactccatatattagaagcaatatgaatccgtatttcttgggattcattctcccttttgtggcatctctgctgcttaccaagagaaagtccgagaagaagaggggggtgccagtcaatgtgggtggagagcctggctgcgccatccgtaaccacagatttgaaagacctgtcaagacgcgctgggaggggatttccacgcttgctgagctatttgagcaatcgtgcaagcagtttgcctctacacccctgtttggcaccaggaagctcattgcaagagaaatggtagtggctgctgatggaagatcctttgagaagctccatttgggaaactatgagtggagaagctatgctgatgcattcaaaactgtctgcaatttcgcttctggtctactgcggattggacacctcaaggatgagcgtgttgctatttttgctgacacacgggctgagtggcagattgcgttgcaggcatgcttcagacaaaatattgcagttgtcacaatctatgcctctttgggggagggagcgctatgtcactcactaaatgagaccgaggtaactactgttgtatgtggacgaaaagaatttaaaaagctgattgatataagtgggcaacttgacactgtgaaacatgtcatctacattgatgaggaaggcatctcagttgaagtgtccttggctgaaaactgtactagctggacagtcaagtcatttgaagaggtagagagtataggcttgcaaagacctgttgaagcaaacttgcctctcccatcagatactgcagtgattatgtatacgagtggaagcacaggaatgcctaagggagtcatgatgagccaccaaaatgtcttggctgtagtttcagctgttatgacgattgtgcctggtcttggcaagaaggatgtgtacctggcatatcttcccctagcacatatccttgaattggcagctgaggcaatcataactggtgttggggcttcaataggttacgggtcacctttgaccctgactgatacatcaaataaaataaaaaaggggacgcaaggtgatgcttctgtactgaagccaacgctaatgactgctgtacctgctatacttgatcgtgttcgtgatggtgtacgaaaaaatgtagatgcaaaaggtgggttagcgaagagattatttgatattgcctatagccgtcgtctagctgctgtcaatggaagctggttgggtgcgtggggactagagaagcttttgtgggatatgctcgtcttccgaaaggttcgtgcaatcttgggaggacggattcgctttattcttgcaggtggagcacctctgtcaggggaaacacagagatttatcaatatatgtcttggggctccaatatctcaaggatatggcttgactgaaacctgtgctggtgggacattttcagagtatgatgaaacatctgttggtcgcgttggtccccctttgccttgttcatacattaagttgatagactgggccgaaggtggatacttaacaaccgattcaccaatgcctcggggtgaaatagttattggaggtccaaatgtaactaaaggctacttcaaaaatgaagcaaaaacaaatgaggtgtacaaggttgatgaaagaggcatgcgatggttctactctggcgacattgggcgcttgcacccagatggatgtcttgaaattatcgaccgcaagaaggatatagtcaagcttcaacacggtgaatatgtttctctaggaaaggtggaggctactttgagtgtgtgctcatacgttgaccagatcatgatccatgctgaccccttccacagctactgtgtggcacttgttgtaactgcacagagtgagctgaaatcctgggcctcaaaacaaggaatgacatatagtgatttctcagatttgtgccacaagcaagggacagtcaaagaagtcctccaatctttggtgaaggctggtaagcaagcacggttggagaagtttgagatccctgccaaaatcaagctgataccggagccgtggacgccggagtcaggcctcgtcacggctgccctcaagctcaagagggaggtgatcaagaaggcatacgagatggaccttgcccagttgtacagtcagtgacctgccgctacagtttctcaacgataggggtgatcctggtagctaccggcaacaacagttttttttatttgtacctcgtactatgttcctgtctttcttttaagacaatagttgactggtaaatcagttgccgataatgtgtagccttccattgcccgcccaaagagaactataattagcccttatttatttggctattatcatattcacctcaattcaaatacgttagccattataattgaa

SEQ ID NO: 18008 - DNA, 1645 bp, Zea Mays
tgttatgccgttatgcgtcaggaagagctactacgacgtgctgcaagtgcccaagggcgcgtccgaggatcagattaagaggtcgtaccgcaagctcgcgctgaagtaccaccccgacaagaaccccgacaacgaggaggccaacaagcgcttcgccgagatcaataacgcttatgaggtgctgacggaccaggagaagaggaagatctatgaccagtatggcgaggagggcttgaagcagttccaaggcgggggaggcggtggcggtggaatgaacattcaggacatctttaggaacttttttggtggtggtggtggtgggatggaagaggaggaagaacaaattttgaaaggtgatgaggtgattgttgaactcgatgcttcattagaggacttgtacatgggcggttcagtaaaggtttggagagagaaaaacgtcataaagccagcaccaggaaagaggcgctgcaactgtaggaacgaagtttaccatcgacaaataggtcctggaatgtatcaacagatgactgagcaggtctgtgaccaatgtccaaatgtgaaattcgtacgagaaggtgaattcttgactgttgatattgagaagggaatgaaagatgcacaggaggttttgtttttcgaggaaggagagcctaagattgatggtgaacctggcgatttgaagttcaggatccgaacagcaccacacgaccgcttcaggcgagatggcaatgacctgcatgcaacagttacaataaccctgctgcaagctctggttggtttcgagaagaccattaaccatcttgataaccatctggtagaaattggcaccaagggcattaccaaacccaaggagatcaggaagttcaaaggtgaaggcatgccactataccaaagcaacaagaaaggtgacctgtatgtgacattcgaggtgttattcccaaaaaccctaaccgatgagcagaagggcaagcttaaggatgttctcgtgtagaccattgtttctcacatctatgctgctgataatttgaggcgagagcgcctcgaggaaatttttctcagtagcttgcataggaagaagctactgctgcgtttcatgtatgtgattttgcattgcaaatactagcagcctgcctggtcttctttttctttcccttttggttttgtcatgcgcccttaacagctcagtgtagttttagaaagcacaacaaaattgtaccagaatatttgtacttacggaattctgaatacatagattgtagaacagctcggttgcttgcatgttctatgcccaatggccgctgctaccggtgtagggatggcaacagggaattccccgccggggaatagctccccgtccccgcgacgaaaaaacttccccgcggggatccccacgaacgcttgcggggagcatttttttcccatccccgttccccgcggggataaatccccaacggggatccccatccccatttaaattacaattaatacatacatactttgctattaatgttaaatattgtcacttatacacattatcagatataagaaatcattatgcatacatcaaaatgaacacatttgtacaattagtggtctcttgataaggtaattatttatttttgtcgttaactagtacacaaaaaca

SEQ ID NO: 18009 - DNA, 872 bp, Zea Mays
ctctcaagtgtggccaccaccatcagggagagccaatatgcagtttctacaatcgctacggcatgtgcaagttcggtccaaattgcaaattcgatcacccaatgggaaatgccatgtacggccaggctccatcgccagctagcgaggccccagctcctcggcgcatgctggcacatgtaccgccgtcgcacccagaagcatcgcctgatggtggttccggaaggtctaggaggattgcccactctgattcccagcaaataccctctggtgaaaggagcgctgagagagaggcgtcctaggccatcctcggtgtcttcgttccccattcttgactggagtaaccatctgcaaccaacaacattcgaggatccgaagctgtacaggtcttttgccccacctctgagctttacataccggagcttgcttcaacgtgtattgcattcaggcaggaaaaagttcttgcctgttcgggatgctcatttgctcccccactgaaacgggaacaaacctaccttatttaaaacatatgtatggatggaacctactcacctctggacattcaaacccattcgagtcatgtgcactggtcccggtgctgtagttatagagctgtctttgcatggacaaagctgttgcgaaactgactggggatgcgcaagcataacctcttttgttaattattgtctcgttttttttttctcggcatttatctctttttcataagggcagccccgcactctgaaagtgtgcgttttgaagattgggaaaataataggttgccatcgtatgctctgtattacccaccatgctttaaactcagttatttgagagtcgtttttatcttggtggtcctgacagggactgtttatttt

SEQ ID NO: 18010 - DNA, 1323 bp, Zea Mays
tgctgtcagactgcgctcgtggcggcgcgcccagttccactctcccagggcgccgcctgcgcctctcgttctctatataaaacaccgccgccccgcgtccgcgaaggccaaggttctcagcacggcgcgcggcccgcctccccaccggtctcgctctcgcagtccctcgaccgctcgtcccggcagagcagtcgcagcacgatggtgaccaacgtggtggacctccggtcggacacggtcaccaagccgtccgacgccatgcgcgccgccatggccgcggccgacgtcgacgacgacgtcctgggcgctgaccccaccgcgcgccgcttcgaggcggagatggccgcgctcctgggcaaggaggcggcgctgttcgtgccctcgggcaccatggccaacctcgtctccgtcctcgcgcactgcgacgtccgcggcagcgaggtcatcctcggggacgcctcccacatccacgtctacgagaacggcggcatctccaccctcggcggcgtgcaccccaggaccgtgcccaacaaccccgacggcaccatggacctcgccaggatcgtcgacgccatcaggaaccccgacggggcgctgctgtacccgacgaccaggctcatctgcctggagaacacgcatgccaattctggtgggaaatgcttgtctgtagagtacacagacaaggttggcgaaattgccgtgaaccacggcttgaagcttcacatcgatggagctcgtattttcaatgcctctgtggcactgggagttcctgtacatagacttgtaaaagctgccgactcagtttcggtatgcctatctaaagggttaggcgcacccatcggatcagttgttgttggttcagaggccttcatcgacaaggctagaattcttaggaagaccctaggcggtgggatgaggcaggttggagttctttgtgccgctgcttatgttgctgttcgtgacaccgtgggaaagcttgcggatgatcacaggaaggctaaagccttggcagagggcctgaagaaaattaaacagcttacggtggattcgtcttcagtcgagaccaatatggtgttcttcgatatcgtggatccacgcatttcaccgagcaagctatgccaagtcttggaacagcgcaatgttcttgcaatgccagcaagttcaaaaagtgtcaggttcgtcatccattaccagatttcagacagcgatgttcaatatgcattgacgtgtgtcgagaaagctgttgaagagctactgaagggcggtacaaagttggagcatttgacgaatggtgcgtgcgtttagttgatggcatggaatgga

SEQ ID NO: 18011 - DNA, 2207 bp, Zea Mays
agtaactacaccacgtccccacagcaggcaaaaggaagctgccccacctgtcggcgacaggcgagtaggcacggccggggacggctcctccttgccaccgcggcgtgcgcggaccgtgcgtccgtgccctccggctccggcgcaccgctccgctccgctcattccatctccatccaccgcgccccaaatcgcacggcctcgcctccccattcgcgccgatcgaatcccgaatcggcggccatgagcgtggtcggcttcgacgtcggcaacgacaccctggtggcggcggcggcgcggcagcggggcattgatgtgctcctcaacgccgagtccaagcgcgagtcacccgccgccgtcgccttctcccacaacgcgcgcctcatcggctgccacgccgcgtccgcctcgtccgcccacgcccccttctccagcgtcaaacgcctctcctgggcgccacggggaggaacccggactcctccctcctccgcgacctcccccgcctccctttctccgtctcccacgcctccggtggcggcgccgtcgtccacgttgaccacatcgggccgccgcatcgcgctctctccgacccatctcctctccatgctgctcgcctacctcaagcagctcgcggaggccgacctcggaggcgcccccgtcgccgactgcgtgatctccgtgccctgctacttcactcaagcgcaacgccgcgcctacctcgacgccgccgccgtcgcggggctcaggccgctccgcctcatgcacgacctcgccgccgccgcgcttggctacggcctctaccgctccgacctcggcggcgccgggggccccacctgcgtcgccttcgtggacgtcggccaatgcgacacgcaggtcgcagttgtctccttcgacatgtcggggatgaaggtgctgtcccacggcttcgatgcagacctcgggggcagggatttcgacgaggtgctgttcgagcatttcgccgaggagttcagggacaggtataggattgatgtcgtgaggaatgtgaaggccagtatgaggttgagggcagcctgtgagaaggccaagaaggttctgagcgcgaatgcagaggccgtggtgaacatcgagtgcctgatggaagagaaggatgtgaggggggtgatccgaagggaggactttgagaagctatgtgccagactgctggagagggttgttgaaccttgcaagagggcggtggaagattcagggattggattggagaggctgcattctgtggaactcgtcgggtcaggttctcgggttcctgccattaccaaggtgcttgcgggattctttagaagggaacctagtcgcacactcaatgctagtgagtgtgtggctcgggggtgcgcgttgcaatgtgcaatgcttagtcctacgttccgtgttcgggaatacgaggtgcaggatgcaatccctgcttccataggatttaacactagtgacggcccagtttcaacattgtcaagtgatgcattgttccggagaggcctgcactttcccagtgttaagatcattactctagagaagaatgacagttttagttttgatgcatattatgtggatgctaatgaattgcctcctggtacctcaacagacatcggtagttttcagattggcccattccaagcacataccgaagcttctaaagtcaaagtaaaaattcgcttgaatctacatggtttggtttcagtcgaatctgccgttttgataaatgattatcaaaggaatggaagttctactgatcatatggaggtggatagcagtggtgatgacatgcagggtcacaagtcaagaagtgaaaggtctatccagcggcaggagttgccaatcactgagtacatatatggtgcaatgagcaagcatgaattgctggaagctcaagagcaagaacagcaattggcttatcaggataaacttgtggaatggacaaaggacaggaagaatgcattagaatcttatgtatatgacacccgtaacaagctttctgagaggtaccggagctttgctactgattcagaaagggaacaaatctcagttaatttacaacagactgaagattggctttacgaagaaggtgatgatgagacagaagcagtttacagtagcaaacttgaggagctgaaaaaggtgacaatcaaatcggccatcatctgcagtggatggagttaggaagggggttgccggag

SEQ ID NO: 18012 - DNA, 1448 bp, Zea Mays
acgcatcaaaccttgcctccacaaaagttaaggcttccgtagaagagcgtcttggagatggcgcgcaccgagaagctcaccagcgatggctgctccggcggcgaagtccaagtggaggtggagctcggcatgggggtggacgggaaggggatcatagagtgccggatatgccaggaggagggggaggaggccgctatggactcaccttgcgcttgcgctggcacactcaagtttgcccacaggaaatgcatacagagatggtgcaacaagaagggaaatattacatgcgaaatctgcaaccaggtttactccccgaattatgtcatccctccaccgaaatgttgttcagatgaaatggacatgaatcttaggcaaaactgggtcggacgaatcgatccccatgattcccatttcctagccatcgccatcgcagagcagcagcttctgcaagctgaatttgatgactgtgtatctgcaaattctagcggtgccacatgctgccgatccattgctttaattgtgatgttccttttgctcgtacgccatgtaattgtcattgtgagggatgttagcatgctacaagatgcaacggtgctgttcagcgcaactcttcagtttgcgggattctttcttccttgttatgtaatagctcgttcttgctatgctttgcagcatcggagacggagacaggtgtagggaggctcacctgaaccttaagggcttgtttgggagcaagtgaaatgaaggggattgagggtgctagaatccctcactatttaaaattgaatagtggggtattctagccccttcaatcctctccattactcttcctcccaaacaagccctaaagaacacaaagacgcaccaattgaagcgccgtctcggcggtaccaccgaagataggaggactacatggaagcttgcgaagtgagcctccccgttgttgcttggattcaccgcaaagcatttggtttctgtcctgaagacgtcggcggtttaattaggttgattgagtagcgagagcaggcgctgtgaagctcaagtgtacatacgttgagggggacaaggccttttttttttacagctgagaggaagcaaaatgtagcctcacacatttctgctgcaaataaaagaacaatcgcccgtcagcgcctctgaagtttatgcttggtttgggattgctggcttgcacctcgcagttgaagagtaggtagtagtagtacagggcggctgctacctgctgctgctggacaagtgcgtacagagggtggtttctgaatgggacagacgtggagtcacgggctcagtgccgctctaatgctccgttaagtgccggattgtctcttcgtcagtaattatgacattgcaatcgcctgtaattttcagtacacccatcatgaggaacacggtggcaaccctcgtcacttcgtcacttataaccatctttg

SEQ ID NO: 18013 - DNA, 4519 bp, Zea Mays
tgaagattgtgcctatatcgattgttctagttttgaggcaaataacatcccacggtctatccgttacctatccatttccatgcaagatcattgtgctcagaatttcgaggaacaaatgggaaaactgaaagaaaagatatacattaacaatttgcggagtttgatgatatttggaaaatacattatgttacatctgctcaatattttaagggacacatttaaggaaataagacgtcttcgtgttctatctatattcatatactcccatagttccttgccaaacaacttttcagagcttcttcatctccgctacttaaaacttttgtcaccttattactcagaaatgtcattgccaaacacggtctcaaggttttatcacctgaaatttctagatcttgaacaatggggaagtgatcgttctttgcctaaggacattagccgccttgaaaatctatgccattttgttgtttcggaaaagattgattccaatgttcctgaggtggggaaaatgatcttcttacaagaattgaaagaattccatgttaataaagagagtgttggatttgagctacaagaattgggtaaactagatgagcttggagggaagctcaatatatacgggcttgaaaatgtgagaaccaagaaagaagctaaagaggccaagctgatgtcaaagaggaatttagttgagttgggattaatttggaacatgaaacaagagtccaccgaagatgatatcctagatagtatccaaccacactctaatgttaggagtctttttattgtaaatcatggtggtaccctcggtcctagttggttgtgcagcagcgacaccatatacatgaaaaacttggagactctacatctagagagcgtatcgtgggctaaccttccacctattgggcagttctatcacttaagagagctaaggctgagtaaaattgttggcatatcacagattggacctggcttcttcgatagcacgacagaaaaaagtgtctcacacttgaaggcagttgagtttaatgatatgccagagcttgtcgagtgggttgggggagctaactggaatctgttctcaggaattgaaagaatcaagtgtactaattgtcctaggctgacagggttgctggtttcagattggtctatttcttctatataagacagcactgtatggttccctaatcttcatgacctttacatttatgaatgcccgaagttgtgccttccacccttgcctcacacttcaaaggtatcccgtattcatatgggagacttttcttatgaaggtcgtaccatgttgaaaattaataacccctctagatttgccttcgaaaatctgggtgacctagagacattggtagcttgggatgcactacccttgtcctttatggatcttaaaaagctacattccttgagacgtataaatgtcactagatgtgaggaaacatttttgagaggactggatgatggtgttgtgctacccacagtccaatctctctaccttggacgatttacacctaccaaaaattatttgtcaaaattattcaaatgttttccagcactttcttctttgcatgtgatggcatcaccatcagatgaggacaacgaggaagtggtactgcattttccaccctctagctcgctgagagatgtcaacttcacagggtgtaagaatctgatcctacccatggaggaaggagctggattctgtggcctctcgtcgctcgagtcagtgaccatacacaaatgtgacaggttattctctcgatggtccatcggaggacgagcaactcagactcagagcatcatcaaccctctcccaccctacctgaggaaactcttcctttcttatatggaaactctgcctcaggaagctctgctcatgaatttgacatctcttgagaaactcacactatgtaattgtcttggctgtgagcaaagcaccgagcgaatggctgtactcgcgaatctaacatctcttaccacgctatatttatataattgcagaaatatcacaatggatggattcaatcctcacatcacatccagcctcaagtatctatgcgtgtacaatgagagaaatgatggaactgatccgtattctgtagcagcagatctacttgtagcggtggtgaggaccaaaacaatgcccgacgtttccttcaaactggtgggactttatgtggacaacatctcgggagtgcttgttgctcccatctgcaagctgctctccgctaccctcgagacgttaaacttcagtaatgattggcggacagagaacttcacgaaagagcaggacgaggcgcttcagctcctcacgtctctccaattccttgagttttataactgcagggctctgcagtccctcccccaaggactgcaccgccttccttctctccacggaataactatctatgggcctcaaaacattagatcactgcctaaggagggcctccccgattcactacgaatactacgtataactaactgttgtgctgagatttatgaggcatgccagcaattgaagggaacaaggccagatataaatgtacttgcctccaaagctcgtgtgcaaaattgaatacctgcttctgcatgtcttcacagtcagctctgcttcaacatgcctttcactctacaggtaaatactgtgaaaacatcttcctatacgtgagatagttgatcttcatcgattctacagccaggatgatgtcttattggatgatgtgttggtcatggttggcacaaaattcagtagactatgcttcatcgtaatgttgcacagcgttcaaggcaataaacgagaacaagcatgggatgtggaaaattttagaaagtaaagacaagtgaattcttgacgacgttggcttggcaccttagtttgagtacataatgaaagaacaaccttttagcaaccctggagcatctagaaaatatcagtcatgtaactatcgttaatcatttgaaaaccactggaagacaggagatgtagcaccacaagccattcctttgatcatttgaaaaccattgcggctctttctgattatatcaaccagttgagtggatgaaagaccaaaaaatgctttggaagaagggctcacaattgtggataataaggcatccagtattatagaggaaacaaaggaaattcaaattagacggaaacctgctagtccaagttcttatatgccaaattcatcaatttgcatcctactggagacattgctggcagaggaattgagactggcataggagaactcaatatatgcttgtgaataacgcatccagtgaaagatagtagattttcatcaattcactacccaggatgttgtcgcattggatgagaatgacatggaagacggcgaactagaggaagacaacaacctcatctaagctgaaaatgtgttgcctgtggttgaagaaaatctagcagatgaacaacactgccttccctgtcctctctagacctgaatctctctgatggtttggattcgtccatgattgatcctgtacgatgaaggatcagctcgtccaacgtttttcaaggaacgaactcaatctgaggaattaccttttcattggtcacctggggtactacgaggaatgacttcacgatagacgactcggttttgcgacgcaaaccaaacgccatggttaggctcagatgttggatcagatgattcctcgtggcttcgtgacgcaaaccaaacgacatggctaggctcagatgttggatcgtatgatttctcgtggcttcgtgacgcaaaccaaacagcctgtaagtccgcacaccttatctatcatggtcattgttgagctgatcagtaattggagtcgtgtgataagcttaatggacctcctatttgtcgtgatcttcacagatcaacaagtgagcggcctttgcatgctgcatgagatcaagcaagccgccgactggcaatgctccacctgccattcagttcgttggtgaggtattaatcaccagccatgttggcacttggcggcatgcagatggagcagaacatccaggtgaagcggacagatacatgatcgatcatgagttggcgcagacacaggccagacaaccagaggctatattccaattcatacattccatgataagcaaaggaagatccaagacaacacaaatatacaaatagttagttatacaagcaaaaatcctgttgttttgtgcctcccattttctagtccagaattaatatgacaatttttcactgaaactggttggatcagagaccaggaaaaaaagggaaatgacaactacagctgtgttttttttttcaaagaaggcagctgcccgtcgatgatgtgctcacttgaggatttcctctgccttttcagtgacactgcttcatccttttcagagtcaaatgaatctctacctcatttcactgcacatacttccaaactgatttgctgtaacatacttgagtttcggtatgacattaatttttaactcataagagaacaaaatcagaagaaaaaaaaacaacaa

SEQ ID NO: 18014 - DNA, 2563 bp, Zea Mays
gttagattggcttgcctgggagggatcggagccggacctgcattttgcgtgaaacattggagaaccgtactgaacaaaataagtactggtatttcatcatttgtctcggtattccaataatgtggaaactcaatccctttggaggtaaagcacagagtgggttggatggtcgtactattgatgttggaaatttgaagatcacagtacaaaatgccattgcacaaggaggtttctcttgtgtatatctggcatgtgacacagtacatccatcaaagatgtatgcactaaagcacattatttgcaatgactcagaatcgcttgatcttgtcatgaaggagatccaggttatgaacctcctcaaagggcatcctaatgtggtcacacttgttgcccatgatgtttttgacatgggtcgtacaaaagaggcacttcttgtaatggagttctgtgagaagtctttggttagtgcaatggagagcagaggtagtggttactatgaggagaagaaggtgcttttgattttcagagatgtctgcaatgctgtctttgctatgcatggacaatcaccgccaattgcacatagggatctgaaagctgaaaatgttcttcttggttgtgacggtgtatggaaaatatgtgattttggaagcacatcaactaatcacaaatgctttaacaaaccagaagagatgggcattgaggaagatgtcatcaggaagcatacaaccccagcctacaggcccccagagatgtgggatctctacagaagagaagttattagcgaaaaagttgacatttgggctttggggtgccttctatatagaatatgctacttcaagtctgcatttgatggagaatccaagttgcagatactcaatggcaattatcgtatccctgagcaacccaagtatagcactgctgtcacagggttgatcaaagatatgctggaagcctctccaaattcccgaccagacatcacacaggtctggtttcgtgttaatgagctactgccgcttgagttacaaaaaagtttacctgacggaccttcgccagccgtttccttgagtttgcaagatgaaggtgctcataaaagggcacatgtgatgcctagaaggaaccctcctccacctccaagagagcaatctaatagttctctatcgcatggaagctcaaaggcaggagatgcacccttaggtgcattttgggcaacacagcatgcacaaggtgctcaagctgcagataataggaatcctttgtttgacgaggagccaagtaaggtatcattgtcatcaaagcagaaccaaagtcgggtggacaccagcatcagtattcctggtgataggcatggtcattctggtcagacgtcacgaataagcaaaacaccgaataactccttgtccaatgatggtttcagaggtgtctctgacacggagatacataattctgtgaaaactaaagtgcaacaacctcaacccaagccaaaatgtgataaagatccattcaacatctttgttgcagattttgacactcacaatctcaacattgccgttggtaaggcatccgaacttgaacttgaagtgtccagtctgaaggagcagttgaagaaaaccacattagaaaaggctgagatgacagccaagtatgaaaagttatctgcaatctgccgatcacagcgtcaggagatccaagagctgaagcgcacccttgctgaggcaacgcctccctcaaacaaagtcagctcaaggacacaagactctggatctcagcgaaaggaaaagatccaaggaaccttgtgggagcttgaacaagggatgcttgctagcaatacctcatcagccagttctgacgtcaaaacatggcaggctttccctgatacacagactcaggcccgaccaaaggtcgatcatggaactaacggaagccaaaacataaccaagaacacaacatcaggtgcttcccccgacgcgtggggttttggtactgatagtttcagaacatcgtcagcaccagtaaaggctgctacacagatcaacagggctgcccaagggagctcatcccaaagatttaattctggtgtggccaagaaggtagagcaaccatctggatgggctggtttttaactccacatcgacatgcgttaaccatcattctggtcaaaatttgcaatctgcgttacgcaacagttgccgacggagttgtgatccttggccggcccctgggcgtcaaaatcggttatcttgagcgtgttcatcattttggttgaaccaacttagacattggttcatgggatcactttacccgttaataagtaaatgtgtattgacagtattgtgagtgtttctgtgtatggtgattatgaacatgaacggatgaatgtaatgtctaaatgccaagatataccgtctcataacaaagacttgagccttctgagctcaaaacagagagctagtcatatttgtcttttttggaaccagtccattttaaccattatcattgacgcccaattttattccttgagcttgaaaacaaacattactttggtcacacaacctttgaaaaccga

SEQ ID NO: 18015 - DNA, 5135 bp, Zea Mays
cgggcccacatgtcagtcaaccactcaacctctagctagcatgtacgccgttccccaacctctggcgtagtcttgttcatcttcgatctcctccatctcccttcatcctctctctcgctgtttgaggagaactgcctgcccctgctccctcttccgctcctccccgcgccccgctcgccatccccagacttcatttcaggccgggatggacgactacgcccgggagatgatggagctcaagacgctcgtcacccgcaccctcgagaagaagggcgtcctcgccaagattagggctgagctaagagcaagcgtgtttgaagccattgaagaggaggatcgggtggagaatgatgatggagggaaccctgctttgcttggtagctgtaatgaccgagctaagcaactgcatgcttcaccttcaggtaggttactaactgcacttgtatgcgaatacttggagtgggcgcaactaagtcacacaatgaaagtttacttgccagagtgtaacctgcccaaggacttctggaagaatgaactgaaagacttctctaacaaaagtggagctgaagggagcaggagtgctgaaagtggtccaatgcttttagatgttctcgaaggttatctgaaatatgagaatttgtctcaaacaaggatgggcggcaggaggatgatgagttcagaatctgatccatcactaaatgttgaacatcggagcatgaggagggcaccattatcgtcagctgggaacctgcctcctatggggaggccaatctcttcgtcgcagcaggcatcagatcgcagagggggatcttcagcttccaacacaaggaaagatgagtacaactggagatacgataccaccgatgatatatctgaagaggtgctacgggcatcgactgctctagaaagtgttcagctagaccgcaaatctcggaatctgccaacatcttggaggcattcaggggatggcgccgagtaacaacaaggctttggagctggacgaccatgagcgacgatggtgaccgcacctgcccgctctgtgccgaggagatggacatcactgaccagcagctcaagccatgcaaatgcggttatgatatttgtgtttggtgctggcaccacatcatagacatggctgagaaggaggaaacagtgggccgctgccctgcatgccgcacatgctatgacaaggacaggatcgtcaagatggctgccacttgtgacaggacagtggcagagaaaaatgcagagaagaagcacaggacccaaaaggttaagccaaaggcagcaccttcagcagcagcaacatcaactgtagaatctaagaagcatctggctagtgtcagggttatccagagaaatctggtgtatataattgggctacctgcacatttatgcaatgagagcgtacttgagtgtagggagtactttggccaatatgggaaaattttgaaggtttcagtttcccgtccgactgggcctccctctcagcaggcatcagcaaacagcaatattagtgtctatattacttatgccaaagaagaagaggccatccggtgtattcaagctgtacacaattttgtcttggaagggaaagtgttaagggcatgttttggtactacgaagtattgccatgcatggctgcgaaacatgacatgtgggaatccagattgtctctatttgcatgatgtaggcagtcaggaggatagttttactaaagatgagatcatctcagcatatacaaggactagagtccctcagatggcatctggtgtttcgcaaagacgcacaggcactgtgttgcctcctccaggagatgatttctcttacagtgcggtggtttcagccaagcatacatttaagaatggaacacttaataccaccagtcagcccagactttcacctccaaacagtagttctgggaggtccacgcttccatcagctgcctcatgggggcagcgtgatttgaatgccaggacaacagctactggagcgacatcgtcacaatctcatacaaaaccaaaatcagaatcacaaagtaatccattttcaagttcttcagtattttcctgtacaaaaacaccctcttcatggaatgatgatacaagtacagcagcaaaaatatctgaaggacagcaactgtcagaaaaagagtctagaaccttgcagccgtataagcctggtatttcaaaggaaacacaagctttatcatcactggagtcatcactggacatagacttctcaacaataccttcagcttggaatgacgatgacattgtagtaccagatgtgatgccaaaaggaagtgatgaaaatcaagttgcaaataaaaatggtgagctaacccatccagcatccaagtcactggttttatctaagaaagacataaaaatgaacattaccagcaaaactccttcagattttgtatcaagtccagcaatatctaaatcagatgtaagtactagtgatggtgaccactcactcaccaatattactcctaaatgccttgcttcaaatgctgtagaatgccaatctagtcatactgctgtggagaaaatgttggaggatattggatccaaggacactgacatggagaagctatctgctcagatatcttcagtaacattaggtggcaacgacgagattcagagtatggcaggaaatcaacaaccagatgtaatgccatgcacatctgttgatgtgctcatggatcagaattttggcagagacctagctcatcccaatcctgacgagctcttattgccttctgaaaataaggatagtattgtttcttgtcaatatagttctgataagcgtcttgattggagtttggagatgcaaaattgtagcgttactcctttaaatgatagaatggactctgcactgctcactgacaaaattcatagtagacagctggatggttcagagcaatcatcatattcatcatttgttgaatttcctagtacagtggatacctcattgtggaatgatacagaaaataacgctgcattgacgattgacaatataacttcttcacagatgcagccagggttttcttcaactgataacacttatgccttgctaaatggaggtcaagatgggctaggtactgtatatacacatgataatgtttctgtatatacacatggcaatgtttctggacatcctggaatgggaagtcatcaccatagagcaatgggttcattaagaaacaatagtataggaagttttgacaagaccataagcgtaaataagtatgaaagaagaataatttctgatacgttgtcagagtttaatccatgggatgattcatattcgactgctaacaattttgctaggatgcttagggaatctaaaaataatgatgtccattgcattgcgccttcatggaaatcaggaaccgggatcaaagagtccagattttcatttgctagacaggataaccaaggaaacttgtttgattcatctctcagaaactgtggtactggtactgagcagaatttcagtttgctaccccagaattctcgaggaaatatttaccagaatggccttgcattccaatctctagagaatgaattttcaaacaataactctcctggtgtattagatatggcaactactggtacatcgatgtctaaaatatctgcccccccaggattttcggcaccaacaagagtaccccctcctggattttctactgcatttccatcccaggatagtttgaaccccactcctgtgtttccttctggaattttgtgccatggcgggtctatcccccctcctagattctcttcattttcttctggaatttcaactcaggaagtgtctaagcctcctactagaccgccttctccattttcttctagattttcatcacaggacggtcttgacccctcttctagattccctttttcttctggattttcatcacatgatgggtctaatcagtcgtatggctcaacgaacccagaaaatcttctccggggtactgttcagggtggcaacagtaatcattatcaatctcagtttggaaggcactcaagtgacatggagtttgatgatcctgctatattagccatgggcaaagggctgatgcctggaattggcgattcagggctggagatgaaaaatactcctgcttttcaagcacagttgcaaccagcaagtagtgatccaagatttcagttacatgtacagccaaatgtgcagtctcgtcaaaacatgagattcacagaccctatgcaagatggtttgaaccatatgaacgataattacctggcatccagatttttagctcagaaccagggtcctctatctccttatgtgcagattccgcaacaacccagaaactcgcaggttataaatggtcactgggacgggtggagtgatttgagacaagggaataacgctcctatgtcagacatgtccaggatattatatccaagtgaagtgaacaagttgcatatgctgggttcaaatgatgtccataacagagcctttggaatgtgatcgtctcctgggataatgtgcgactttgagctgacatgttcaacttggggcgttttgtgcaagtaactggttgcacaacacatagtatacctgaggtggttaatggtgttgtgctcatgagctggcacacgactatttattgctgttggagttgaccaaaatgaaccttagttttggtccatccatttggaattaccaggttcattctcgtctatgatttgtgaagcttgaatgaaaagaaagattacgtgcctgagaagaacaaggcagctgaagttgaaatagatagagatatgtctattatgggatgtggtgtgacttgcgagcgaaagagatgaagaagattaggtgggcttggcttgatggcagcttgttttttcttgtgtcttgtacatgatgatattggtcggtggttgtatatgacttgtgatcgacggtggctgcattaacctgtagtggttgcccttgctccttcctgcctgttttgtttgcagctcctcctgttttgcatagtttatgctgattaagggaattggtgaaagtctagtgttacccatggtataataatagggaactggtttctttgttagcattacttcatttgtctaaaaaaaatccgttaaccg

SEQ ID NO: 18016 - DNA, 195 bp, Zea Mays
tcggtatctttccttaccttaccaggaacgtttcacccgtcttgcagacattacagaacatcggagataaagaaatgcggaagcagttatataaacttacatttatttcaaaagcaagcttgagttattttattacagaccagagctaaaagtgagtgcagagtaataatattatacaaaccaagggaggcacaa

SEQ ID NO: 18017 - DNA, 3401 bp, Zea Mays
aacgaagcaaacggatttttccagccaaagttaaattaaaaacgggaaaaaaccacacgcctgcatctttctctctctcgtctctagacgtgcggtgcagcagctgtattcgccgcaacctcctcccatcccttgcgccagcggattccttggctgcgcggaattctcctagcctcccgagcctccccagctcgagaagggagctcacggtgacgcggcgcgaagggccgggtcagatcttggccgttggccccgaggcggcggtttcgcgtggggtccagcagagcccggcccgcgcgggagccgctctgattcgccgggggacgccgcggggaatgctctacctcaagctgccggcgggggatctagggttccgtccgggggcgccgaggcggggatccggcggcggcggggcctgagggtggcgcgggcgtcggaggcggccgccatggagcaggacccggagcgcgcctgccttcggagcttcgagctccacgagagcgagtcgagcctttacgttctaggaactaattctgacagaacactttggagactactcaagatcgatagatcagagccgtcagagcttgtgatagacgagtgttctactgtatatactgaaagtgaacatcctgacttgttgaagggtcttgatgacgagcacaggtcaactggcggagtaaaatttgttacaaagttttatggcataattggttttatcaaattccttgggccatattacatgttgattattactgagcagaaaaaaatcggggaaatctttggtcatccagtgtatcaggtgaccaggacttcaatggttgaattagcaaattctaagacaagatctacttttcaaaacttcaaggacgagaacagatacaggaagatcttgaatgcacttgatcttaggaaggatttctttttcagttactcataccacattatgagaagtcttcagaagaacttggctgatccacaggatggatggaccttatacgagactatctttgtgtggaatgagtatctgacacggcggatccgtaattgtctcagaaatactttgtggactgttgcattggtccatggtttctttaagcaggataaattctcaatatctggcaaggatattatgttcacactcatcgctagacggtcgaggcattatgctggaaccagatatttaaagaggggggtgaatgagaagggaagagtagcaaatgatgttgagactgagcaaattgtctatgaagctgtgcctggacctactgaagtaagttctgttgtgcagaataggggctcaattccactattctggtcacaggagacatcaaaattgaatcttaaacctgatataatattgcatgagatgcagaataattatgaagctacagagcttcattttgaaaatcttagagcaagatatggaaaccctatcattatcttaaacttgattaagacacgtgagaggcgagagtctatactccgccgagaatttgataaggcgatcaagataataaacaagagcctgtcagaagagaatcatctgaggttcttacattgggatcttcatcaaaactctcaaggaaaacctacaaatgtactcgacgtccttctaaaagtggcatttcgggctctgaatttaactgagttcttctattgtcaagtcgcaccaaattctgagacttctgcacaatgccccaccctattgaatggtcttgatcaatatttatgtgatgacaacaatagtgacgacacagaatgcactgagattgttggtgatgtatcccaagaggatatctcaggcagctctgattcctctggtaatgcaaccacagaagataaatttgagaatagtggactgccaccaccaaaaccaccaaaattccaaaaaggtgttttgaggacaaactgtatagattgcttggatcgtacaaatgttgctcagtatgcacatggtttagctgctcttggacatcaattgcatgcgcttggttttatagaatctccagaactaggtttagaagctcccttggcccatcatttgatgcacttttatgagatgatgggtgacacacttgctgtacagtatagcggttctgctgctcataacaaggtattctctgcaaagagaggtcacttgaagctttttattcagtcacaagagttctttaggacacttcagcggcactacagcaacacctgtatagatgctaacaaacaggctgctataaacttgtttttgggatacttccagccacagcaggaaaaacctgcactgtgggagttagaatcatctgctgggaagcataacaataatctttttgatggccacccaagtacattgaaaagagtaaaatcagatggcaccattcttcatgaaagtaatgcttctatatctggctctggtcgttgccataatgaacagttaagtgcatcgcagcctgatgtccagaatgggtttcaattcccaacttcagaatccgattcacttcatgaaaatgacatttcatcagcttgtggaagtggagtagcacacctaaggtatactcctacagcctctgacgtgcttcatgtcccaagagctaaagttgaatattgccatgattctggtgattcaaactttttggatcttgaatggctttccacttcaggcaactcaagtgatgaaaggtctattgcaactagcacgccagatgcaaacctatcaaatgagaatgtcattagtggcataactcctgatatcatggaaaaccatcttgctgaaatgcagtatcagaagttacctcggaattttgtgcagtgggttaatcacggtgataccttttggtactaagatcgcaattactggaattcaatatgtcgccagcttcccagggtgggcattaacacggatctgagtagtagattatagagtgatatggatgctgcggcaaggcatttctcccgtgatatactccgcaccatccccaaagtcctttattggtccacgtgtttttacaatggctgtcgccccgacggaggacggtcgcagggcgaccacgtgcagctcccgcgcccgcgtcccatcctggctgagcgcacccgccgcgactattctcacttctcagtgcattgcgtcatttcaaaatccaaaattgcaatatcactcactggatgaaatacccttccacatgcttcagtattcaagacatcatgtgtataataattgatgcatgttctatggttaaatataccttgggaagggaaaaaagcgtagagaagatgtatgtatcggcaaaatataaactgtgatatagatccgctctgccatggtgggcctgctagtacacgttatttataccagtgaaaaatatctagctaattctaagtgagttccattgtttcaatagaaatacctc

SEQ ID NO: 18018 - DNA, 244 bp, Zea Mays
cggcctttcctcgtcacccaggccttggaactaggcccggtcgctgcggggtgggaaatatcccggaggcacgcaggcaataggccgctcatggattagggcaacagccacaaagggcacgccgcatacgcgtgacaactgtggcacggagaccggattcctcacgcctgctggcgtcgatctcctccggaggctgcttctcaccggtaccttggaccggcagcacagtaggatagcatggcgc

SEQ ID NO: 18019 - DNA, 2386 bp, Zea Mays
tttcagtgcgatatagtgaatctaaactgaatcaggcgagactagaagtaatggggaagaaagctaagaatgcaacctatatatctggaaatgaacctggaaggatatcaagagaagtttctaaagttgaaaagcgaagaactgtgaagagcacactttgtaatgagagaagttcacggagccattgcgtgattatcctggatgtcccagctgtgggaggaaggttgatgcttgtggacatggctggatctgaaaacatagaagcagcaggtcaaacgggatttgaagccaagatgcagacagcaaaaatcaaccaagggaacactgctttgaagcgagtggttgaatctatagctaatggtgattcccatgttccatttagggacagcaagctcacaatgctactacaggattcattcgaggatgacaaatcaaaaatcctaatgattctgtgtgctagtcctgacccaaaggaactgcacaagacagtttctactttagaatatggtgccaaggcaaagtgtattatccgtgctgctcatgccgcaacacctagggacaaaatgagctccgaggagtcatctgcaatgctcaattcaagaattgttgcaatgaaccagttcatccacaagcttcaaaaagagaacaaattgagggagaaagagcgcaatgaggctcgcaatgtgctaaagctgagggaagaggagctagcacaattaagagcaaagctcaacttgatagaaaggcagggaaaagctactgagaatgagatcaattcaaaagttatggagaaaacccagacattgaggggtgaactcatgaagatggaagaagcgatgtataagcagcagcaagagctctgtgtgctaaggcagcgactgcaggaggttgagcgtgaaaaggctgatagttgtcagccagggcagcaggatgtaattggaggtagactgctggcacggctatcagagatgcctgcaggccttgatcaatcaatggcaatcgacatgtctatggacttagatatgggagatcagacgtccatgcaagatgtcaaggtaataaaggaggatacttgccagcagggccaaatatggaatcacacaaccacagcagcaagtgcttgcacagggtctttggtgcaagaagatgatgtcaggctgtccgggtatcctgaaaagactgtcctcagcactgtgtttgaggagggagatgaagattatgcagagaagaaatgtggccttcaagaggaggtacgcaaggaggttgtagatgagaactttaaggtggacatagcacaacatacactttctgagccagatcatcctgcaacaaggaagcatcatattgagaacatgttcaggctctgtggcaaccatcgtgaaatagctaagaagccaaaggttcagtcaccagcaaaggaaatgttctggaatgagaaccagtctccagcaaagcaagtgtttgggaatcagaacaaatcaccagcaaacaaaatttttggagacgaaaacaaggagccgttggcatggggagctatagagacccccatgtgtgacgtcagagtgactgacagcccagtgtcttctcagctttctccaatcgtatgccaagttgtggatgcgccattatcggcgcaaccggatacatgcagtgcagtggaagagagtgatccgaacaaggagaacagccttgctggacagaaggatggcggcctcttggaagtttacataaaatgggagtctggcaacctgatcaaagggctgaagctactgcacaactcgtgcctttcagatctgaggaagtttatagaggctcacttcgaagaagcaggcagcaaacagaagcatcagttcaccttccttctcctcggggatccgtccggtgctccggtgtcccgggacacggaagcttcggtgcagataagcaggctgcctcactggaacaaccagccggacagctacctggcgtgcctgcgcgcggccaagaagccgtctgcggaccacgtgcccttcagcccgctggacagcaatctgaacacggttcacctcgccggtgcggtgtcgcccaaggtcaaccagatgagccccagctacatccgggagctgagagcttgagctcccgtggtatctgttgcttgtccctcgtggatcgattatgttttgtgtaagatttgattgctagtctggtttgctaaccggaactactgcaacccgtgaccaagataattgcagcgaggagatgacaaatgccacctctccaaagttgtgtgcgctattttctttaccgaaaattgctggcaggtcgtctgccagacaatattaatagaggagataaaaagagctaaaaatgcaagcctaagaaatacaatggaaggcccaaacgagaa

SEQ ID NO: 18020 - DNA, 987 bp, Zea Mays
gtattgtcgttactattgacttgtcagaattacgtgacaaagcttgttggggcctgtaattgcccgccagtattctgtgtaatcactgagtttctgtctgggggttctttgagggctttcttgcgaaagttggagcgcaaagctcttcctttggagaaggtcatttccatcgctttggatatcgcccgcggcctggaatatattcacctccagggaatcgtacaccgtgacgtcaaacccgagaacatcttatttgatggagaattctgtgctaaagttgtcgattttggagtggcgtgtgaagaaacatactgcaatttgttaggggatgatccaggtacttatagatggatggcaccagagatgtacaagcacaagccctatggccggaaagttgatgtgtatagctttgggcttctcttgtgggaattggtcaccggttcactcccttatgaagatatgactccgcttcaggcagctttcgccgttgttaataagaacttgaggccggtcattccattgagctgcccagcagcgctgaagcttctgattgagcagtgttggtcctggcaaccagaaaagaggcccgactttcagcagatagtttctatcctcgaagatctcaagacagttcttgaaacagacggaacactccacaaggtcccaagctcgatctgccaggccttggaatccaatgatcagaacaagaagaaggccggtaactggatccagaggctgtcatacgctcaacctgatttctccgggcctccacccccaaagttactgtagctacgcgtcttcttgttcttggtagcttgtttatctggttggtagcaactgtgtaaattgaacctttcttgtttcttgttgagagaccacagatttcgtcatggtatatactcggacaaagtacatacatcaattcttttttcggctaccttaacaacttctatcttgatgatacatgggagcgatatgatagcaatc

SEQ ID NO: 18021 - DNA, 2659 bp, Zea Mays
gccggcccaaaaagtacaggtatagtggcagccttaaaacccctttttcgggcacaaacccccagccgtccgtgacatcgccgggatcccgcccggacctcacccggcgatatgtcgacggcggctcccgcgccgggctccacggccacggtgcgggtatccaacatcccggcctcggccatcgccgcagagctgctcgccttctttgactccgccgtcaccatcgctggcgcgaccttcgcctgcgagatagtcgccgctcaccgcggctggctcagccgcggccacggtttcgtccagtttgattcctccgccgccgccacccacgccatcgacctcgcctcctctggccgcctgccccccttcctcggctcctgcctatccgtctcccccgcccgcgctgacctcctgccccgcgcgcccgacctctccctccgcgctgccagcgcgagcctcattctaggcaaccgcgtcgccgagcgcgagctggaggtggcctactcctgcgacggcgtgcgggccgaggtcatcccgaggatgcggcgtgtggacctctacctgaagcacgattcccagagctacaagcttgaggttctctttgaggacatcaatgagtgctttgggtgccacctcgatgggacgggcgccatcttgctgcagctgacttatgcaccaagaatacacattgcaatttctgggtctacagttaaatcaaggtttacagatgatcgctttcatgcatgcaaggaggacgccaaatttgcatgggtcagagcactagatttcacacctaatagctcttttggcgagtgttccactcttgtcctgaaactgagcaaaggtgcatcagtatcatatattcttgaaagtttacccttctcaggagaattaggggaattggccattgcttcgatggatgtgtttggctcctcctccaatgtggttcctcttgttgactgcccaaatggcttttctgtgccttatgaagtactttttcgtctgaactctcttgttcacatggggaagctagttgccaggcatgttaatgctgatctgtttaaagtccttgaagatctgtcaatcgatactttaaggagaatatttgagaaaatgagcaaattaaaatctacctgctatgaacctttgcaattcatcagacatgaggctcatagcatgaatatgagaaagaaagccttgtccaacaagagggagagtggaaaattgatgaggtgttacagaattcacatcacaccatcaaaaatatactgcttggggcctgaggaagaagtttcaaattacgtggttaagtaccattctgagtatgcttctgactttgctcgagttacttttgttgatgaagattggagcaagctttctcccaatgcattgtcagctagaactgaacaaggtttcttttctaaacccttgaaaactggcctgtatcatcgtattctctccattctaaaagaaggattttgcattggccccaaaaaatatgaatttttggccttttcagcaagtcagcttcgtggtaattctgtttggatgtttgcttcaaatagttctctgactgctgagaatataaggaggtggatgggccactttgaagatatccgttcagtctccaagtgtgcagctagaatgggccaactgtttagctcatccagatggtatcgggaagatttctactagatttgccagacaagtcgccaaattaattggcttagacccagctcatcctccttctgcttttcaaataaggtatgggggctataaaggagtcatcactattgaccctacatcctttttcaatctttctctgcgacctagtatgaagaagtttgaatcgaagagcactatgctgaacattacaaattggagtaagtctcagccatgttatgtgaaccgtgaaattatctctcttctttcaacattggggataaaggatgaagtatttgaatcgatgcaacaagatgacatgcacgaatcagatggaatgctaacaaataaagaagctgctttgtctgtcctagggaaaattggtggcggtgataccaagacggcagctgatatgcttctgcaaggctatgaaccaagttcagagccttacctattaatgattcttaaagcccatcgggctaataggctgaccgacataagaactcggtgtaagattcatgtccagaaaggccgtgttcttattggttgtttggatgaaacttgcaaattagagtatggccaagtttacatcagaattacaaagaatcacaaggagcagaagtacagtgaacagccgttcttttgcaacgatgatggcaaaacagctgtaattgtaggaaaagttgcaatcacaaaaaacccttgtctccatcctggtgatgtcagagtacttgaagctgtatatgaccctggattggatgctaggggtcttattgattgtgttgtatttcctcagagaggggaaaggcctcatccgaatgaatgctccgggggcgatttggatggcgacctcttctttattacttgggatgacaaactgattccggagaaggttgatgcacctatggactacactgcaacgaggccacgcataatggaccatgctgttacacttgagatctagtgataaatcagcggccgaaccgggaaaagtgagagc

SEQ ID NO: 18022 - DNA, 1843 bp, Zea Mays
ctccgctgggtacactctgttcttcgtatttgctctacagccacagcagcctctggtcatggaacagcagaaaatgatatttgatttgcagcaacaagcagtaaattctcagtcaactgctcagcagtgctcacaggtagctacccaagtggttggtttgcatagcagtagcactaatcagtacccgacgcagcaaaagactcaacctctcaaaacatttcaagattttcctgggaatgctgtttctattgtaaaaccagaaattgtcacctccgtgggtgctcgctctttgcatgtgcctggtggagtgcagtcaatgaagatggatgaagttccctcttcttcaacatcgccatccacaaacaacaatcctgttattttgcgatcaactccaagtagctccaagaaccaatgtttacctactgcagcaaaggctcctcagtcatctgttgtattgggttctacacttgaacagggtatgaagccttgtgacagtacacaacacccaatggtgattcccaagctggctgaagaaaggccagctactggacaagactacatgaacagcactcagctggattatttggatacgtcatcttcagcgacttcagtttgcctttcacaggctgacggatcgctgcaacaaagttttccaccttcatccttcaatcagcatcaaccgttgagggaagcagttccagatagcgagtttgaggttacagatgcaggaaataactttctatttggggcaaatattgatggccatatggagcctcttaacgaagacgatttgcttggaactgccttcgaagctgacaagtacatggaacagatgccaggaaacggcatctctaactacatttcatcaaaggattctcagcaagagttatcatcttcaatgatctcacatccatttggcgttgctgatatcgcgttcaattccatagattcgtcgatcaatgatatccaattcttaaacagaaattcccgggctccaggtcctgttcaacaacgtatgcgaacatacaccaaggtgcacaagcgtggcgctgttggaagatctatcgacatcaacagatattctggttacgatgaactgaagcatgacgttgcccgtatgtttggaattgaggggcagctcagcgaccaaaacagagttggctggaaactggtttacgaagatcacgagaaggatgtcctattagttggtgatgacccatgggaggacttcgtgaactgcgtgcggtgcatcaggattctttcgccgcaggaagagaggcaaatgaggctggccagcgactacggagacagctttcttggcaaccaagcgtgtagcagctcggacgggggtcgtccgtggagggtcaccggcgactagaaatagcaggctatgcctgagcacaaatgtttgatataatccgtcccacgatagcaagaaaatgatacgcgatttctgagcacaaacttttgcactcagatgatcgtgcaaacagttagcattttaagaaaaatgttgcagttcaatgtaactgcaggaatgtctctgatgtagcctcttcgatgtggcagccttaacaatcgatgtgctacagttactctgcctatgtatttactatactaccttggccttgtatatccttttgatgtaggcgcagctggatgctgaaccccccggaggctgttagggacaattacaaccgttcataatttgccacagatacaaatctgagtggacaaatggattcagtttacgtatgcttcattgtttgtgagcctaccttgatggccttttattttgttcagttccactaaaaaacgccaggtggacgtatgcagatttggg

SEQ ID NO: 18023 - DNA, 92 bp, Zea Mays
tttcctactgcgctttatattctggctctctcgagcttgtaccccggtattgtaataacctctatttaaactctgtactatttgaagtaagg

SEQ ID NO: 18024 - DNA, 2053 bp, Zea Mays
cgttacggcatgtcccgtcccgtcccagagagagaaaccacggctgcgcacagcgagttagatagagagagagagagagagagaccaagaccaaggccaaggagcaccgctccccgtacatccccagcaggagagggagagagacagagaaggctgtgcgaagggaagaagacccggcgggagagaagggcgacatggagaggccggcgcccgtgaggaagtcccacacgtcgacggcggacctgctggtctggccggaaggtgcgccgcaggagttgcccgccgggtccacgccgccatccaaccgccggccgcaccagccgtcggaggcgctcaggaaggtggtgttcggcgggcaggtgacggaggcggaggccgagagcctcaacaagaggtgagcttccgggcgttttgcccctgccatgttctcttgccggagtggtgggattttttgctctgtttcttgttgtgtcgcctggcgacgagcttctggccttggccactagatctccagagatttacggccccaacactgcggaggtgttctttttctttttttttttgcgcgccgttgttgatctatgcagctgcgggttgagaacttcgttggatttgtttgaggtttgctgcgatatgcgccctagagtcttttaactcggttcttgaagagtttcttttttcagttctggtctataggctccggaaaaggaatggctagtagtgttaccgtaatgtgactatggtttagcccttcatggaattgccatctcaccaactatgttggagtactgcaaactgaccgtagccatcaaaatgctccccgtaaggtatgctgactaacgatgagctgtgaaaccaatagttccatttgagatcacttgcactctttaaacgacaacgactaatctggctttcgtgcactatcgatgaacgtcgatcacagcgctcctggtctgtgtatgtttcggcaagttctgcgtatgtcgtagtttcattggttatttagattccagagtaccacccgagtggaaggagatgacaagctgttcttttcccccttcaggaaaccatgctctgctcccaagtggaaggagatgacaggaagcggtatatttgcagctgggggcgagggtgaagaagatgaatccgccaatgtctctgcaacttccgtccggacggctccaaagaattatcaggcaatcagtactataagccacatctcatttgccgaggaagaaagcatctctccaaagaagccaacttcgatatcagaggtcgcaaagcagcgcgagctaagcggcacgcttctgagcgaggacgacagcaagatgaagaggcagatatcggacctgaaatccaaggagctcagcggccacgacatctttgcccctccggaggatcccaggccacgcaactcggagaacggctcgacctcgcagactccgggcaaaaatgtaagcaacttcaagttcggcgaggccgacgaggacagcgcggtgaagaccgcgaagaagatccccaccaagaagttcaccgacctcgcgggcaatatcttcaagggcgacgacgaggcacccgggacggcggagaagcaccacctgagcacggcgaagctgaaggagatgaccggcagcgacatcttcgcggacggggaggccccctcccgggactacctgggcggaatccgcaagccgcccggcggggagagcagcatcgcgctggtttaacagcagggacaaacaaccagatggacatagcagcccctcccctacatcattcgtttcttcctcatcgccgtcgccgtcgccatcttaggagtgatcttttattagggagttttttttttcgttcattggaggactgatcgattggaacccctggcttgctttcctgtttcccgtgactttcgtcaggttttcgttggtaatcccctccgatggtggtgttgtgtgggtatgacaacaacgatggttatctctaatttaacattgatttggcttgggcttacctgatgcaacaacaaccgccagtggtgcgttgtctgatttccgtg

SEQ ID NO: 18025 - DNA, 2170 bp, Zea Mays
attttcttccgccttcgcatgcgataaatcgtcgcttttcccttgtgctagttcttcactgatgatatcagcagcactggtagtgccaagagggaagcggtacaaaggtgcaccatgcatcggtacagatcgcagctagagcaggaagttaacaaattgcaaaggcaactccaagaagagattgatttgcacatggcgttgacagatgccattacatataatgcggcgctgatacttaaggcatctatgaagcttcctgacaaggcacacgagctattgattagcatatcctctctggaaaccgctatcacaaagcttgaagaggatctacatcacctgcactaccagttatgtgatgcgaggaatgaaaggctacttgcagaaaataagccagaatgcttgctacctacagcgtcagattgccaaccttctacagcttgcgattgtacaagggaagagcctgaacaaacattaagatattcgagattcaaagattatcaccaagtggaggacggtttgtcaactgaacctgaagatcaacaagatgacgaaaaagacgccgaagatggagaacatgtatctctaaatatgctgatgcaagaggcatgctctatggaaaatgaaggcaaagaagatcagaagatagatgcattaacatttagtcagcccaatttcaagaaaagcgacatgagtggaaatttgtggaataatccaaaccagctctctgaagagatggtgcgctcgatgaaagatatcttccttcatttatctgcatctcccaagatatcacgagaggagccttttgctaattcatcttcatcagcagaacgtctatctggttcaacattgactactttgtcagattcatctataatcgcctcagtgctgcggagtccttcgattgactggaacaacggcgatggtattattgatgatgttagaaactttgacccgtacaacgttaaaggcaaggaagcacggagagacgttgggagctattgttcagtagctgaagtgtcttggatgtatattggcaatgaacaacttgaatatgcatccggagctcttaaaaagttcaggtttcttgtggagcaactatcaaaggttgacccttcttgtatgaactgtgatgaacagatagcattttgggttaacttgtacaatgcattaataatgcatgcttatttggcatacggtgtccctgaaaatgacattaagctgttcgcgctaatgcaaaaggcctgttacacgatcggcgggcagcctgtcagtgcagccgaaatagagtttgtgattctgaagatgaagacaccggtgcaccggccacagctctccttgatgctggcccttcacaagtttaaaacgtcagagaacctcaggagatattcaatcgatggcactgagcctcgcgtcctcttcgcgctctgctgtgggatgttctcttctcctgcggtaaggatcttctctgctgaaaacgttcgagctgagcttcaggagtccatgagagactacatccgagcgtcagttggcataaacgacaagggagagctcgtagtccccaagctactgcagagctacgccaagggcatcgtggaggactccctgctcgccgactggatctgccgccatctgacactagaccaagtcgccgcgatccaggacacgtcgtcgtcgtcgtcgcataagcagcggcttcttggagtgcgcagcttcagcgtcatcccgttcgactcgaggttccggtacctgttcttgtccaacaacaccaggtgccagaattgaaacaagagtacaagactgcattgctatgcgcagacagccacaggagtgggtgcttgacaagttgacacttttttcgagagctgaaaatattagcttttgctgtacattctgtaaatttttccgttgactaggattcttctttgtacgtaacattcagctaactttttgtacatcaagcgaacccagaatacaagtgtagattcggtgatggttcagtctcaggttagtggcttgattaccgccaaggaacccaaaattacactgcaaattcacagccagtaaaaaaaatctgcatgttgcacatccaacaaactgagctatcgctgctactgaactttacaaggcgatttttccgtgactaggattcttctttgtacgtaacatccgc

SEQ ID NO: 18026 - DNA, 1864 bp, Zea Mays
atgggtggttggtactccgccattgcggccaccaggctgaagatgctgcgccgcggatgccggggtgccgctgccgtcctccccgtcgccagccacgacagcgtcaccggcaaggagaggaagaggaagcgcaggaagcacgcctctatcctgggcgactccggcaccgtcgacccggacttctcgcggcggtaccggctcggcgcggagcttgggcgcggcgagttcggcgtcacgcggcggtgcgaggatgccgccacgggggaggccctggcgtgcaagacgatccggcggaagcggctgctcctgcgccgcgccgggctcgacgcggacgacgtgcggcgcgaggtggagatcacgcggcgcatgtcggaggcgggcgggggcagggtggtgcgcctgcgcgaggcgtgcgaggacgacgacggcgtgcacctcgtcgtggagctctgcgagggcggcgagctcttcgaccgcatcttcgagcgggagcactactccgagcgcgccgccgccaagctcgcccgcaccatcgtcgaggtcgtgcaggtaaccaccgagccgtccgtcgtccattggccagccgacggcccgagcgaggccgcgcatgagttcgccagcgccttacgcccccgatacgcagctgtgccacgagaacggagtgatgcacagggacctgaagccggagaacttcctgttcgtgaacaagtcggaggagtcgcctctcaaggctatcgacttcggcctctccgtgttcttcaagcctggggatcggttcgccgaagtggttggcagcgggtgctacatggctccagaggttctcaagagaagctatgggccagagatagacgtgtggagcgccggcgtcatcctgcacctcctcctctgcggattcccgccgttctggggagactccgatgagaagattgcacagtcgatactacggggagtaattaacttacagaaggatccatggcccaaggtctcccagagtgcaaaggatcttgtcaggaagatgcttgacccagacccttgtacacggttgacggcaaaacaagtcctcgagcatccttggctcaagaatgctgataaggcttcaaacgcgtcactcggagaggtggttcggtcgaggctgaagcagctctcgtccatgaacaagtttaagaagaaggcacttggagtggtcgccatgaatttaccgacggaagaggttgaccaatacaatcagatgttccgtaccatggacaaggacaatgacggcaatttgtcacttgaagatctcaaagagggtttccggataaacggtcatcctgttccagaggaagagataaagatgctgttacaagcgggtgatatacatggaagtggcacgttagactgtgaggaatttgtgacggtcttacttcacattaaaaagctcagtaacgacgagtatctacctaaggctttcaagttctttgacaaggacaagaacggttttattgagatggccgagctgatggaggctctaggtgacggtgaactgaagcctaacgagcaagtggttaacgacattatccgtgaggttgacaaggataaggatggccgtatcagctacccagagttcgaattgatgatgaaaggtgggtcagactggaggaatgcctctagacgcataaaagactggtgggaagctacatcctccccgctcccaaagaaccaaaagcgtgacttcaacggcctcatgatatacaccctatggaacatctggaaggagagaaaccggaggatattcgaaaacagcgccctcacccctatccaattagccttgaagattaaagaggacgtgtgcactttcaagagagccatgttcctccagtattag

SEQ ID NO: 18027 - DNA, 2456 bp, Zea Mays
cagcattgtttatttgggtgccgcgtccctgtccgaccaccgggtggtggttagcctccgggttggccgagccaggaaagctaccgctcctcctcttcttctcctccctccctggctccctccctccctctcgtctcctcgccaagaacgcactgagtccattcctcctcttcccctcctatcgcctctctctgcccctctcctccccggagattcctgctcctcccgactcccaagggttatcctattcactctgcctgctgccaaggccaactaggatatcaactaggaggagttgaggaggaatggctgttggcggaactcaaccggtcctcaggaagtacctaggtgccctcaaggacacaacgactgtgagcctggcaaaagtgaacagtgattataaggaattggatattgcaattgtcaaggccacaaaccatgttgagcgtccatcaaaggagaagtacataagagaaattttccattccatttctgctgctaggccacgggcagatgtagcttattgcattcatgcccttgctagacgtctttcgaagacgcgcaattgggcggttgcgctaaagacattgatcgtcattcatcgtgcccttcgggaagttgatcccacttttcgtgaagagcttcttaattatggcagatctaggtcacatatgttgaacatggcctactttaaggatgactctagtgcagaagcttgggactattctgcatgggtgcgcatttatgctttatatttagaggagagactcgaatgtttccgagtgttgaagtatgatgtagaaacagatcctccgaggactaaggatcttgatactgttgatttgcttgatcatctgccacaattgcagcaactcctttttcgtcttcttgcttgccagccacaaggagcgtcatcttacaatgttataatccagcatgcactctcaatggttgctttagagagtgttaagatctacactgcaattagcgatggaacaatcaatctagttgacaagttcttcgagatgcaaaggaatgatgctgttagggcacttgatgtatacaaaagagcaactaaccaggctgaacgactttcagaatttcatgaagtgtgtaaaactatacacattgggcgtggtgagaaattcctgaaaatcgagcagcctccagcatcattcctgcagactatggaggactatgttagagatgctccaacaggtcaaaaacaaaagactatactagcgatagaatacaaaaaagagccagaggaggaagaaaaaccggcctcccctcctcctgctccagaacaggaaccggaacaagagcctgagccagaacccgaaccagtgaaagaggaagcaccagaagccgagccggacttgctgggtctgaacgaaccgagccctgctgcgaccgcgatagaagagcagaatgctttggcgctagcaattgtcccgatagatgatgttccgggagctgctcctacttttgagaacggagtcacaggctgggaactggccctggtgacagcaccgagttcgaccgagaccgccgttgccccaagcaagaaactggccggtggtctggacttgctgacccttgatagcctgtacgacgaggcgaaccggagagcgagccagccggcgagctacaacccctgggatgcaaccgcgtctgccccgatgatgaccaccatggcgccggcgatgcacgatccgttctacgcctcgaacgggtacgcggcgccgcacggcgtgcagatggcggcgatggctcaccaccagcagcagcagcaggttttcatgctgcagcagcagatgatggcgccggcgccggcggtccaccacccgatgcagatgcagcagaaccccgcgaaccctttcggcaaccccttcgcggccgccggcgcgcatccctacggcgccgccggcatgccgctccacgccgggcccggcaacgtctacacggggctgatctgatctagtaccccacgcggccacgcccggtggccagtttcttggttgcgttagcgctactgttgccccaccattcattctttttgtccaagttttcttggtgccattgtgagaaggaaatttgtagcacagacaggcaggcaggcaggtagaggcggtcacggttggttatttataaatagcagcgtcgggtggtgtcctgtacgtaggaggtgagtgcatgtatattatacaacatagagtttggccacttgttcgtgtgcacatgagagtcgattctcgtggcggcgagactcgtcaggacggcccgtcgagattgagattggattattcttggtgaacatacgctggatacggttgaataatgcaggcattcttttttttagcagctgactttgtgtgatccaatggaaacaagtagatcgacatctcatcatgaagctggaaagtcgatcctgctcttgccggtgctagtgtgtg

SEQ ID NO: 18028 - DNA, 1295 bp, Zea Mays
gattggttggtcttcgagtcggcttggactcttctcttcctcgccaactcctccgtggcgccgccgtcttgcctgcagctttttgagccttcgtcatatccacccttctctctgtctcggcatctgtttgagcaatctaattatcccaagcacgcttcctcgacttcctatctcgactctcccaagtcacaaccctcgacctcccccctactccaactactggaagcgccgatccatcaggttctgatcgattcttctgccccgatccgcagcggcaagcggagatgaactgcgagacctgtcagctgaaagaactggagctggaactgacggagatcagggatgttctgcgctgtattttgcacaccatattcttccatagaaccctcagcctggttcgccccaaagatgttgactgtgatttcctcgatattacttatgtacaatgtggtctaccggaactagaaaaggaagttgacgaaaagatagaccagttcagtgcatgggtggagaaacacccaaaccgcagaagccagatctgcctctcctttttcgacgagaaacacagacaccctggttggtttgtcaacaaaacagagcgcatctattgggagcaatggttcatcaatttgcaagtcatgttccccaaaagatacagcaagtcaaacagctccaaagggctgacaaacatccaagcaaatgccgtggaggagaccagcacaaggcgtgctgcattggaggcgtcgattaacgaagtgctgttccagatcataaagttcgccaacgagaaaaaggaccacattcctgctatccctgacaggattttcaatcacgagatcatgatcccaaggtgaccccttttccttggacgtgttgacagctcggattctgtatttggatggaacacggacgtcattcgcagagttctgaatagcgggcacccatactcgctttaactgaagacgacatctcagtgggcgcccgtattcagtttattagcgtgctgccgccctgtttggaagacggctctgttaaccatcgtggtgaaccatataatatgcctaaggaaaaacctagttctgtgtacatcaccctgctcatctggcatgtacatactgtgttgggatcttgctcatcggtcaaacattcttaagttcgattaagtttataaataacaatattatgattctaaataagtttatcatgtaaaagtatttttcatgattgatacttattgcgaagcatctccgagtgagttaggtggttcgagtaacactccttaagtcttgaattcg

SEQ ID NO: 18029 - DNA, 254 bp, Zea Mays
atatccactttgtttacttgctgaggagaaatatctgccaatttatcatcttccgtgtcatagcctattcctgaggtactaagagcatccctgaagaaatctcttggttcagttggttgtcctgttgaacttgagttgtcttgtacaggtgcctgtggcccaatgctaggtgctgcttcctttggagaggaatcagatggcattggcctcgaaagaagaaaataagagttccctgatgacgacccaatctagat

SEQ ID NO: 18030 - DNA, 2759 bp, Zea Mays
atctccgatcgtccgtgtccctcaccaaaagttcaaaaccccatccaattccaaatcccacttctcgccagttcacctccgcctccgctcctcccctccccctcccgtcctgccatggccaccgcagcacgcgccctcgtcgccgcacgcccggcacggccgctgctgccgtctcggcgcctcccgtcctcctcttccatccgtcccgcgcggcaacgtgctggcgtcgggtgcgtccgctgcatggctcggcggccggattccacctattccccgctgcgttcgggccagggcggtgaccgtgcaccgactgaaatggcgcctctgttccctggctgcgactacgagcactggctcatcgtcatggacaagcccgggggcgagggcgccaccaagcagcaaatgatagattgttacatccagacccttgcccaggtggtagggagtgaagaggaggcgaagaagaggatatataatgtgtcctgcgagcgctattttggattcggatgcgaaattgacgaggagacctccaacaaactcgaaggccttccaggggttctttttgtgcttcctgactcttacgttgatgctgagaacaaggattatggtgctgagttatttgtgaacggtgaaatcgttcagcgatctccagaaaggcagagaagggtggagccagtgcctcagagagctcaggatcgaccacggtacagtgaccggacccgctatgtgaagcggagggagaaccaatcttaccagagatgatgtttccgtctctgaagatgtaaaatgtcacggtttccacaagtgtccaaatgcggtactgaagatgcagcagcaactccccactactcatatgagaatggcatccgttctgtttgccgcgcattttaagctgtatatgcttattatgcatttgggcttgtacctcagtcgatatgaacgatgtatcctttgaactaacgcattataatttttgaaaccgttttagccagaaattaatcaactgttgatgattatcatatgatataccgcatgatcatctcggaaggggcccgtccgttcgatcgttcccctctcacaaactgctccagtactccaacccgttaaactgttgatggtgacatgatgccacattgccactggcagtcatatgcatgccgtcaccatcacattctggtagagataacggtgatgcaggcaaacgggacgcggagggtgcagcccgcgatctgtaacgtgtggcgcagcgggcgatctccgattcgctgccttatcctctgctactgccgcaccaaagcgtgagcaagcctgcctcccgcgagagcgctcaaccagccaagccggcgtcagaggcgagcagagaaatggcgggagcgaacttcctctccaccgcggcgctcgtcgcccgcggcgtcgctgcctgctcttctatttcaactccgacacggaggcacccgcaaatccgggtgtgctgccgggctgacgttgaggctatggaggcctatgcccatgaagagcgccttcgattccgtcggagagatttcatcggcacctgcgtcggcaccgctattggtttggaaatgatcgacggctctacgagtttctctggagtggctactgcagctgatctcattgagcgtagacaaaggtcggagttccaatcaaaaatcaaagacaccctttacgtagccataaaggctaagccagagctcgttccatcgttgttgaccatggcactgaatgatgccatgacatacgacaagaccacaaaaactggaggcgcaaatggatctatcaggctagaaacaagcagacctgagaacagtgggctctcttccgcgttggatttgctgactgaagccaaaaaggagatcgattccttttccaagggaggtcccatttcgtttgcagatctgatccagtttgcagcacaatcagcactgaagagatcgtttcttgacgctgccattgccaaatgtggtggaaatgaagagaagggaagaacactgtactctgcatatggttcaaatgggcagtggggtctgttcgatagaacgttcgggagagcagacgcacaggaagcagatccagagggaagagtgcctgactggagcaaggcttctgtgcaggagatgaaggataggttcgtcgctgttgggttgggtcctcgccagcttgctgttatgtcagcgttccttggacctgaccaggctgctacggagggacgactgatagctgatccggattgccgtccatgggtggagaagtaccagcggagccgcgagaccgtctcccggactgactatgaggttgacctgataactacactcacaaagctgagctcccttggccagaagataaactacgaagcctacacataccctaagcagaagattgacctgggaaaactgaaactgtaagagatgattgccgggcacctgcatcggccgtatccaggaatcgggagctaattgtatggtaggctctgtctgctagagtgatttgattcggcgctgacgtccaagtattggctacttactggtcagctgtcagacattcttcccacggcaattaggatggtccctgtacatggttaaattggttctcccatttcgttttgtgtgaacttgaagaggcaaacgcttgtgagaagtgaggtgttgtgtcaatccccttacgtatacgagacgactgaagaattagtagaaaagaagtgcaagtgtcatgtcttgagtctgaagtctgagctcatgtttctg

SEQ ID NO: 18031 - DNA, 793 bp, Zea Mays
gttgactttcaccatgacagcagtttcccttgcgtctgatttcatgtataaccatatgtcaagagacgtaacttccagctttggttacgattacttgcttaggcagtgccgtctaagaggcaaaattgactcgaatggtgttgttgcggcatatctggaggagaggttgaacatgggtgtcaactttcttctatctgctgagattgaccattgtaagaagaactacaagtttggtttcggaatgaccgtaggagagtaattctgctaaaacaattgctgagaagagcacatgaggactttcgcagtctgctttgcattgtatgttaagatacttcaggtctcagttttgattgatcaggttctgccccgtcgaaaaaaatactagctgttgctgctttacagggttttgtctcagtgtattggtggttgtttattttcagctacttgagcatgggggccatgattctttgttcatcttggatgtaactagctgattggtgttccaatgatgttgtatttgcagaacgattttttccttttaaatcaccaacaaccaccacactaggctttttctgtaccatcatggacgggccacaagattttacagttcaaagctttggcacttgccatatttgatgtcgtcttgtgcttttgctcatccatgtaagtcagaaatctcagttcatatcagtgcttttgctcatccatgtaagtcagaaatctctgttcatatcagtttttttattaaaaaaagtttccgctgcataaaaagagaatgtggaatcattgtacc

SEQ ID NO: 18032 - DNA, 1545 bp, Zea Mays
tgccgaagctgtggattggttggtgtcatcaattccggcatgaccattcttttgatggcgatgtctttgttagcttgcagcctgcacagtctacatagcaggccaaagcttgttgctggttctccagaaggatttcctggtcatgttgatgggaagctgcgagaggcgaggatgaaccatccaaagggatttacagtggacgacaggggtaacatctatgtggctgatgccatgaacatggccattagaaagatcagtgatacaggggttacaactattgctggggggaaatcaggcagaggagggcatgttgacggaccaagtgatgaggcaaaattttctactgattttgaagtccgttacattggcagtagctgctcccttctggtgattgacagaggaaaccaagcaattagagagattcagctccactttgatgactgtgtgtaccagtatgaagctggttttcctctaggagtcgcactgcttctcgctgccgctttctttggctacatgcttgcactgctccaacgccgagttttagggatgtattcaaatggagatgaccacgagagcccagtaaaagcaaaattaaccagcattccacctccataccagaagccactgaagccttatgttcaccccctgctaattccaaatgacgacgaacctgtgaaacaagaggaggaagaagggctcttcacgtcaattggcaagcttgtgggtggagcaaaatcatcaattgcagagatcattggcgccgcattctccagaaagaagcgagtgaacgttcatcatcatcagctgggtaggccaacctcctggccagcacaagaaagctatgccatcccgcgggacgagaccccaccgccgctggacacaagggcgcccacccctcgcaaaaactacgccttcatgtccaaggagccggagaagatccaccacatccggcacggccggcctcagttacatggctggaccggagaggcagcacctcagcagcagcagccgcagcaggtgcgtcaccaacagtacgtgcaacaccacaggcagtactcggccgggccgcagacctactacgagccgagctgcgatgcaacgaaggagatcgtcttcggagccgtgcaggaaggggacaccagccgccgtcccgtggagatcaaggccgtgaaccatggggacgcggcgccgtacgagcagaacgggctgcgattccgcagtagttatagcgtgcgctacaatggcaataactagtcgaggagcacttctgtagctgtaactgtaaggagaggagcgatagagagagcagtcgaggggagtacaatctcctcattgacaagtgcaacagaaaagctggaattttggtagaagagcttggtgataatggtcattggactctttactggcggtgacatatataaatatagcgtgtatttttcttgttcttcttgggtctacttctatttttaataaatcaccttgcgtataggcctatctttaataaacaaagtgtgtatttattattttatcaactgtttttcgttt

SEQ ID NO: 18033 - DNA, 357 bp, Zea Mays
ggaatttttgggatacacttacaattagtaagttaggcgttgttaataaattattaaccataacctaccttgtttaccttgcataactcctcccacttgctgagcccccaccataagtgacctcactccttgctagattttttatcagaagctgatgaggaagactgtgacgatggtgatgacaagtactgagtctagcgatgcgccagtcatcttcccatggaagattacccttgctatttctgatgtactttgataatgatactatttaagacttttatgtctggatgatgtaataaagttattatactctttttacaccattattgcattgtcttttgatatattacacttgtg

SEQ ID NO: 18034 - DNA, 3372 bp, Zea Mays
cataacttccaagtcccaaataaactcctcggtgactcgccccaacaccaaacagtaaacgacgcttccctccgccgccgtcagatcggagctcgactccgtgccccgcttctccgccgcgatggcggcgccaccgcgccgctccctccttgtccttctctccgggctcctagtcttcgcctcccttgttgccctcaccacagccatctacgaggaccaggtcggcctcgcggactggcatcagaagtacattggcaaagtaaagcaagcagtttaccacagccagaagagtggaaggagacgagttgtggtcttgacagaggaaaatgtgatctcgtctcttgatctacgttctggagatatattctggcgacatgtcattgacaagaatgaccccttggatcagcttggtctatcacttggaaaatatgttctaactctttcttcggggggaactatattaagggcatggaatcttccagatggactgatgatctgggaaactaaccttcgaacttccacagcatcgaactcacagttgcatgttatgtcaaacaataaagcggccagggacaacttagttttagtttcagctgggcgatggatttatgctgtatcaagcattgatggggcaatttcatgggaaaaggagttttctcttgatgacttggaaatcaagcggattctccaatcacctgaaaatgatgttgtgtatgctttaggacttgctggttcctcgaagctagctttgtatcacttgagtgctaaaactggagagatactaaaagatatccaagagtcattccctggtggattatgtggtaaaacagtacttggttctgataatgtgtttgtagcattagataaggccagatcaagtctgttacttattgaattcaagggtgagagaattagctacaacaaggtgctggtttcagatcttgttcaagacttatcaggatcatttgagcttcaatctttgtccagtgacatcatatctttgcaaacgtcatcttctatttccctcctaaagctcaaaggtaccgatggattggaagtacttcagagatttgaccagccagctgcagtgagtgattccttgccaatcacagaaaaagaaaaagcttttgctgtcgtgcaacatttgggttccgaaattgagtttatcgtaaaatttacaagtgacctaagcagtgagattattagagaaaaggttaatatagaccaaaataagggcaacgttgagagggtcttcttgaatagttatattcgaactgacaagtctcatggttttcgagctttggttgtaatggaggatcattcactcttgttaattcaacaaggtgaggttgtttggagcagagacgatgggctggcttcaattgttgatgtaacaacatcagaattgcctgttgagaaggatggtgtatcagttgccggtgtggaacacaatctctttgagtggcttaagggacacatgctgaaactcaaaggaactctaatgcttgctaatgctgatgaagttgctgcaatccaagcattgagactaaagagctctgagaaaaataagatgacaagagaccataatggatttcgcaaactccttgttgtattgacaaaggctggcaaagtgatgactctgcacactggagatggacgcgttatctggtcaaaattgctgccatctcttcgtgcctccagatttggtggagtgccttctgcattaaggatataccaatggcaggtcccgcatcacagtgtgatgcgggaaaacccatctgtacttgttgttggtagaactggagcagaatcttcagctcctggcgtattctctattcttgattcatattctggagaagaacttaactctatgaaacttgaccattctgttttccaaattatccccttaacactgaaggattcatcagagcagcgactttatctgattcttgattccaattccaatgctcatttatacccgaaatctgcagacaccctcaatatatttcttcatgaaatgtcaaacctgtatttctactctgtagatattcaagcaaatgttattaaagggtattcattacagaaatcatgtgatctcaattttggtgatgactactgcttcagtacgaaggagttatggtccatcatctttccttctgattctgaaaggattgttatctctgaaacgcgaaatatgaatgaggttgttcatacccaagctaagacaattggtgatcatgatgtgatgtacaatcactggacgcatacttcatcgtgtaactcatcatggtgcacaaggccctgtacatgcagtcttgagcgagaactgggttgtttatcattattttaatctgcgagctcacagatttgaaatggcggtgattgagatatatgatcaatctagggcggacaataaagatgtcatgaagctcatacttgggaagcataatctttcagcaccaattacatcatacgcccgccctgaggtggcagtaaaatcccagtcatactttttcacccattcagtaaaagcaatggcagttacacaaacggctaaggggatcacttccaagcagcttctgattggtactattggtgaccaggttttggcacttgataagcgctatcttgatccacgccgttcagtgaacccgacacaacaagaaaaagaagagggcattataccattaacagattctttgcctataatacctcagtcctttgtgacgcactctcaccaagtggaggccctgcgagggatcgtttctattcctgcgaagctggagtccacgactcttgttttcacatacggcgtcgatctgttctacacccagcttgccccgtcaaggacctacgattccctcaccgacgaattcagctacgcgctgcttctaatcacgatcgcagtcctggttgctgccatcatcgtcacatggatttggtccgagaagaaggagttgggggacaagtggagaaagcctatctgctgtgaaccgacacactgccgaagcagccacctgtgcagctgaaaatttctggagatggcatcaaaggatattagcagagcgcagatggcgagagaatggtttgcttataatgtgtaagctgtgtaccccgactgcaaccgaactctttagcagattatagcaattgctgttgatatagcgtttctgcttctcttataactttaatggcaggaactgtattttgccttcctctcctgccattaccattctgttgtcagcctgtgataggctgggctacaagatgctctttgctgtggtttgcgcaacactcagttctattgctattttctgatccgatcgttcatgtattaatgacagcagtagtcaggtcaagtaccgcttaaag

SEQ ID NO: 18035 - DNA, 406 bp, Zea Mays
gtgcacccccaccatccccaccctcgccccgctctccatccgcggccgccccgccatccccgccctcaccccgctctccatcgatggaagggcgccattccagggatttccctactttccatccgcgacagcccccaccatcctcgcccccgccatccacaaggtcctcggcgccccttccttagcccccgtcgtccccacatatttggattcgagattttgctcgagttgcctcgcctcgccgaggacccaccgcagcagtcagggagcatggtgggcaggaggatatggggaggagcagaggaggaggtgaagctcacatcgacaacatgttcatggcactcgagtccctcaagaagaagggcaccaagggcagggcggtcaggtcgtcctcaggaagaagcac

SEQ ID NO: 18036 - DNA, 2055 bp, Zea Mays
gtccccgcagcctcagcccccggcccgcgtcgcctcgcgccggacgccgcgctgcttctgatttccgaccgttcctactcggtgtcggccggattccctagtccttgtcgtacgggagggtgcggtttcctggcgcggatgtaagtgaaggccgtggcaggggcagggaaggaatgcagaggtcgcggcgagcccttctgcggaggacggcggcagcccaggagcagagcgctgtggcggaggctgccgctaacggaaggaggaggcgtttgtacggcttctccgcctccctcgtcgtcgcctcgtgggtcgccgtgctcctcctccactccctcgtcggacacggcgacggtcaacgagatggaggaggctctactgtagatcttactgttgtagagcctactgtaaatgttggtcctattaatccggttgtacaggaagagcatggaggtgatttggagatgccaggtgatagctgtgttaattctgacgaaaacgctgtgctttcagaggatacactggtgcaagcagatcaattgtgttccagtgatgaggtgcagaatgagaacacagaagctgtaaccatagacagtcaggttgagctttcaggagatcagggtgggtatcttcctcagtcgggtgttgattctggagttcaaccaggggagaaggtagagagtaaagatttgcctagaccaccgagactatcacgggttgctcctcctgatctcgatgaattcaagacaagagcaattgctgaaaggggacctggtatttctagtcaacctggtaatatcatccaccgaagggagcctagtgggaagttgtataattatgctgcagcttctaaaggggccaaggttctggatttcaataaggaggctaagggtgcttccaacatcttagataaagacaaagacaagtacctccgcaatccttgctcagcagaggggaagtttgtcatcatagagctttctgaagaaaccttagtagatacaatcgcaattgcaaattttgagcattattcttctaatccaaaagaatttgaactgctgagcagtctgacatatcccacagaaaactgggaaactcttggaagattcactgccgcgaatgcaaaacttgctcaaaatttcacttttcttgaaccaaagtgggctagatatttgaaactgaacttggtaagccattatggttctgagttctactgtactctcagtgtgcttgaagtgtatggaatggatgctgtagaaaagatgcttgaaaacttgattccagttgagaataagaaaacggaacctgatgacaagactaaggaacccattgagaaaatttatttgaaagatcctgctggaggaaaagaattctcacaggaaacccttgatgaagatgaatttgaactagaagatgataaaccaaacggtgattcattgaagaatggtgctaatgatccagtttcagaggcaaggacacttcaggctggcaggattcctggagatacagttcttaaggtgctaatgcagaaagttcaatctcttgatgtgagcttctctgttttggagaggtacctagtggagttgaacagcagatatgggcaaatctttaaggatttcgatgccgatattgatagcaaagatgtcttgttagagaagatccaatcagagctgaagaatcttgagagcagcaaagataacattatgaatgaagttgatggattcctctcatggaagttagttgcttcctcgcaactaaaccagctggtcctggataatgctctactcagactgacatggagaacaggagtcttgctgttatatttctcagttttgttttcgcttgcttagctcttgctaagctgtctataggcatcatgtccagattttgtagattctataactttgaaaagttccataatgtaagatccgggtggcttgtgttgctgcttagcagttgcgtcatatccaccattttgataatacagtaatagaagcattcaacctcacatggtcacgcctgtacatcctagttacatgagatttctgatgcaaaatgaac

SEQ ID NO: 18037 - DNA, 2000 bp, Zea Mays
cactcatgcaaacaccaagatgctaatttgccgaactgataagattgtcttcaagctttttgacaaagttcccagtgatttacccccagttttgcggtcacagattcttggttggttgtcaagtagccctactgatatagagagccatattagacctgggtgtattattctaacaatatatctacggttagttgagtctgcatggcaagagctttctgagaatatgagcctgcacctggataagcttttgagtagctccactgacaacttttgggcatctggcttggtatttgtgatggttcggcgtcgcttagcttttatgctcaatggtcaaattatgttggacagacccctggcacccagttctcatcattactgcaagattttatgtgtcaaacctgttgctgcaccttattctgcaacaataaatttcagagtcgaaggatctaatctactcagtacttcctcaaggctaatttgttcatttgaaggacgttgtatattccaggaagacacagactctgtagcagaaaatgatgagtatgaggatagggccatcgaatgcctcagtttttgttgttccgttcctggtccaagaggaagaggatttatagaggttgaagatagtggttttagcaatggcttcttccccttcataattgctgagaaagacatatgctttgaggtttctgagctggagagcatatttgagtcctccagtatcgaacatgcagatgctaatgataatgccagggaacaagctctggagtttctaaatgagctgggttggcttcttcacagagcgaacagaatgtctaaagagaatgtaactgatacatctgtagctacctttagcatgtggagattcaggaatcttggtgtatttgccatggagcgggagtggtgtgctgtgatcaaaatgctgttagatttcttatttattggccttgtcgatgtgggatcccgatctccagaagaggtggtgctttcagaaaatttgttgcatgctgctgtacggaggaagtctgttaacatggttagatttctgctgagatacagaccaaacaaaaactccaaggggactgcacagacatacttatttagacctgatgctctgggcccgtcaatgattacccccctccatatagcagctgccactagtgatgcagaggatgtgttggatgtgctgaccgatgatcctggactgattggaattagtgcttggagcaatgcacgggacggaacaggttttaccccagaagattatgctcggcagagaggcaatgatgcttacctgaatctggtccaaaagaagattgataagcatcttggcaaaggccgtgttgtcctcggtgttccgagcagtatatgctctgtaataactgatggtgttaagcctggcgatgttagcctcgagatctgcatgccaatgtctgcatcagtgccaggttgcctcctctgcagccgtaaggcacgggtgtatccgaattctacatcgaggaccttcctttacaggccagcgatgttgactgtgatgggagttgctgtggtctgtgtctgcgtgggcatactcctccatacctttcccagggtttatgccgcgcccacattcagatgggagttgctggagcgtggacccatgtaagttttaggatgagccttagctgttgtttgtaacttgtaagttgagagttttagcgttgtggctaagatcaaaggaacatgattaccgtgtgaagaagttcatctgtgtttaacgcaagatgctgttgcggctgtaagctttatatacatcgtcgatttcaactatatttacagcctatcatgctcccattccattcatccattttgttttagaattcattccttgcggagaatttgtgaaccatcagaataaaaaacaggttcttgtatttataatcgttgagacataatatttcttggaatgatgctgaaaaactcatgattgcatttgctgaaagtatatgttacaatccaag

SEQ ID NO: 18038 - DNA, 695 bp, Zea Mays
caagtttgattcatcaaaattattcagtcaaggaaaagatcttcagcaattgattaccgaagaaaagaaggcccctgagtgacgtcaaccggaacccgtagtcatacttctgactatctcgtcaaattagtcagggtaagttgattcgtatttccgtcaacaaggtctataaatagattaaataaaattgttgatcacaataaatattattaatttagcatgtgtatattgtgatgatcgatttagatagatcagtaaatcaagtaattaagatacacaatttaaagagttactaaaaaagctagaaataaaaatagatgttcgagtgttattatgccgatttggttaatagatgtagtcgatgccctactgtgatatccatgatgcttaatgcttggttttaagtgtttcatcctttttagagtagattatctataatatacttgttatacttgtgctcatagatatgcatcgtgcatctcatgaggtacgataaataatcgcgcgatgcggaagacgatccaagtcgaccccaagcgcggactaatttgcaagatgaagctgatggaccaacctgaagatggacaatggagcgagtatcggaataaaggctgatcgtcaagtgaacgtcatctaacaacactaacctagtgttactcaggcaagccccggtgcatgcaacccctttccttgtg

SEQ ID NO: 18039 - DNA, 1816 bp, Zea Mays
gtgggaatctgcaatcccttttctattctagctaggattagatggcttgaatctaaattgtgcagactctggtgattataactgtctgataaagggtcatcttgagggtgcggatatgcatgttagaacttcaggggagtgtcgagtcaggcttatcagtgcctaaacttgttgatacgagctaaaagtttgctgaagcatctttcctgtgaggacctgacaactgacatgcacaaaattagtgggataaaatgctgatccactcttggtaaaaacaaaggttctctatagtgttttccagtgtccaaacatctgagatgggaaaaaataacttgccattgatgataatgagataatccactgaaagcagataccacttggcactctgcctggaatagatgtcaatctgtaactgatagagttaatttttaggtaccagatcatctgatttctcagaagcaaaatgttgtttggagctcagtgacaccatcttgtaatgcctgtgattttacgggaaatggaggatcattctgtccatcccatgtctaagtctaaccatggctccttgtcaggaaatggttatgagatgaaacattcaggccataaagtttgcgatagggattcatcatcggagtctgatcggtctcaccaagaagcatcagcagcaagtgaaagcagtccaaatgaacacacatcaactcaatcagacaatgatgaagatcatgggaaagataatcaggacacaatgaagccagtattgtccttggggaaggaaggctctgcctttttggccccaaaattacattacagcccatcttttgcttgtattccttatacttctgatgcttattatagtgcggttggggtcttgacaggatatcctccacatgccattgtccatccccagcaaaatgatacaacgaacactccgggtatgttacctgtggaacctgcagaagaaccaatatatgttaatgcaaaacaataccatgcaatccttaggaggaggcaaacacgtgctaaattggaggcccagaacaagatggtgaaaaatcggaagccatatcttcatgagtcccgacatcgtcatgccatgaaacgggctcgtggatcaggaggacggttcctcaacacaaagcagctccaggagcagaaccagcagtatcaggcatcgagtggttcattgtgctcaaagatcattgccaacagcataatctcccaaagtggccccacctgcacgccctcttctggcactgcaggtgcttcaacagccggccaggaccgcagctgcttgccctcagttggcttccgccccacgacaaacttcagtgaccaaggtcgaggaggcttgaagctggccgtgatcggcatgcagcagcgtgtttccaccataaggtgaagagaagtgggcacaacaccattcccaggcacactgcctgtggcaactcatccttggctcttggaactttgaatatgcaatcgacatgtagcttgagatcctcagaataaaccaaaccttcagttatatgcaagccttttttgaggttgctgttgctgtacctgagaactgtggttaggttatgagtttgttcctcaaaactgacccatacatgacatgctaccttgtgctgagtttctgagacaaagccatcgaaacatgatcttgtggttcagtactttgctgccattagtgtctgataaactagctccccagtttgcagtttctctgaattccagcatgtctagcctcagccaacgttttgcatttgatgtgacgatgacataccatacacatttgtgcattcatctatgttct

SEQ ID NO: 18040 - DNA, 1628 bp, Zea Mays
agcacttaaagtagggctggatattctttcacgtatttatcaacatgtgctaggcttgctcttcctgcacctgaagaaaaatgtttggttacattggaagatccaaatgttgtagagttttctcaccaaacatacataaactcagggagtgttggccaacttgagtggagtgcaaattatcctaaacatgctgtttctggtaatcatcagccaatcatcgaggaaccactgagcccagaatgtgaaactgaaaatatagaggcacatgagggtgcaattgaggatttcttttgtgaagaatctgatgaaattcctaccattaatcttaatatcgaggagttcacacaaaacttgaaggactatatgcaagcaaacaatgttgagattgaatatgctgacatgtcaaaggcattggttgccatcacgcctgatgctgcttccattccaactccaaagctcaagaatgtcaatcgtctgaggacagaacaccaagtttatgaactgccagattcacaccctcttctggaaggattcgaacagagagaaccagatgatccctgtccatatcttctttccatatggaccccaggtgaaactgcacaatcgatcgatgcccccaagacattctgtgattcaggggagacgggtagactatgtggaagttcaacatgctttagttgcaacaatatacgagaaatgcaggctcagaaagtcagaggaacacttttgataccatgccgaacagcaatgagaggaagcttcccacttaatgggacgtattttcaagttaatgaggtatttgctgaccattgctcaagtcaaaatccaattgatgtcccacgaagttggatttgggacctcccaagacgaactgtttactttggaacctcagttcctacaatattcagaggtttaacgactgaagagatacaacgatgcttttggagaggatttgtttgcgtgaggggctttgataggacagtgagggcaccaaggcccctttatgcaaggttgcattttcctgtcagcaaggttgttagaggcaaaaagcctggagcagcaagagcagaagaataatagtacattgaagaaatataggggtgctaaccagacgaggatggatagcccgaaatgagatgctgacccaataggtcgccaaatcacctccaaattctaacccaatgacttccatctgtaatgaatggcaataccttgaaaacctgtgatggagatgttttgtggcgacatgatctcttaaattagattccgtctttggtaacagcctagctgttcttgttgagtcgcatattctttattctgaagatcaatatagcaaatgggagaaaaaacatagtgcacagtcgagctgttctaattgtacctcttgtgagtggaatcagttgttgtacaacaggaagatggacctatctgtacaatggtcgtacatgttctttgatcatagtataaacaatgtaagcctcatcagccgttatttgattgtttcaaaacaaaggaaaagcattttcaattcatctgttcaaagactatttccttttccccccttctatcttgagatggaaactgactaattttttacttgtggggatctgacagtgaatatatcaaaa

SEQ ID NO: 18041 - DNA, 1489 bp, Zea Mays
gtgaaaacaacgcacctatcagcatgggccacgatgttcaaaaatctggtttaacagagacgagtactgtggctatagtagtttactcgtgctaacgataatttcacgcgagggagtagggacggcatggtactgcactgaccaccggccttaacttgcaagcaagaacaaaaatcaaaacccaactaaccaggagagacccagtgaagcgtagaagtcacagggacggcagggggacgaggaggacgacaggagggacagaggctgataaaatctaggacaaaagccctcgagctcacgccgatccgcctcctgcattgccttgaagcctctcgattcgggcagacccgagctgccccgcggagggctcgatctgggcccagatcgagcaggcgagcagcatttcgatccggtgcatgctcaagtcccggcggtgaggcatggggcaggggcacgtggacgagttccttgcagccaaccggcgagctgaggtgatagattggcttggtgggttgctgccggagttcgacttgccgttggattcttcagacgaggagctgcgggagtacctcattgatggcacgggactatgctacattgcagagaaactcatgcccggcattcaggaggaaatgtggggtggtaatgcatcggatcagaggtcgaatgtgaagaaattcctctattttgttgcggagatgggtctgccaggtttcagtgtcaaggatctggaggaggtgagatttcaaatgaccgacagttcacttgagacgagtacaggagctgcatcgattgggttgtgtgtggtatattatgtcaaggtgtgcaaatatgcatacaagctggtacatgctcagtctggctcatcaacgagacatgagtgtaaaagaatggattatatagcccatggccaaacaacgaatactgctactttacaaaagatggggaagatggagaaaacaataggggaaaaagaagtgggagggttaatagggcattcaaccagcgatacctcaaggcgtgtggagcaagaatcagtggggaatgcctgaatgaacaagatacaagaagggcacagagactatgggctatggcaggtttgcgtgggccagatcccccatggctgatgttccttctctggatgcgaagtcctgtaacattcaaacaaattgagcaacaaaattctgttgaaggttcatatgcacacaaatctagccccgcgtagcatgagcatatgtgatagcatggttgagtacctgaaggcggtgtaacaagtgcatcaagaacaaatgcacgaacacctggtgtggcggaaacagattttaagtcagaaagaagtgttgatttggtagaaaaagaggggggggggggggggggagggtaaacacaggaaattgaagttatgtggttcatgccagatagaatagcacgctgactcgtgcaacggggtgtcgccacaaaaatcttgttgcacgaacagcgcctgtat

SEQ ID NO: 18042 - DNA, 446 bp, Zea Mays
tacttcatcctcatctgagctactgtcagagctgctgctatcaggtttaacctgttttgaaccattactgactgctgtgacaggtttttttgaaaggacagtgggcttctttgaaaggacagtgggcttctttgaaaggaccgtgggcttctttgctggttcctcatcagagctgctatcatcactgtcactgctatcatcactgctgctactactggcaggaggcttttttgaaccggcaactggttttttggaaggttcctaatttaaggggaaaatataagtatgtatgatcttggtaagaggaaagccccaaaagcaagtgaacaatgcttacatcgtctgaggagctctcagagctgctgtcatcactggactcctgtttagcaggttgtgtacttttcttcggttgaataaccttcttcggctggaccttaacctgcaaa

SEQ ID NO: 18043 - DNA, 909 bp, Zea Mays
cttatactggttgatcacctgagagattggccttccagcatccactactgcggctagctttggaaaagtgaactcaagcaaactttctgagtataaagtagaggatcttgctgcagccttactgaattctttcacatacaacattggacagatagcctactttgtggctaatctttcaggcctgaagagaattttcttccgaggtgcttatgtctgtggtcatgagaagactatggacaagatttctcgttccctaaaatattggtccaaaggtgaagttcagacgacatttctatgccatgaagggttcttgggaacactaggtgcattttggagttatgagaacatggggatcgacagtttggcggcacatgaagtcatcagggaagtcttgcttggtgcaccatacacagggcaattcccatctttacctgtcactcaacaacaggagaatggagaacatggtactctcgaaggggaagtagaaagcttacgacatgacaatgccttgctgaaggctgaggttgagcgattacaaaaggagaatgcgttgctaagagctaagttggtaagatcaggcgagacttcaacattgtgatttgtaacacaataaaaagggcgagccgcagcttgttgtaaattttatctgtttagaaaatggctcaaaatgtaactcatataggaaaactgaattctggaaaagaaatgccaattagcattgttcatctagtgagccttgttgtataattatttatatattctttatacaagagcctatgtatttgctccgttcatgtaatcttgttcctgtaaatgttgtataaatagttaccaaaatccagtaagtatccggctttgtaattttgtcgaaatagtagtgtatgtttccaagttccctttggaaaaaaa

SEQ ID NO: 18044 - DNA, 3022 bp, Zea Mays
catgagtgcatgaacacagacagtcgtgttgggaactgtcatgtggttgtggtcttttagtattacaaactgatggcagctgattctacggagtatccctagaacgggctctattgggaaggtcttctatgctggaaatgatgtagacgattatatgcctagctcagaagaagcaatactcagaggcgaatatgctgtcattaggagtttagtccgagttctcgaaggtggtgttgaaggcaaaaggcaagtggacaaagttattgacaaatgcgactccatgcagaacctaagagaagctattgctacttaccgcaataacattcttcggcaacctgatgagatgaaacgagaggcatcactttccttctttgtggagtacttggaacgttattacttccttatatgctttgctgtctatgtgcattcggtgagctctgctcaccaaacaacattatcagtagaagttagtttttctgattggatgagagcaaggcctgaactgtacagcattcttcgaaggctattgagaagagatccaatgggtgctcttggttactcaagttcaaaaccccctcttacaaaaattgttgagtctgctaatgggcgtccacaagatatggacgttgttgctgccatgaggaatggagaagttcttgggcgtctaactgttttaaaaagcgaccactgcccaggcagccacagccttaatttacccgagagggtggagggtgcaccaaattttcgggaaatccctgggtttccagtctatggtgttgcaaatcctacagttgatggtattcgagctgttatccagtgcatcagtacaagcaagggagggcgacctgtgctatggcataatatgagagaagaaccagttatctacataaatggaaaaccatatgtgctacgcgaagtggaaagaccttgcaagaatatgctggagtacacagggattgatcgtgatagggtcgaacgcatggaagctcggctgaaggaggacattttacgcgaggcagaaagatatggtggagcgataatggttattcatgaaactgacgatggagagatctttgacacatgggaaaatgtagataatgaagctgttctgactccgttggaggtatacaaaaacttggtgagtgaaggccttccgatcaaatatgcacgggtgcccattactgatggtaaagctcccaaaagttcagactttgacacgatagccttcaatgttactgctgctagcaagggcactgctttcgtattcaattgccagatgggcaggggcagaacaactacaggaactgtgattgcttgcttgctgaaacttcgaattgatcatggcagacctattagaatcccagtttgtcaatatgaccatgaagatgatgctatttactcaactggaggagatgcaacagatcacaatggtcacttgaattcagaatcatggaaacctcgtactttgacgaagttaaattctggatttggaatcaatgacattcttctgctgcgaaaaattacaagattatttgataatggaattgagtgtaggcagactttggatactgttattgatagatgttcagctttgcagaatattcggcaagctgttttgaactacacaagagtaattaatcaacaacatgttgagcctagagttaggagggttgcattaaatcgtggcgctgaatatttggagagatacctcaaattaattgccttttctgcataccttggtagtgaagcatttgatggtttctgtggacaaggacaaacaaagatctcatttaaaggatggctgcaacagcggccagagatccaaaccatgaaatggagcataagactgcgacctggccgttttttcactgtgccgcatgagcagaaagcaacatatccacctccacaaggtgatgtaacaatggaaaccattgtcaaagctcgtagtggttctgttctgggaaagggatcaatactcaaaatgtacttctttcctggacagaaaaggtcaagcagtgtgaatttccggggtgcacctcatgttattaaggtggatggataccctgtgtatagcatggcaacacccactattgatggagcgagtgatgttttgtcgtatctgggctctaaagacacaaccggaagaaacattgcacagaaggtggtcgtcacagatcttagagaggaagtggttgtttacatcaagggatcgccatttgttttgagagaactagatcaacctgttgatactttgaagcatgttggcattagtggtccaatggtagagaacatagagacaaggctaaaggaggatatactctctgaagttaaacagctaggtggtcggttactgcttcatcaagaagaatttaatgcagccacaaatcaatgtagtgtggtaggttactgggaacacatagatctggaggacgtgatgacaccagctgaagtgtacagcacattgagagacaagggctattgtatcgagtacaaaagaatacctctaaccagggaaagagaagcattagctgccgatgtagatgctatacaatcatcaattgatgaatctgctaggtactatctctttatttcacacactggatatggaggtgttgcttatgcgatggccattacctgcctgggactgagtgcagatgcaaagtttgtaatggaagaaacagcagaaacacactttgtatcaacatctcttgcgaaaaatgtgtccatcaaaactaaaactgacatagcacttaagcagggtgactaccgtgacatattaaaccttactagagtgttggtacatgggcccaagagcaaagaagaggttgacacagttattgacaggtgttctggtgctggtcatctgcgcgaagatattatgcattacaggaaagcactgcaagattgttcacatgacgacgacgacgactgtgatgaggaacactcttatctcactgatatgggcacaaaagctttgaggttccacgcgtgcaggtggcgagatgtttggatgcctgcatct

SEQ ID NO: 18045 - DNA, 1766 bp, Zea Mays
gatgggatcggcaaaccatggctgtcgctttttcggtggactgacatcgcagcatcctcgatcggatgctaaatccagcttggacgaaggcatcatcgaggctctcttcggcactgcagcagcaaaccgcaagccgaaaccttcagacaaggaatcgggcgaatcgtcggccagcctcgggcgctcaaacacaccggagcaaatattcctgctcgagccgcgcaagtcacacaatatttccatcatcctcaagtccctcacggtggggcgggatgaaataatcgacgctctccgtgacgggcaaacagaactcggcactgacgtcctggagaagctttcgcggctccacatctccaaggaagaagagtccaccatcttgaggttctccggggaccccgacaggctcgcccccacggaggccttcctcctccgcctcctcctcgacgtgcccaatccgatcgcgcgcgtcaatgcgctgcttttcaaggtgaactatggtgcggaggtcgcgcagctcaagcactcgcttcggacgttggaattggcgagccaggagctgaggacaaagggcctgttctttaagctgcttgaggcagtgctcaaggcgggaaacaggatgaatgccggaacggcacgtggcaacgctcaggccttcaaccttacggcgctccgcaagctctctgacgtgaagagcactgatgggagcaccacgttgctgcacttcgtcgtcgaggaagtcgtccgctccgagggtaagcggctcgccatcaatcgcaactacagcatccgccgctcgggcagtctcgcgaggtctggccacgagggaggcagctcggcagcaggcttcgcaagccaggggccatcgcgggaggaaaggcagagcgaatacatgaacctggggctaccaattgttggaggtctcagcacagagttcgccaacgtgaagagggccgcactggtcgactacgacgcagttgtcagcgagtgcgccattctagacggccgactcaatgagatcaagagactcttggagacctgcagtgatgatggatttgcgcgggggctgcgaggatttgtcagggctgcagaacaggagctgaaggcgctaagaggggagcaggaaagagtacttgagctggtccagaagacaacagagtactaccatgccggtgccaccaaggaacggaacgcacatccccttcagctgttcatcgtagtgagggacttcctgggtatggttgatcaggcatgtgtggacatcaagaggaaagtgcagcagaagaaaccagcgccgtcgtcatcgcagccaaacacagctgctgcccccaccgtggcggctgtggcagcggctgcggccacaacagcagcgacagcgtcagcgaccgatggtcaaacagcaccagctcagaaaccacccgaagcagatagcaaaagaaagagggtcatgccaagatttccaaacctgccagcgcacttcatgaaggatagtgcagattctgattcaagtagtgacgaggaatagattgaacgggtggctgtagatgattgtttgcgttgttttgaattctttgttgtagaggtataggatagcttcagactgtacatagagcaatttttgcattggttcttttgtccatttcttcaatcaagatccatatcgaagcaccgaaataattctaaagaaatttgtaaaaatatgacgtgaagatctcaattgcttgaaaaatgatatctttgtttgaggggggaacccctactgtcagcag

SEQ ID NO: 18046 - DNA, 1353 bp, Zea Mays
tcaagtaaaactcctccagccccaccgccacctcccctcatgacaggaaagaaagcgcctgtgcccccacctccaccacctcaagcaccaaaacctcctggagttgtgcctccaccaccaccaccaagctcaaagatctcaaatgcaccagcaccacctccattattgggaaggggacgtggcaacacaactggaccaactaaaggccgtggcattggtttggcacaacaaagtaatcctcccaagaaggcttcactgaagcctctacattgggtgaaagtcacgagagcaatgcaagggagtctctgggctgatgcccagaaacaagggaatcaggctaggtctcctgatatcgatttatccgaactggagagcttgttctccactgcagttgtaaccagcacaagtgaaaagggggcaacaagacgtggttcagctattaacaagccagaaattgttcacctggttgacatgcgacgagcaaacaattgtgagataatgcttacgaaaattaaaatgcctctacctgatatgattaatgcaattttggctctggacacttccgttcttgataatgaccaagtggagaatctcattaagttttgccctacaaaggaagagatcgagatgttgaagggttataatggcaacaaagaaatgcttgggaaatgtgaacagttcttcctggagctgatgaaagttccacgtgtagaggccaagctaagagtttttgctttcagaattactttctcaacacaggtagatgaactaagaactaacctaaccaccataaacgatgcaacgaaggaggtcaaagaatctctgaagttacggcagataatgaagaccattctcacattggggaatgcattaaatcaagggacagcacgaggatctgctgttggcttcagattagacagcctccttaagctgtcggatactcgatctagaaacaataaaatgacgctgatgcattatttatgcaagcttcttgctgagaaaatgcccgaacttcttgattttgacaaagacctaatttatctggaagcagcttccaagatccaactgaaattgcttgcggaagaaatgcaagcaataaacaaaggtcttgagaaggtggagcaggagctagctgcttcagaaagtgatggtgcgatttcagttggctttcgtaaggcattgaaaagctttcttgatgcagcagaagctgaggttaggtccctcatttccttatacgctgaagtgggaaggaacgctgattcgctagctcagtattttggtgaggatcctgcacgctgcccgtttgaacaaggctgcaactcaatggctgaaagcatctcccatagctggagg

SEQ ID NO: 18047 - DNA, 1872 bp, Zea Mays
tgactcctatatcgatcaattatttctgttactcatttgattctttagtttcgtagagggaggaacatcgtgccatcgtgggatgcaggccccaaggaacaccagatattttgaggaaatatttatgggtcatttgattttacttatgaggtttagatcaaatgatagatgatgtcccgcatgattttggaattgcatttgtattgtataaacctgaatataaatgtcattcttaaatttgtgaagtagtctgaatgtctgatagcatcaaaaattggtgaagtagtctgatagcaacataaactataattaattgagatcttattactcacactagatcttgctattattaatcatggtacaacactgtcctcgatgtggttatgatcttctattgtaatggcactaacttcttatcaggaaaacatcaaaaacaatttggaaacaatttatttggacagggagaacctgggtgggttttcggattgtgcaaactgattatatgttgctaagtgcaggacatttgggaatttttctgagggtgaaatggtgccttttggaccctaaactatggagagattagtaggatgtatggactctttgtttcaattatgtggttgcacatatgttccaagcgctaggactgaaaggatgccacttgctattttgctgaattataacctatgcttaatatagatgattcttcattaagtgaacaggtagctgacccacattcttgctgaattataacctatgcttaatcttggatccaatcaacaaacaaataagtgccacaagcaaacccaccctgagaaaaatacagtgcttttctttggttccacattcttggtttccaatgcatgtttctcttcttttgatatactgttttcttttaccgacacatctctatctttatatgtgtccaaagctccaaaatgaaatgatttagtgcttgcactgaaaaaggaacattctgtatgctaattctctaaaatgtgtatggctgaaatcgatatatttgcaacatacgaatgaccttttttaacaatttgatggagcagaatggaggataatctaccagttaatgtccgggaatatcaagaacttgctaagaaattaattctaaaaaaagtcattacacgctaagaaaaataatgtgcaagctactgaatttacaatcaagcaagggtcgaggagtgggagggagggtactgggccctaaaggagaagtaccgaaccgggctaaacccgcaggagaaggtgaagctagagaaggagcccatggggcagttcgtggatgacgacatcagggacctgccaagatctccatggaggagatcgacgccgccaagcccaccaaggacaacgtcgacgtccgcctcaagtggctcggcctcttccaccgctacaagcaccagtgtacacccactgattctacaccccctgcaatggttgttgttgctgttggtaggagcgaccccgcgagcgtgacacagacaaagcagccttcggtgccaggttcgatttggtttctgcaaagtttatcactcctacattttcacaattagtttctacaaattatatcactccatttcactcctatgaaattactgtgacttaatttcaatcgaggtcattcttcttgctccttcgctttgcttagcagtaaagacaataacttcctttaccttgctcaatagtttgccttttaatttgaacaaaaatctaatcacttgacattgcatgggaggtaagctcctgtttttcacaaactttatcggtggacagttcatagtcctaacagacccattagtccgatagaacagttagcattaggtaattattttggcattggcaattttgatctactcc

SEQ ID NO: 18048 - DNA, 1972 bp, Zea Mays
aaaaggaaggagcaggtcataccagtagtacggccactagcatagagtgacaggactgcttgaattgcaacgtacatggcaggaacattgaaagtctcgaacataatctgggtcatcttctccctgttggcctttgggttcaaaggagcctcagtaagcaacacagggtgctcctccggggcaacacggagctcattgtagaaagtgtgatgccagattttctccatgtcatcccagttgcttacaataccgtgctcaatcgggtacttgagcgtgagaatacctctcttggactgtgcctcatcaccaacatatgcatccttctgccccatccctaccatgacaccggtgtgacgaggacgcccaacgatgctagggaatacagcccttggtgcatcatcgccggcaaaaccagcctagaagatagatacacaaaattagtggcatatttgggtgggggagactatggctgtacaaattaaggggaaaagcactgaccttgaccattccggtgccattgtcgcagacaagaggctggatgtcctcaccatcagccatttctacagaactgctgcaggcggcagcgagcgaactcttgcagcggcggcgcgggttccgcccgtgtcgccccgcagaggagcgacggttcgcagcttcgcacagcatgaagggaagggaagagaagaggtgggagtacctggtgggtgctcgctgccggcgaagaggccaacgaaagcctcagcaccctggcttagggcggcggcggcggcaactgtggtctgagagcgaggagagcaagagagcaggaatgcagcggacggaaggggaaagggggaatgcaggaggagcagttgtttgtggcctgcaaccgcgagaagactgccagacccagatgcgattgagaagggatctgttctgtgctggcttgcaattcgacggtggttttgggcagcctcgattccgcttcaccgtccgtgaaaagcgaggggatgcgaagagcgcccttaagaaccttctgctcaatggcggcacatgtcaggaaagcagtaacaaacaaatgaggaagcagaaaggtggtaccgggtcgaaggctcagcgctctgctccaggaaaaaatccctgtggaaaaaataagcgcgggcattactggaaaagcttcgatgatgacgatgaatgcgcgcacacaccatatggtacctatggtggtaagaaatctttcacctggtactggcctggggaggacgacggccttggtagtaatcctagtggttttcaatggagggaggaatctcagtctgccaaatcaaaggagaagttctggaacgaaagtgacgtcgatgaggacgaggggtcgagccgtgatgatctgcgaagctataggatttctctcggattgccagttttaggtcccttaaagctggatcatattaaggctgcttttcgtgcatctgctctcaagtggcacccagacaaacatcaagggccttcacaggctgaagcagaagaaaaattcagacggtgcgtggaagcgtataacgcattgactcgtgctttcagatcaagtggctaactaccgcgaggaattttgttctttatgatttgaggttttcttaggactcctagtgatgtgtgcgtggctgctggtcttcaggacacagagactgctagaagtgaagttcagagttatggcttcatgttgataacgaaatatataagcataatctttacaaaaaaaacatagattaggccagtcctgccaaatcgtatgagaacgcaaattacagggctcatttgtatgatgatttggttccacacaacgctgtaagtagaaagcaaatactgtttgttccatgctgagattttgtcaagcaaatactcccaggatgaaagtgaataaccgaattgttagtataaatttagtattttaaaatatatatgtatgaaactttatgttatcaagcacattgttaca

SEQ ID NO: 18049 - DNA, 1114 bp, Zea Mays
aaaagcaaatgtcgacgaagatgcagagatgcgagtggccgagacctatttcagctagtcctacggaccatccagatccagcacacccaaacccagcagctgattcgcccggccgcatcgcccgagccttctaacagctgactcgtcctcgtcgctccggcgcggcgacaaggcacgcagccaccgcgcgatggccgacggcgccagcagcagcggcggggcgcagaacgggggtgagtcggtggtgattgactacggccggcgccgcactacctgcggctactgccgatcctccgggcccacgagcatctcccacggtatgtgggctaacagtctgaaagctgatgactatcaaggtgggttcgctatgatttagccaagcctctactggatgccagtcaatactccgttctatctgattatgctacaatgcaaggtgaagtgccccagcctcagatttgtggtccctctgatgactcttcagcaaaagttgaccaccatgagtctcccagcgatgaggatgaggacgacgacgatgaagatttcgacaactatgaatcagatatgatggtcgatgaagagacaattcattcagaaaaacccgatacagctgaaggcagttccgagataaatgacataaacaacatcaccctggacctgaaaggctcgagggttaaatttaagggccttcagcaagtttttgggccaatcgagaggcgacacctcaatgcgctagaaaggcaactgagcagatacgtcaaggttgttgggaaggagctgtctgatcgaatggtgtattgtctttcttgatatgcagccggtcccgagatctcaattctactgtgaaaggtgcacatgagagttaaactagtttcattcagaaagaaaggtcatattgctgcgtgtttctgcatggttttcgttgtaaaggtacgagagctgaggctgacatagaacattctccggtcgattttgtatgtgtattttggcactaaagtcttcatggatggcttatactgaagagaagtggcgattcggtacgcctaattgtgcttatagggcaattgaaccggcacagtaataaagttgcagcgaatgggcttctgtcgaaaca

SEQ ID NO: 18050 - DNA, 2807 bp, Zea Mays
tccgtcccttccgcgcgcgctccccaagttttgcggagactaagcttgggatcgcgtcagggtgtggaggaggaggagggtattttggaaaggtacagggatttgatgccttgcggagtaccacgacgaaagttcagagcgggaaggcggggaggagtgtgaccaaggaaatgggacacacttcatctggcaatgaagtgcccttgaaatattcttcaggcaaagccttccccctaggagtgtcacaagttgacgatgggttaaattttgcaatattctcacaacatgcttcttctgtcaccctttgcttgaattttcctgagagaggcaaccaagatgatgtggacattgtagagtttgctttagaccgccagaagaacaaaactggagatatatggcatgtgtcagtggagggtttgcctgcttctggtgttctttatgggtatcgcattaatggtcctcaagggtggcaacaaggtcatagatttgatgacagcgttattcttctggacccctatgcaaaattagtttatggtcgaaagcactttgctgttgaaaaagagaagccaagccagcttttcggaacatatgatttcgatagctcaccttttgactggggtgacaattataagcttcctaatttgcctgagacagatcttgttatatatgaaatgaatgtccgtgccttcactgccgacgagtcaagcaggcttgctccagctattcgtggaagttaccttggtgtcattgataaatgctggtttcgtagattcctcatttgctggaacttggcgttaatgcagtggaactacttcctgtttttgagttcgatgagctggagttgaagaggttccctaacccaagggaccacatggtaaatacatggggatattctacaatcaacttttttgcgcccatgagtcgttatgctagtgctggtggtggacctgtggctgcttccaaagagctcaaacagatggtcaaggcatttcataattctggaattgaggttattttggatgtagtttacaaccatacaaatgaagctgatgatgttaacccttacatgacttcctttcgtggtattgataacaaggtctattacatgttagatctcaacaacagtgcacagctgctgaacttctcgggttgcgggaatacactaaactgcaaccatcctgttgtcaaggagcttgtacttgacagtttaagacattgggttaaggagtatcacatagatggatttcggtttgaccttgcgagtgttctttgtcgtggaccagatggcagtcctcttgatgcacctccacttattaaggaaattgccaaagactctgtattgtctagatgtaagatcattgctgaaccttgggactgtggtggcctttatctagtagggaggttccctaattgggacaggtgggctgaatggaacgggaagtacagagatgatattcgaagatttattaagggagatcctggtatgaagggggtgtttgcaactcgcgtttctggttctgcagatctctaccaggtgaacaatcggaagccttaccatagtgtgaactttgtaattgctcatgatggatttactttatgtgaccttgtttcatataactccaagcacaatgatgcaaatggagaaggtggtcgtgatgggtgcaatgacaactacagctggaactgtggcattgaaggagaaacaaatgatttgaatgtgctaagtcttcgttcaaggcaaatgaagaacttccatgtggcattaatgatttcccagggtactccaatgatgctgatgggagatgaatatggtcacacacgttatggaaacaacaatagctatggacatgatactcacataaataattttcagtggggccagttggaagaaaggaaggatggccatttcaggtttttctcagagatgatcaagtttcggcataaccatcctatattgagacgagacaggtttctcaacaaaaatgatgtcacttggcatgaaaatcgttgggagaaccaggacagcaaatttttggcatttacgatacatgatcacagttctggtggagacatctatttggcattcaatgctcatgagtattttgtggatgctgtaattcccccaccaccacaccataaatcttggagtcgtgtggtggataccaacctggaatcaccaaaggatattgtcccagaaggggtgccattcacaggttcagggtacaggattgctccctactcttccatcttgcttaaggcaaagccttagaatggcggaggcaagtcattctcaagtaagcacgaataatggtgttgtgatccctaactttccaagctcttagccaactgtactgcaagtatagcaaactttggtatgtgaagtcggaccaacccttgcggaaatcaacggaagccatggtttgctaaaggtatactcatggagaattggagatatggcaaacacatacgcaagtaacctccacacatctaagcaagaagagcctttcattaggggatgcatggctcgaggaaactatatttgcatttggttgattcatttttatttgttgcacatgtcagtatgtcacctgtgtgtgtcaagctcttatttgcttaaaaattggacattcctttgttacatatttgtgttgtactgtgttggagctagcgttcctggtatattgcacgggggtgggaggacgggggacgctttgtcgccgtggtcttaggctaccagcaatggttttctctatatttctgctcctgtatcacttttttgcgtcacattatcaatatttcatcctcta

SEQ ID NO: 18051 - DNA, 3309 bp, Zea Mays
gaaagtgcgggcgtgagggacgagcggacgagcctcagcggcgagagaaaatagaacggggagaccggagcggcggcgggggaggaggagacggaaggaggggatcgagaggggcgcgcgcgaacagaagagagaaagaggaggtggcaggtttggttccgcgcgcgccgacgtgagattccgggcccccgtgccagcaggttcaaataatggattaaaaacttaagctgacacttatggcggatgctcaattcaacccagtgaatccgaagctgacccatgaagaactaaaataagctttatgcttcagtgtcttctgaaatcatcctgaggtattgataagtcagcaacctagagcagaaaatgtcagctccggaattcaggacttcttaccagcaagtatcatcatcacagccccctgagaatgtcggtcaactcaaggtctgccgatgtgggtcgggagactctaactttcagatcactaataaatctgatgctggtgaaaattcaccgacaacttgtccaagctgtcaggttcttaagagtggaaatttattgctctcatctaaagggattggatggacagtatggaaaaaacggtggtttattcttacaaggacatcattagtgttcttcaggagcgatcctagtgtcccccctcccagaggaagtgaaccaattgttacacttggtggaattgacttgaataacagtgcaagtatgatagtcaaagaagaaaggaaagttataacagtcatctttcctgatggccgtgatggacgcacttttacccttaaggcagaaactatagaggacctaaatgaatggagaagtgcattggagaatgctctggctcaggcacccagtgttgcgaatacagcggggcaacatctggcagtcagcactgatataacagaacctgttgaagctgctgttgaacaattggaggataagtctgtaattggcagaccagcagaatttgcacttgtcgatgctgatggcactacagcattcctggagaaggccttaaagttcatcgaagactatggtgtcaaggttgaaggaattctccgtcagtctgctgatgttgaagaagtcaaacgcagggttcaggattacgaaaaggggaagaatgagttctccccagaagaggatgcacatgttatcggtgactgtattaagtgcattcttcgagagatgccatcttccccaattccggcaccatgttgcactgccctggttagagcttaccgaactgacaagacaagaagacttgatgctatgaatagagtgatatatgaagtattcccagaaccaaatcgtcaattgttacagaggattctcaaaatgatgcagattgttggatcacacaaagctgaaaataggatgtctccgtctgctttggcagcttgcatggcaccgcttcttcttcgtcctcttcttcttggtgaatgtgaaattgatagtgaattcaatatggctggggatggttcattccagttgcttcaagctgctgctgctgccaaccatgctcaagctattgttattattatgcttgaggaatatgatcagatatttgatgatattgaagacggttcgtactcttcagatgcttatactgagtctgacattgacaaggaatattcgacagacaatgacatccctgaagacgatggttcctatggttgtggtgaagatgttgaagaagatttaaatgatgatactgaacactcttctggcattaggattgataatgcagatgataaggttaataacaataaatcaagcactacatgtgatgacaatgataaagttgttcagcctcctgctgcaagggccatgagaatagaacatggtgtgcccatggatgacagtaatcaaatttcttctctttcaaaagtggatgatacctctaaaatgcagagcaacagttcattcacagatcatatacaaaaaccaaatgctgattcatcatatttgagtgcaaagtttacagagaaaactggcggctcaacttatgaaagcaaaaggaactcatgggggcgtacttcagcaagaaaaggcttgtcaacagaggaggctggctgttgcagtgataatgacgaggctcatattgcgaagcttgaaaacaagaagacccatctccaatctaaacttacggaggaggtaaaagaaaacacagtcctccaggcaaatttagaaaggcgaaaagcagcactacatgagcgtcgtgtagcacttgaaaaagaagtggaaaatttacgagaccagctgcagaaggagagaaatttgagggcttcattggagtctgggttaatgaatatgcgaagaggacaagtgtccttcccatcaacgatagacaccaagactaaagctgatcttgaggaagttgctgctgctgaagctgatattatgaacttgaagcaaaaggtttctgatcttcgggggcaactcaactaccaagtccagttgagttccacctcgttatgtgaatcatgcaacaagcgggcaataaatgcagacaagcttgtcgaaggtgaacaaaatgctggcctttctccacagattggctcctcagtcgaagcaccaccaattcaagggtctaattctgtagttcctgacatgttatgggctacaaaccaaatggttcagaagatgttgtattcaaagggtgagattgcaaaggacggccaagatggatcacttacatcaaaatggaactttgcacagagaccacactcaaatagtccagttatgagcagggttcaaggttccaatgcctattcaagtactaaaaacgaggaatctggagccgcaccgtcctctgcattagccaagctgactactcgactcaactttttgaaagaaagaagggccttgctcgccagtgagatgcaaaacttagatctgggtcgctcccaggcccagaggcacacggctcctccgaaaactgagactccgaccgacaagtagaatcgttttattgttaggctacacaagcccacaaaagcattctgccatcggggtgtgacaagtccagctgccacgatcgatgctcatgtaggatcgcaggcagtgaagaaaagttcgattggacaatggataggctacctacctatagagtaacttgatttgtaaattgcagaggtaatcgtgtcttcgccatgatgattcatatgtcaagttttgtagcgacaccgacgaccaacctggtttgtactattatctccaattacacaataccctgaatactctggaacaaaaagccaaatggcgcttgcaaataatctgtcggtctgtgtggtactc

SEQ ID NO: 18052 - DNA, 278 bp, Zea Mays
ataccatatcttctattaactgctgggatagttgcaggggtcatagcctcatgaagccgtccaagtttcttccatcttactagtaagatcagcagaacagcacatgtcatcagaagtccaagagaagaccctaacactaccacgatgaccaaaatatctgatttattgtgctttttcttctgatcaggcacctctgcagttataggatattcttcagttcctgaaggatccgatcctccaggcagagatgatggcggggattgcaatcctgcagtaac

SEQ ID NO: 18053 - DNA, 861 bp, Zea Mays
cactcaaggatgtcatggaagagaagtgcgcttctgctgccatttgttttgtatcattccttccagacatccttgattcaaaggcagaaggaagaaacaagtaccttgagctcctgctctctgtagctgagaagtttaaaaagagtccatacagttttgtctggacagctgctggcaagcaagctaatctcgagaaccaggttggtgtgggcggctacggctatcccgccatggtagctctcaacgtgaagaaaggtgcatacgctccactccgtagtgccttccagcgcgacgaaatcatcgagttcgtgaaggaggcagggcgtggtggaaagggaaaccttcctctgaacgatgcacctacagtagtcgcgtccgagccgtgggacggcaaagatggagaggtcattgaggaggatgaattctccctcgacgagctcatgggcgacagctcctcagcaaacgatgagttgtgattctgatggttcttggactgatctgcgtgtcggttagccagactgtaaatctgaggaactctgttttgaaaaatcattccttgagtggcataattttccaggttatggatgctagaatggattaagattaaggagaactgatgtgatagaccttttctttaacgtttttttttatccctgaagtaaagtcagtttggacgtatatgttgaacaagtggtctacgctttagaacatgctcttctgctcacattggaatattggatagacagaccccaacttccagtcctacccccagaggacagaagacgaaacatactggagtagtggagcactgcaggcttttggatgaggttgacatccgcatatctcatctagaggttagag

SEQ ID NO: 18054 - DNA, 2039 bp, Zea Mays
gtcgtatgcagtacgccgacctgatacaaccgatcgagaagcggatgcagaatgccatggattatattaagttcataaagcccgaccttgatgttcgtgtggagcccatcgtcgaccctttcggcccatccatcgttgaccaaggccttgaggccatcattgtcagcaaggagacgttgccgggaggacacgctgtcaacaggaagagagcagagagagggctcactcagttgcagatcgaggtgatagagctggtgccagaggagtcgacgggggacaagataagttccacggcattcagaaagatggaagccgagagggcgctgcagcaacagaataaacaagatgatacagcagtaggcactccggcaataaactggaggtgcgctagaaacagttgggaaattctggatgatgatcttacaagcatagcaaaagacagcagttcagtactttttgtggcggccctcagacatccaaggaaggattctgcagcattagctctcaagcctggcagggcgaaagctcttaggcggcaactgcgaatgtagagaaacaagccttgattttgtcatcatagggcacccattatcagaaataacaagtatcaaacataggtattgcattgtgtcagacatccaaggaaggatatggggcagcactagctctcaagcctggcagggcgaaagctcttaggcggcaactgcgaatgtagagaaacaagccttgattttgtcatcacttgcaatgcacaacagctaataaaacagcaggatatacagaatgtactggaaaaaaatcatgagctggacaagaacaggtatgtctcagacatccaaggaaggattaaacagcacaagctaaatacaagtatcaaacataggtattgcattgcatcagacatccaaggaaggatttggcagcactagctctcaagcctggcagggcgaaagctcttaggcggcaactgcgaatgtagagaaacaagccttgacttcatcatcacttgcaatgcacaacagctaataaaacagcaagataatacagaacgtactgacaaaatcatgagctggacaagaacaggtatggctcagacatccaaggaaggattaaacagcacaagctctcaagcctggcagggcgaaagctcttaggcggctactgcgaatgttgagaaacaagcctttaacttcaacatcattgccatatgcataacaaatatacggaacaaaatgagctgaaggcaaagcactaacaataattatagtaaagcaatgactgtaatcacagaaaacggctctgtggacagatagaagccgtccccaggttcctatcgacatgtgaaacattgaaacacctttgtatcggcctaatcatagcatctccggtcaatgctcgtggctaccagagacgtggcatcaggcccaaactacttcagcattgacatcaagataatgaaatcatacataacagcagatttagtacagtccctcagagacccgattaaaatcacacaccacagctgaaacaaacagctgcagatgggagctccagcctgaccaaaccacaaaggttatggtcaaaggatggaacacctgcagctgagagaggcagctgctgtttgcagtgtcaaacggcacttcctatcggtaggtcttgggatcttcactgggacaacatagccaaactactctcatggcagattcaggaaactaaaacaaacattccctagaactgcacagaagaatctaaacacagcaaatctaggtgaatgcaattctaggattaaatgccattacaaatctagttcaaaacaaattgcaaatgtagctgatttcattggttaacaggttaatcatcaggaagctaggcaattttctatcaagttatcacaactaaaacaggcggcaaattgaaggataactacatcaacacatcatcataaaaaaaatgaaatatgggtgaaagaaatagcgcacatgctcccaacccacaaacaaaagtagacaacaaataatccaaaaacatgtgatttgtaa

SEQ ID NO: 18055 - DNA, 2508 bp, Zea Mays
agtcacctccacaaacgagagaataaaggtgaaaggacccctcggattcacaacggtaaagcctgcggcaccctgctccttacagcccactcaccactctcgctccaactccgagtttgagtgcagcagaaggcagagcaggaaaggaatttcggaagggacgggtacagcccgcagcgccaccacaagggagcacctggaccaggagcctccaagcgcaagcaaccaagcgcagcgcagagcacaacccgacgcccagcacaaccagcagccagggcagcataaagcaatgcagccgggaggcgcggcttccagtaccgccaccggtggacggaggcgcgtgtcggtgcagtccaccaggagcgccggcgccacaccggcgtcgtcggtgtgggaggcgcggatgaagatggacgaggtcaggggcggcgtcaaggtcttcagcgccggcgccgccgacgagccggcggacgaggagggcgtgcgggtctaccgccgcctgcgccgcaaccagagcgagggcggcggcgccggtgccgcggacaccgccgccaagaagaggcgcagctggaaggcttccaagccggtcaccgcgatcggggacctccgcaagtcgcgctccgacgccgccgccgccgtgacgacggccaccaccaccgccactgcggtggttgctaggcgggccgtggcgcgggtatccatgcccgagaagaaggtggcgccggcgccagcggccgccgccggcgaggtcaaggaggtggtggtcgtggaagtgcacaaggctgcggcggcagacgcgaagaacgtggcgcgaggaccagatgaggagttggacgacgacgacgacgaccacgacgacggcgcggagggtgaattgttggacgaggagcaggagacagacgaggaggaagaaaaagagatgctggatctgcaggatcacatggccattgacgacgacgagcaaactgctccgcaccaagtggacgacgacgacgagcaagatcttgagccaccgacaaaagggattaagcccacgctgtcggtggaagaagagagagcgaccaacccagagccggtgaagccgccgcctccagggaagaaactagcctcggtggtcgatctccgagcggtcaatccggaacccatgacccctgctcctccgccagtcgagaagaaggcgacaccgatagtggttcaccgcatgaccaacttcgagctggcacaatcttttccagagaagaaagctttgccggcggtgggtccccggattccgaagacagagcctgccagcagtcctcctggtggtgaggagtatgaggagatccaaggaagaccatctcaaccgagcagaagtcaagcgagaatgcagaacattgtgaatctggtgatgtggaccgacgtgtcaaaatccgcgctggtgttcggactagggactttcttgctcgtctcctcctcctacgccaaagacctaaacttcaacacgatcacggcggcgtcgtatgcaggcctgatctacctcggtctacgcttcctgcgcaagtccatactgagcaggggtgaaagtgtggagtgcgacgatgatggaggcgtcggcggcgataggtgctgctacctggtcggggaggaggatgccgtgtggctgctgaggctggtgctgccgtacgtcaacgaggtgctgctaaacctgaggtctctcttctccggcgagcctgcgaccaccatgaagctggcgctgatactgttcgcgatggcccggtgcggcaactttgtcaccctctggacgctggccaaactggtgttctttggggtcttcatcatccccaaggtgtgctcctcttactccacgcagctggcacgatacggcaggttctggctggagaggctgagggacgcctgggagtcgtgcacccacaagaaggccgtggtggcggccgccttcacgctggtctggaacgtctcgtccacggcgtcgcgcgtctgggcggtgttcatgctggcggtggccgtcaagtgctaccaccagcgcgtcggggagttcggctggagcagcagcagcgcgggggcgcaggaacagccagcggacgacgacgacgagccgccgccgccgccgccgaagcacagggcccaggacgagtcgtcgtcgccgcggcaggagttcggggcgccgccgcggcacaggcgggcgccggtctccggcgagttcgcccgcgagaggctcagggctcggggcggcatccagcctcggtgacggttggggttgcatttagaggctgcatgaggctttgatctgttgcggtcctgctcctgcgatcggcaggcaataacgagggatcccatacacgcagacgcagtgtgttcgcgctaaacgcctcgaccaaaccactcgagcccactgctaatgagccacgaatggagttggttggggggatggttcgttctagtggttcgttgaaacaatagagtggttctgctttcgtatttggttcatagacaggacatcctcttttt

SEQ ID NO: 18056 - DNA, 1259 bp, Zea Mays
gttacaaataccccagccacttgacgacacgggatgcaaacctatttatattctgtccttaattcccgtgtttctcgtccgtctccgctcctccgcaaccccttcccctcctccgccgaagcctctcctccggccgccgaaaccctagcctccgccgctgccgtcatggcaagcagcaacgtctcgaccgtttacatctctgtcattgatgacgtcatctccaaggtccgcgaggatttcatcacctacggagtcggtgacgccgtcctaaacgagctccaggctctctgggagatgaaaatgctacactgtggcgcgatctcggggaacatagaccgaaccaaggctgctgccgcgtccgtcggaggcaccaccggcacgacaccgcccgtgcacgacctgaacgtgccgtacgaggccacatctgaggagtacgccaccccgaccgctgacatgttgttcccgccgacaccattgcagaccccaatccagactcctctgccagggacagacacagcgatgtacaacatacccactggcccttccgattatgccccctcaccgatcagcgatgtcaggaatgggatggcaataaatggggcagacccaacagctggtcatccaagtccctacatgtttttgcagccaccaccttccccttggatgaatcagaggccgctgggtgttgatgtgaatgtcgcttatgtggaaggccgtgaagatcctgacaggggcgtgcagcctcagccactgactcaggattttttgatgatgtcttctgggaaacgcaagagggatgagtatcctggtcagctcccttctggttcttttgtaccacaacaagatggaagtgctgatcagatagtagaatttgttgtgtcaaaggaaaatgcgaatcaactttggagttccatcggcaataagcttgaaacaccaaccaagacaatcactccagttattccgcagcgtgatgggattcaagataactacaatgatcaatttttctttccaggagttccaaccgaagattataatacccctggagaatctgcggagtatcgagctcctacacctgctgttggaacaccaaaacaaagaaatgatgctggagatgatgataatgatgatgatgatgatgaacctcctcttaatgaagacgacgacgaggagttagatgaccttgagcaaggggaggatgaacctaacacacaacatcttgtacttgcacaatttgataaatccactttgtcttacatcct

SEQ ID NO: 18057 - DNA, 1754 bp, Zea Mays
ttgccctcctctctttcttcctccccgctccccaccccctcaaacccgaaaggaaccctaatcctagccgcacgcgggaggcagctaagagagcttgaagcaccagccatggcggaccacgacctcacggcgctgatggcggcgcagctggaccggcacctggtcttcccgctgctggagttcctccaggagcggcagctctactcgaggccggagatcctggaggccaagatccgcctcctcagcggcaccaacatggtcgactacgccatggacatccacaagtccctccacggcaccgatgacgttcccgaggacatggtcaagcgccgctccgaggtcgtctccaggctcaggtcgctcgacgaggccgcagccccgctcgtcgccttcctccagaacccgcagctcgtgcaggagctcaggcccgacaaacagtacaacatccacatgctccaggagagataccagattggtcctgaccagattgaagctctgtatcagtatgccaaatttcagtttgagtgtggtaactactcctgggctgctgagtacctgtaccagtatcgtgctttgtgcacagatactgagcgaagtgtgagtgccctctggggaaagctagcagcagaaatcctaatgcagaactgggatgtggctttggaggaattcaaccgcttgaaggaaataattgattcaaagctccagaacaggatatggctgatgcattgggctctgttcatcttctttaaccatgaaaatggtagaaatgggatcattgatctgttcttccaggacaggtacttgaatgctatacagacaaatgctcaccatcttctgagatacctagctactgcagttgttgttaacaaaaggagaaggaatatgcttaaagagttgattaaggtcattcagcaggagcagcatagctacaaggatcccataactgagtttctgcaatgcttatatgtcaactatgattttgatggtgctcaacagaaactcgtggagtgtgagcaggttatactgaatgatcctttcctgggcaagcgcgttgaagagggaaattttgtcactgttcctttgagagctgagttccttgaaaatgcccgactgtttattttcgagacatactgccgtatccatcggtgcattgatatcagcatgcttgctcagaggctgaacatgagctacgatgaggccgagttgtggataatgaacttggttaggagctcaaaactggatgcaaggatcgattcagtgtcaggaactcttatcatgacaaccaatcacatcaatgtgcatgagcagattatcgagagcatgaagggccttaacatgcggacgtacatgctcgcaaagaacatcgtggagccagctcagcaggcagctcggtaaggttagcggagtacagttttgaggcgccaacaactagtttagaggtagaggtctattgtgtggcagtgaattcgtcaccgggattgaacacatgggactgggaggtggcttgccgtttggtacagcttagtatgctgacattttcaatattttgtactcggaatttcgtaacagtttatccttctcaatgtatattactattaatgcctgtttggatcacattaattgaaacaaatatctagaaattgtttctcattttattattaggttacttttcaactcctgagaaccaatcagggcattaatgtaatgaatgatgatgctacaggatccttctcttctaggcattgtgttttctc

SEQ ID NO: 18058 - DNA, 1090 bp, Zea Mays
aactattttctagaaaagagagagagagaggggatggtgtgagggagggaagggagcaaaggcaaagcagccaacgaccagagagacacggaggctcagagagagagagcgaggaagaagaagagaagaagaagatggagcaagaggaagcgtgctcctcctcgctgcggcagtgcaggatttgccacgacgaggaggacgagcggcgctccgccatggagtcgccctgcgcctgctccggctccctcaagtacgctcacaggggatgcgtgcagaggtggtgcgacgagaagggaagcgccgtctgcgagatttgcctccagaactttgagccaggctacaccgttcctcccaagaaaacccaacctgctgatgtcgcggtgaccatcagagacagcgtgggggtgcccaggccgcagcacgagcctgaagaggaggaggagcaggagctggtggacgtggcgttgatcggagccagcgacccggagtacgccgagtgcgcgcgcgccgccggcaggagcgcgtcctggtgccgctcggtggccgtcacgttcacggtcgtcctgctgctgaggcacctggtcaccgtggtcacggtcggggcggccaaccagttcgccttcggcctcctcacggtatacttgctgcgggcgagcgggatcctgcttccgttctacctcgtcatgaggctcatctccgtgatacagcaggggcagaggcagtaccgcctccggctgctccaggagcagaggagacacgcgttgaggtcgggccggctgcacggccaggaacagcaacaacagcatgtcatcctggttcgctgaggaacgagccattcattcaccttgccttggtgtccatacattccattcatccgtcgtacgcgtacaaggttgtaagatgtaccgctccatttttttctttttgttcaggcctttacaagcctaaaaaaagcttatatgtaccaccacttcatttgtaaaccctcaaaatttgttgctgagaagatcgacatatcatgtatagaattgtaaaaagaaacaaacaaaaaaaaaggggaaaagagaactggcgcaatgttcgattaccc

SEQ ID NO: 18059 - DNA, 2751 bp, Zea Mays
cagaagcaacagccatggtttcagtgtcagcagctggcctggcacagattatgcagtttttggagactcaagggttcttggattatctggagagatgcaacactgcagaagaaaatgcccacaaccttctcgataagttgcaggatgcaaccggaagaggacaaaaccctctaaccatatttccttctcaagtttctgatcctgagattataacaatagccaatcctgagattgaaggactagacaatagacactgctataagaggtttccagcaaatgcaagaacagaagaacaagaagaaaaacgtaagtcgattctagcgttagctagtggggctagtaagcaagtaccgagttctccttctatccgagtaaatgggggcccaaaggcagaaagtctgagcccaagagagagggcggctgagagagaaaggatggttctggacataaaagtgaagctccagggactctggcttcgtcttctgagactaggggcaactgaggatcctctctcatcttttgaatatggcaccatcctagctttgattgagtctgacgcagaaggcatcgggggaagtggctttgttgaatgcatcagagagcatattcattcgggctggcaatgtcgcttgactgatgaacaattcattgctgtaaaagaattgcttaagatggctataactcttgcgaactctcgcaacgacctggcgaccattagagatgctcttgaagtttctgctgaaatgtacagaaaagacccaaacaatgttcaagattatgttcagcgccatctattatcattgtcagtatgggaggagcttcgcttctgggatggctacttcgaatatttgatggaaaattgttcaaataagtcagcaaattatgtaacgttagttactgcacagctcattctcatggcaactcacatggctggattgggattacctgacattgactcttggaatatgattgagaaaatagccgagagaaacaacttgggttataaacagcttatcaaacttagagcattgctcacacatctgcaacaactccggattggctattggggggttgctacagggaaaagccaaccattgcagtcatatggcatggcttcacctcatgcgatcgatgtgattgatgaaagccaacaacctgctgaagcatctgggttgggccgaagttgggtgcaaagtatgtttagcagagacagaagtttaagagccagctctttcaaccgagctagtgatggaaatgctgttgctgccacgggcaaaaccgaaatctcagctgcacaaaagaaaactcaaactaacatgaggacccttagagggcatacaggtgctattactgctcttcattgcgtaacaagaaaggaggtctgggatcttgttggtgatcgtgaagatgctggttttttcatcagcggaagcacagattgcacggtaaaaatttgggatccaagtttgcgtggttctgaacttcgagcaacacttaaagggcatactagggcaattcgaacaatcagttcagatcgtggcaaaatagtttctggagctgatgatcagtctgtcatagtatgggataagcagacttttaagcttttggaagaactgaagggccacgaggcaccggttagttctgtccggatgctctcaggagaacgtgtccttattgcatcccatgatggtactgtgaagatgtgggatgtccggactgatacttgtgttgttaccgtgggtcgttgccaaagtgctgttctctgtatggaatatgatgattccactgggattctggcggctgctggaagagatatcacggcacatgtctgggatattcgctccagcaagcagatgttcaagcttcaagggcatacaaagtggataagatcaatgaggatgaccggagagaccataataacaggtagtgatgattggactgctagagtgtggtcccttaaccggggaacatgtgatgcagtgttagcatgccatgctggtcccgtactatgtgtggaatactcaccttcagataaaggaattatcactggttcagctgatgggctcatacgattttgggaaaatgaaggaggaataaaatgcgtcaagaatcttacacttcacacagcatccgttctgtccattagtgccagtgatcactggctagcgattggtgctgctgataattctatgtctctttttcatcggccacaagaaagattcggtggcttctcaaatgcaggatcaaaagttgcaggatggcagctttacagaactccccaaaaaactgctgcagtggtgagatgtatagcatctgacctggataggaaaagaatatgtagtggtggtcgcaacggactcctgcggctttgggatgcaactacaagcatctaggactgatagatgttcatgtgaaaaggcaattgacatgatgttgcatgccattttccttttagctaggaatttatgtgctatttagaggatgcgaaaggagccggactttgttctactgtttctttatcatctaaaaaaccctgcccagttgagtatatgtttgacgtcgtgtaaaattttgtttatattttcgggttcagatagccttacgtggctacgattttgtaagaactatgagaaacttgggaagttctgtactactaccagtgcaaatgtttgttttagtacaacattattttttatgtgcatattcatcgtatgaacctgcactagtgcaaacatgactgctagcatatgc

SEQ ID NO: 18060 - DNA, 3505 bp, Zea Mays
cttgtaccacatggcattcctagttatgagtgcttgacagagcttctgaacacccctgaagaaaaggaacgcatgattaatgaagttccagaagtacatgttgattcccggatggatccaagttatgaatccgctgaagaaccagagtataagaaagctgttgattggaccatgcatcggaatgggccagatctattatttccaggaagaaaagggacagaattgaattctgtggagaatcatacacaaaagagtctggatacaagcagtctacctacagaggacgtggaccatagatcaggtgcaggaagtaacattaatttaaacaacatggcacctgagcctgcatcacttggaattttatcaaatgacactgagccagaaaaggtttggcactacaaggaccctaatggaaatgttcagggcccgtttactcttttgcagttatccaagtgggcaagttttttcccacgcgacctgagagtatggcttacatttgagagtgaggagaactcactactgttgactgaagtgctcccaaagcagcagaaagattttattcagctttcaacagttactaccagtgataaatcaatgtgggcaggctctggtcaagatagagttaactcaaatgcaaataactcttcctcccctatgggttataacatggtctatccttctgcattatctagcccgtctgctgagtgttatgatccaacaaaagatctaaagcctctgggtggaacttcgccatcacgatctctgaaagatgctcatgctttgcatgaggttcagaatcaggttaactattcattcacaattctatcttcaactggttcatatgcaccacccggttctcatgatggaagggtttcaagagacagggttgatgaatggaacagtagtcaggacaatggtggtatttggaggccaaccatgaattctagtcagaagactaatgcacagcagcatcctgatggttgtactgggaaggacctaatgcaaactgaatctaaatgtagttcacatttggtctcagttcttacttcacaacactctgagagagaccctgccacttcccttagtactacaagttggccggtgttcagaaccaggtgccagcaggaaggttcttcatggacttcagctacaaatgctggagctcatgaccttcagttatctattgctttagcaaagccggagacctgttctccaacaaatcctgtggaagacagagattcaagttctgcttctgctttgtcttgtcagtctggggctcctgtctgcgttccccaaccagatccaacatctacatctaattcaaggaagattgatgcaaccatggatcagcatagaacatgccagcctgacacatcaagtgtatcatttgatcttcttcatgagcctaaaagtggctcactcttttccttgaaaactcaagatcttgagtttgagtaccctagtcctatcccaaaacaggaggggaaggggatttctgtgaaccagtcaggctcaacatcagtagcacatgagaatttagctacaaagacatgtgtccgcgcacctactagcaaaattgatagcttacaaccacttaaggaaagatcacattcgacagatagggactcaatcactcaattagagcatctgtttgaagagaatgtgataaagagaaataacaaagtggtcaatcctgtatctgatgctgaagggattgctgtatcagatgtgttggaatccttaacagaacaagattgtgaaaaatgtagtatacatggggtagcgccttcacaaaaaatggtgccagcttcagctgaggaagatcaaccacaatgctccagtcctattgcattgtccccttggggtgaaccaagttactatcagggtgaagctgttgattctgctctatggggcgtccaagatgaccctggtaatgacatgtggtcaatgccttctccaaaacctggtttccagccctcatcaggtcttggagctgatggcaaagacgcttcatgcatcatagaggaggcgagagcggacccaggagatggtgcttttgtcaaaacattaccaacacaaggggagaaaaagatggaacatggaaattcaagtgcctcaggttctggagtgtcagaacgggtaaaaccaaaaggaagcgctgcatcaggtccatctctagatgggagcacaaaagttatgggttggcaactgccgggctcatctctagagggcagtgcaaaagtttcaggttggaaaccaccagtcttatcacttgaagggattgctaatggttcaggttcacaagcatcgtgtccttctacgcaaaggggcacaaaatcttcaggttggcagcgatcaagttcatccccggatgggagcagaaaagcctcaggttggcaacagtcaagtacatcaccagaggggagtggaaaagcgcatggctggcaacgatcaggatcttttacccaggggggtacaaaggctgcaggtcggcaaccctctcgttcctgtacagatcggattgcaaaagttgatggctggcaacgaacaagttcatctccggagggaagcagaaaagcttcaggctggcattcgtcgggtcgtgacagctcaaagatcgcatccagtgccagcgaaaaccgtaaattgtcttctagtcaccaagcgacgacaccaacagggaggcactcgttggcaaagagacagggaagcagcgacaagggtgctgctggttgggacgaggctctggggaactcttcggaagcatcgaagagacaacagggaaacagcgacaagaatgcaggctcgggagtggctctcggaagcaacaggagctggcatccatcgtctggtaaccctagtcggggcggccaggggaatcaccaacatgacagggactctcacagcggtgattcgcggcggggtagctcgaactacccccggaggtccgacaatcgtcatgaccatggcagtggtggttcgtcacgaccctcgtcaagagggcagtcccagagggggctatgtaaacactacgagagtggccactgcgggaagggttcgaaatgccagtacctgcaccggtgatcgccgtggccgtgtggaagcgggacccctgtttgcctggccgtcctcacatttttgtatagcaggatgtggtttcgtcgtagtcagtatagtagaacgcttattaaccgtgtcggcaccactaagttggtagtagtacatatctttcagggcaggagcatgactaaagtaggatttgtaagttttattagagccactgatggccttggataaagattctccgctttttggttcgggaatgcacgctttttgttcagctaaacggagttgtgggcttctacaaacatggattttctcgctaggtcagagtgctgtgctatcgtacagaacagctgcacgtccgagtggtcacggacgaggcgcgtgcaatcgtccgaatgcctacaaaagagtggccaccggcgtgtggcagacatgtgaa

SEQ ID NO: 18061 - DNA, 2143 bp, Zea Mays
aaagcagagcggcagactggcagaggcaggcgctctcggctctcctcgtggacaaaaccaccggctcccgatatccaaattggaacaggggattctgaacttggggtttgttccggggaccgattctggcatcggcagacgggatgtcagcccccctcgaccgacttgctaggccatgttttgaagggtttgtacataacgatgaaaggaaagagagcagatctgatgcagacaactcagaaggagataagaagactaagatcggatctttcaagaaaaaagcaattaacgcggggaacaaattcaggcattccctgagaaggagaagcaaaaagaagaccgaaaggggggattccatcaaggatataagggacattaaagaacttcaagatgttgagacatttcgacaatgcttaattgacgaggatttgctgccgccacagcatgacgattatcacatgatgttaagattcctaaaagcacggaaatttgatgttgagaaagctaagaatatgtggtcagacatgcttaaatggaggaaggaattcggggttgacaaaatagaggaatttgagtacgccgagttagatgaagttaaaaagtattacccacaattttatcatggggtagataaagagggaagacctgtctacatagaattaatagggaaagttgatgcgaacaagctagtacaagtgacaactctagatcggtatgtgaaataccatgtcaaggaatttgagaggtgcttccagatgagatttcctgcttgctccattgctgcaaaaaagcacatagattcgtcgacttctatttttgatgtgcaaggcgtgggtttcaagaacttctcaaaatctgccagggaattaatcacacgattacagaagatcgacaacgataactacccagagacattgtgccagatgtatataattaatgcgggccaaggcttcaagatgttatggagcacaataaaatcattccttgatccaaaaactgcttccaagattcattgaattgccagaatttcttggtggcaaatgcaagtgtattgaaggttgcgaaagatctgacaaaggtccttggaaggatcccaacataataaagagagtcctcaatggcgaggcgaactatggcaggcaaattgtgaccatatccagcactgatggaaggatagtcagttatgcttggccagtgcacccaaatagaaaaggcagtgatgcatctgccgagtctgggtctgaagtggaagacgtaacatctcctactgcatcaaggaacctgattacacatcctattttgacccctgttcacgaggagtcaaaattgtcggcacatggttcttcatctgttgttcatgcttctattggagaaaacattcctgttgtggacaagattgttgatgatggatggggtagtcccagatctagtccacaagctgcttcttcaggttctttgtccctgaggaatttgcatggcacatttgaaggactcagagctcaaactatcacatggctgacattcttgatgatgaccctttttgccatgctttgttctgtcccaagcaagatggctagaaggatctccaaccaatctggtgcaggtgcttgaaacgaagccgtctgagatgccgtttgaaaaggaagaattgctcaatgcagccgtccgccgtgtggatgcattggaagctgagctgatttccacaaagaaagccctttatgatgctttgatgcgacaggatgagctactcgcgtacattgataggcaggagctgatcaaatttcgtaaaaagaagttctgcttctaagatttgaccgtggagcagctgttcatgtccggagccgtttatgtgtatattggattgcggctaatatgtagtagaatgtaatgtgtccatctttagaagtgtgtaaagtatagtaggaaagaaaataggtgcgttgtggtgtgcgcctctcctccccgaggtgaatgtgtggtctagcacttgtgtgctaccctaaattgtaatcttggaagttggtgtatagctgattgcgtgctaatacgtagttgtaaatgaaatcgcatgtgctcgtgtttacatgaaaaactaaatatagcagcaccaaaaataaaaccggttatttggttagaatcatat

SEQ ID NO: 18062 - DNA, 1822 bp, Zea Mays
gctttcccttcttctcggttccctcgccgccaggcttccacgctcgccccctgctctccattcttcctccaaaaccccggccaaaacccttcgaaagtcgaaaccccgttcgtcttccatgcccccctcgcacgccgcgatgctccgctcgccttcctccctccgcttgcttctccacctctcccgccgcctcctctccaggaaccctctcctccccagctccgcgctctccgcccgccctcgcttcctctcttcgtcctcctcgtccacccccggcggcgcaggatgggccacctacgacccgctcagcgacagcctcagcgcctccgctgcgctctcttccgcctccatctccgattccgagcctcccgctgtgtcggatgcctggggcgtttacgaccccgtcttgggccgcatcgtcaagcaggggtccccacctccttcgtcgtccatcaccgtggaggaggacgacgaggagggggaagaggcgggaaagctcgaggaggagaaggcgggcgtaaaggagaaggggaagaggcgggtgacagcggtcggcgtgaatgaccatgtcaggtggtcgtcggtggcggcggcgcggaggcccgctggtaagggcggcaaggagaggagctcgtacgtgtgcagcaactgcggggagggcgattcacagtggtggggcaaatgccgccactgcaatgcgatggggaccgttgacaagtacgtaggcgtagcagggcctgagagcggtggtgtcgatgtggagtggtcgcaccacatcggacgatcatggatgccccagaaggccaaggaggtggtgccacagagccttcaggaggtgaacaagggggtcgatcaggtgggggagtttcgggatggagatatctcgagtgcttggtggtggtattgttcctggctccttgattttagtcggtggggatccaggtgttggcaaaagttcattgatgttacagcttgcttcgaatatattggagggtttcaaggccaaggagtcttctcctgttgtatatgtgtctggtgaggagagtattgagcaaattggaaacagggctgaccggatgagtatcacgtccagcaacttgtacctctactctggtacggatattgaggatatcttggacaaaattcaacccctctctccaagggctcttattatcgattcgattcaaacagtttatgtcagatcatttgctggaagtgctggtaatttgtcacaggtcaaagaatgtacctctgccttgttacgatttgcaaagctgactaatatcccagttttcttgattggacatgttacgaaaactggcgatattgctggtcctcgcctcttggagcacatagtggatgttgttctgtatatggagggagagaggtgctcatcccatcgattgttgcggtcagtgaagaaccgttttggttcagctgatgagcttggtgtatttgagatggctgaatttggtctgcaagctgttctgaatccaagccagatgttcttaactgagcatgactctgattctgaaattatggctggtcttgctgtagctgttattttagatggatctaggacctttgctcttgaagttcaggcattgtgtgtttctggttatcatcgttctggacaagtagttggtataccacaaagcagggctgatgtcataatctctgtcctcatcaagcaagcaggcctaaaactccaggataatattgtttttttgaatgttgtgagtggcttcaagttgactgagactgcaggagatctggctatagcagcttcaatttgcagcagaaatcttcttttcttcttatt

SEQ ID NO: 18063 - DNA, 1205 bp, Zea Mays
tatttctttcttatgagatatcaaatgtatcctgctccgacgaacgctgtctgttccattggtgcagcggatgcaagtgacgaattgtttggcgatctggttccctgcccttttcagcaacctgatgagaacacacaatctattttgaaaatgtcacagggacaggagatggaaacaagatcatcagagcatcccaaagttgctgatctggaaccattaccagatagcgaactctcttgtattcttgaatttgatggagcttgtaaaggaaatcctgggaaatcaggtgctggagtcattattcggcggttagatggatctgtgattgctgtactacgtgagggtttgggtattatgaccaacaacgctgctgaatatcgtgcattgatcctggggctaaattatgcttccaagaagggattcaagtatattcgttgtcaaggtgattctaagcttgtctgtaaccaggttcaaggtgcctggcgtgctaggagcgataatatgtctatcttgtgcgatatagccaaggaacttaaggaaacattccttacatttcaaatcaatcatgttttgagggaattcaactccgatgctgacgttcaagctaactttggatgccaacttgctgttgatgaagttcaagagctgtccgtttgaattgccattggcagagaaaacaagacacggtgcttgagagtagactgttaatcaatactaattgacccacgtgatcatatcacagggtgcaaagagctgtttcggctttttccaagagctgtttcgtttttaccggtaaaaagatggattggaaagaggagaaactggtagagagccacaagttctagcttcatgggctctgtgcgctgctaaagtaacaaacaacacgtagccgaagcaggtgagatatgcaccaagacctgcaatattttgctgttggtttggttttgtgttgccatgaggattgaggagcttgattctttgtacatgcaattgtgaactgaattgaagtatacttaactcacaaatacatgatttcagaaattattgagggtttattcgtttctttctcaatttatgtggattggatggatgaaatttaatctctagaaagtcaaaatttcttattttttcaattacatctaatccacgtggaatagcaataaccgaaaacctcaatgaaaacgaccgtgtatccttgaaatctg

SEQ ID NO: 18064 - DNA, 3294 bp, Zea Mays
gctctcgcacgagacacgcacgcccgcgcgcgtgaaggtacgcggaagcaggggcgaggattctccgaagcggagggcgaggcggcggcagcgaccttgagggagatggcggcgggcggtagggtttcaatcccggcaggggcgcggcgcacgatcgcggacatcaaggagatcgccggcggccacaccgacgaggaggtctacgctatgctccgcgagtgcaacatggatcccaacgagaccgttcagaggctcctcctcgaagatacctttcatgaggtgaaaaggaagcgtgacaagaaaaaggaggttagtaaagagccatcagattctcggtggagacctgccgtgcaggggcaaggtggaaagaattgtcggaattgtgcttcacgcagtttgtccagctctaatgattctgctggacgaagtgctatttctggaaaggagaatggaataagtttgatcatgggaaaaggtagtggttctactccgataaccaatatgaatatggatgtcaaagcttccactttcatgccaagtaacagtttgttgagtggtctttgcaacggtccatatcaatcagttgatcctgctgctgtgctggtgtctagttctagtgctgttggtgataagtctggttcaacagccttggctgatcttacaggtggtcttccattcaaagatgtagtcgctactatagatccaaattcactgcaaccattgaaaccagcaccaccatcagatcctgtggttgtatcttttctcaactctcacagccttggtgacgttggtgcttccagacaaactattggaatcaagaagacatcagtagaacataaggtggggcgtgatgtatcaacagacaaaggctcctccgaacaatctgtgcaatcttcatttcgacgatcctctgctagtagaccatcttccagctacaacagtcattcagaacaatcccaaaaagttattccaagtaaagaatggaaacctaaactgacttgcttggctgcttctcaagcaaccgaggatgctaccgtacatgataatgtacctttggctgctgctgacactatcacccaatcagctccagtaccgaattcagctggtacagaggattcgttgaaggtggacatatgtttaaatgatctacagttatcagataagcagcatgtgataattccagatcatcttcaagtttctgagtctgaaaagtatgttctaagctttggaagcttcgacgtcagttttcagcaaactaagggctcttcagatcctgattatgtgaagagctctttaccgaaattcagttcgtctcatgagttggatggcaacattgatgaacttcagtccatgcaaagagatcagaattcaacatctgttgtccaagaggaagctggtcatgttcctcaaccttctgcaaagctagaaaaatgtgcaccctcagcaatggagatttcatctattgcccttatggaatcaaaagactgtgatgacgattcagccacttcaggggatccccaatctacaggaactcatagtgcaccatcttatgtgacatatggatttgcaccacaatcacatgttaatcagattgagaagtccgaatctcattctcagtcgtaccatcccacaactgatgctgatgaacggctgtccccttctcttgctactcaagctgctcacaagtatgggaatatcccagttgttcccacacaaactggccaggatcaagaggggaacgactcacctgtgattatttcatctgtttctgcttccgttgctacccctgctgctggagttctgtcggcttcagttgctatccctcaacagtctgttcctgtatttcgccagcctttaggtgttcatataccacatctcccgatgaattatgtcccttacaatcagtacatttcaccattttttattccaccccctacccttcacccttttatgggtaatgctacattttctcagccaccttcaacaggggtcatgtacccaactcctggaaccgcaagagttcttccacctgtcaaattcccagttccttcattcaagcctggtgctaacattgggagccaggcatctattggagttcctggttgctatggaacatatggttctagtccatcggtttacactaataacgcacccgtgtcatctggaaatctagcagaaaatgacaatgttacttcatctcagttcaaggaaaataacatctattttgctgggctccagaccgacggcttgactctgtgggttcctacacctggacgtgatatttctgctctccaggtcaattccttctatggtctcccccctccgggacaccaggtaacatatgcgcctcaggctggacatggtccttatggagggatctaccacccagcacattctgtggcaggagctactgttactccactgctccagccatctcacacaatggctggagctgttgaaatagttggggcacctggtggtgtttaccagcatccccaagctcacatgaattggggaagttactgataggccatgattattgtttctttgactttgggtgtccatgacaacacatttggcagaggtgttcaagttttaacaaaggtgaacttgatcaggagtgtatatatgttctcagcatggctgatctgcagggcgggttattgcttccagaagcttccagattgttgtggttgtatttgtagcagataatggccatgaaattggttgagtttatctgctcaggttccttaatacaattttagcctcctgcgcccatcctgaaacttctgcaaggagcgtgatttcgctatcttgtctgattgagggtatggagtacttgaaactgaaattgagcaagtggattttcgttctttccgctgctttacatgtaaattaaattttggttcgatgtgtgacagctgttgtacttggtatcagttgtggacttgcagctaaccagagtcaaagtgctttgaaggacttactgagcacgtttctgttcctgtaggctgtagctcagagcctagtgcttcgttatattgcttattactcattattactatttattgttcctatgaactcgtattgtttggggttaaagggccagacatttgttagtgcccctttggtataagaaaaaatggcatgcaggctacgtgccgactcacgaggttggcgtgtgggagtgatgatcggccgaatggccttggatgactctggtttggtctcgggtgggcgaatgatgtgatatgttattatttgagtaattacatttattggacaatgcacgtg

SEQ ID NO: 18065 - DNA, 116 bp, Zea Mays
ctctggaaagggacgcctgggagggtgggagccccgtccggcccggaccctgtcgcaccacgaggcgcctcaacgagtcgggttgtttgggaatgcagcccaaatcgggcaacgaa

SEQ ID NO: 18066 - DNA, 1150 bp, Zea Mays
cttggcttgccttaccgctttaaaaaccatggtactacaaatcacttccacctataagcaaggcatatgggacattgtgtttcttcaccactgtgctagttcggctccatatcctgaatccgctgtttctgtacttatattaccctcgggtgttcaagaagtttgaggtatggaggatatttacaagtttcttcttcctgggaccattttccataaactttggtattcgccttctgatgatagcaaggtatggtgtcatgttggaaaagggagcatttgataaacggactgcagatttcttgtggatgatgatatttggtgccatctcactattggtgttgtctgttattccccaattgaatacttatgtcttgggattacctatggtcagcatgcttgtttatgtctggagccgagagaatccaaatgcccagataaatatatacggcatcctccaattgaaggcgttttatcttccatgggttatgctcttattagatgtgatatttggatcaccattaatgccaggccttctgggtatcatggttggacatctatactactactttgcagtgttgcaccctctcgccaccggaaagaactacctcaagactccgaaatgggtacataagattgttgctcgattcagaataggtatgcaagccaacgctcctgtccgcgcaccagctaacggcaacgctgggactggtgccttcagaggaagaagctatagactcaatcaatagatcgaccaggagaagtacacaccttgtaacgctaacgcgattcctgttctgagtggcaatgtagagacagagcgcagattcctagggtcaatcaggattaagggttgcggatagggcagaggggtggtaatggatgacgatctaaatgttttttcataaaatggtagagtattaaataaattataaattttagtgtaaaatgaatataaataggatttgtttctaatccgatctttatatcttatagtgtaaaattatatcttatagtgtaaaatttagagtcactgttaccctattgcagtgccgcctttcatttactgatttagttcctaacaatgttcgtcgtccctgtttacgcatgagtatagttgtgtaatggcaatttgcgtgcacttacgtttgaa

SEQ ID NO: 18067 - DNA, 695 bp, Zea Mays
caaagctattgcccagccctggagtctgacgacctcgtttccctgctgtctcgcctctctttcggttctcacggcgacgactgggcgagcgccgcctcccctccctcgctccgtgaggtcctcgccggcgacgagtgccgccgcccgtttccatgttttttccgccgattagtgtccaccaggagcggtcttctgggcgatctcgtgggtttggctatgtaacattcgcatcagccgacgatgcaaagaatgttcttgattgcgagcatgttcttgggagccgtacattagaagtgaagatagctactccaaaggaagaaatgaaatcacaaggaacaaagaaagctacaaggatatttgttgctcgaattccacagtcagtggacgagtcgatgtttcgtaggcattttgaagcttttggagaaattcttgatctttacatgccaaaggaacatggttcaaaggggcatcgtggaatctatcattttgtttcatgttgtgattttggatttgtcgtgattcacattattgacaagatgaaggcagtccttgtagttactgtatggaagtgctgtatgtgtaataaaaaagtatcatttgcgaaaaaagttataacgccatcagacgaggtgcctgcacgtttatatacactcgctctgttccagtatactgttacttctacttctttatttttg

SEQ ID NO: 18068 - DNA, 3150 bp, Zea Mays
ccagcgactcatctctgacctctgaccaactccggtgatcaagaactgaagaagatgagtacctcatctgaaggtatggtggaggaccaacattaccaagaaaggcaatcaatactggcttttctcaaactgatttggcgatagaagtttatcctctacgactgcagttaattctaatgtcaagaggagagcgaacctttataaggataagcaagaagggtacagttggccaactccataaaatggcctgtaaggtttttgacttggcaccagatgaggtatgcatttgggactattatggtcgaacaaagcattcattgatggatagcttggacaaaacccttgatgatgccaacattcagatggatcaaaacattctagttgaggtaaccactgatgcaagtggtagtctggatggtttggttaagcgaaacaatttttttgagagtgatgctccgaaatcaggattgccagatgagaattttgcagccaacaactatgcttccagaagctatagctctagtctgacaccaagcatctacctgcgatcacccaatggtgatctggataatgtgcatggttctagtggcatgatcacgaggggatcgcccttaggtcttacagggctacttaatcttggaaatacatgctatatgaacagtgccatacagtgtcttgtgcacacaccacagtttactaaatacttctgtgaagattatcatcgcgaaataaatcggcaaaatccactgggtaatgtgggtgaacttgcattagcttttggtgagctattgagaaaactctgggctcctggaggacgtgcccctgtttcacctagaccattcaaaatgaagctttctcggtttgcatctcagttcagtggatacaaccagcatgattcacaggagctgttggcgttcctattggatggactccatgaagatttgaatcgtgtgaagcatagaccttacataaattcaggggatgctgatggaagatcagatgaagaagttgcagatgaatattgggcaaatcatattgccagaaataattcaatcattgttgatgtatgccaggggcagtacaagtccactttggtttgcccagtctgtgggaaggtttcagtgacttttgacccgttcatgtatctttccttgcccttacaatttgcctcaacccggagcgtgactgccgtggtgttttcttgtgatggtagtgttccaccaacaccattcactgtgaatgtaccaaaacaaggtaggtgcagagatctattacaagcccttggtgctgcatgctcacttaaaaatggggagaaacttctaattgctgagatacggaatcataagatctaccgttttattgatgatccagtgcttcagctgtctacaataagtgatgatgatcatctggcagtttataagctcccaaagttggaaaagagggtgaattacattcagtttgtgcatcgtcatgaagatctggaccatggaaacaataacagcttgacatcttggaaaccgtacggtgttcctcttcttgcacaaatttctcgcaatgaaattgtcacgggttttgatatccatgagttggtccataaaatgcttgtgcccgtgctaaggaatccggactctctgcatttggctgttcaaagttctgtttccacaagaactcatagttatcataccgacagcagcaaatgtcagcttctgttggttgatgatagcaacacagtcattgaaaaatcaaatgatgctatcaggatcccacaatcttcacttgcaactgtattttttatcaactggcccaaggcagatctgaaaaagatagacactcatcatttagagtaccttccagaggtgtttatgtatgctccgcctgcgaagagaacccgtggtgaagctctgtcactctatgcatgcttggatgctttcttgagagaagaacctcttgtacctgaagacatgtggtactgtccaaggtgcaaggagcaaagacaagctagcaaaaagttggatttgtggagacttcctgaagtactagtcatacatctaaagagattttcatttagtaggtcaacaaaacaaaaactagaaacttttgttaattttccaatacatgacttggatttgacaaattacattgccaataagaagacttcagagcgccagatctatgagctgtatgctgtgagcaatcattatggcaacatggcaagtggacattatactgcacacattaagcttgtggatgagaatcggtggtacaacttcgatgatagccatgttgcttccattgatgaagatgaggtgaagactgctgcagcttatgtgctattctatagaagggtcagagaacaagacatagcaaggggaactagtaatggatctcagttatatgcaaaaagaagtcacggatatagccataggtaggctgatgattactgtggttcggtgcaagggggattctggaaatgacacccgcacgcctttagtcattgccaggagtatatggcttgctggaaaaaatgctcatcacgtgcagtcaatgcaccgttgtccagttgtcacagaagatatttcgtgcagtgctggtacaagatgggaattttgtatgaggtgagttgaaggagtaattgactctttatgataactgggtagcttcaacaggaacgccggggcttggtggcattttgttcgtctgttttcttctagaagagaaacaaggggaggcaagaaaacatttaggaaacaccttttcgttaatttgattttttatttccatttttagatttagctagtctgtacactgttgttggaaatgggtccgctgttgttggtcgatgcttgtggtggccaataatactacacccaactataccaggctctgcaatggcgaatcatggtgcacattatggtgctctgttgcgggaagaattgtagctgatgttgtacttatatactggcaaaaaggccccagaaatgtaaaaatgtatcgatatgctgacatcttaaaccctattttggattcgtgctctttcctatggatgaaggtgtgcgccatttaggggttgtttgtttgaagaatcaatccattctaggtaggtgattatcacgagaccatttcataaatttggtgaaatgaattcatttt

SEQ ID NO: 18069 - DNA, 1632 bp, Zea Mays
cgtcctggttcctcgccggcggcaaccgcgctggacgaggtagcgctgctatcaaacaccttgtgctgtcaacatttatgagtgcaaggcagtattgctaagagtatcttgccatggcatctcctgcttccgtcaccaacctcggaagcaatgggaggtctggcccgctcccggctgcagctgcaaggagggcgcagttggtcacaaggatcagattcacggggttcgatggcataaggcgatggcagtatgagcctgggaggctttgcaggtgtatggtcgtcactaatctgattgaggagaaggttgttcagttctcgtcaagagggagtgtcagtgtgaaagctgatgatgacaatgatctgcttctgaagccgccacagaagccagtccggtcaaatggacccccggagagcatgaaaacagcatcactgccggatcagaagccagcaggggcaactttagacgacagagagaaggtcagagagtcactggacgctgtattggagaaagcagagaagcttgaggcctccagctttggtaatgcagatggtggcaaccttggttcaaggcagagtaatgtttccatgagtaatggtccaggaccgacagcagtggaggaaggtggtaattcaaggaagacaaaaacactaaagagtgtatggcggaaggggaaccctgtgccaactgtacgtaaggtcattagagagcaaccaagaactgaaacaaggagtcagtctatacctgtggctaaaccttcagtgtcatctgcatctaagccttcccctctgctactatctaaaccttctgtagcacagcctcctcgtcggcctatcaagtctgatacatcaaatgagaaaaaaggacccatccttattgataaatttgcttccaagagggcagcagttgatccgattgtacctgaggaattgttagaccctctaaaaccagtacgaggcccaccagcaaaagtcagagttgatcgtcgtaaaaaaccagacacacaagctggttccagacgacgtatgtccaatgatgatggattagttgatgaggatactactgacgtgccaatttctggtgttccagtgcgcaagggtaggaggtggagcaaggcaaaacgccgcgctgcaaggctagaggctatgcaagctgaagagccagtcagagttgagatccttgaagttggtgaagaaggtatgctgattgaggacttggcatatgagttggcaattggtgaatcagaaattttacgattcttatcggtgagaggagttatgcttgacaatgttcagactctagataaagatttggttaagatggtttgcatggaatatgatgttgaagtactagaaagtggtcctgtgaaagtggaggaaatggctaagaagaaggagttccttgatgatgaagatttggataaattggaagtgaggcctcccattgtgactatcatgggccatgttgatcatgggaagacaactctgttggattatatacgcaagagcaagttggtggcatctgaagctggtggtataacacaagggattggagcatatcaggttcttttaccagtagatggaaaccatcaagcctgtgtttttctggatactccaggacatgagatctcag

SEQ ID NO: 18070 - DNA, 1248 bp, Zea Mays
gtgattcatccgtatccacgcgaatttccaattctttaaagacagaggatagactggcagctttgaaggctaaggataaggagcagggggcagcatctgcaatgcctgaaccaaactctgaggttctcttcctgtgcagctacgaaggatgtgggaagacatttttttgatgtaggggctcttaagaagcacgctcatgtccatggggagaggcaatatatctgccactatgagaactgtggcaagaaattcttagatagctctaagttgaagagacattttcttatccatactggagagaagaattttgtgtgcccacatgaaggttgtgggagggcattttcgttggattttaatttaaaggcacacatgaaaacacattctgcagataactatcatgtgtgccagtacccagaatgtggccgaagatttacacaagaatcaaaactgagagctcatatcagggcacaacatgagaaaaatccaggtgcgtcatcaatgaaccacagtgcaattggaggtccgcaccagccccctaggccagcgaaggtctcagcagcacctccagctccctcagctgagcgcccttacgtctgcccctacgatggttgtgacaaggcatacatccatgagtacaagttgaacctccatctgaaaaaagagcatcccaaccactaccaggatggtggtccaaatggtgctgccgccccttcaaagcgcagcatctcgaagagttcccacaggagcaagctggacatcacctctaggatgccaccggccaacatccccaagcacagagggtatgcaacaccattgccagctgtggtgagcctccctgaggagcagcagttgctaaggaaagtggtgtacgaggatgacagcgaggagactgaagaagagggggataacaatggcgaggacagatggaactacaagagagctgctagcagcgacgacgaggaaaccgaagacgaagaatgagctgctagcagggattcatttttttttcttctgtagctgtgcatataccataatctatagactggtggttatagatttcaatacatgtacatttttaaaatacggctggcctatagtagacaagaggttgttgctgccatgccccttctcaactacacaggccatgagttcagaaaggataatggatcattgctcccgtctgcctgtgtttgtgccttttggtttgttgtcataaatgagttctcagttatcgtagccctgattgag

SEQ ID NO: 18071 - DNA, 1738 bp, Zea Mays
atggcctcccacggaattcatgggggagcaggatacaccttttttaaaacgacttactgggagaagcacataaaagccagattcatttttgtattacggagaaaaaaggaattaatagagttccaaacctcggttctgcagtttctactaaaaaagcagggatgagtaaggatacatttattaatttggacgtctctcatcacagagcggttgcagtggtgaggttgctaagaatcgagaaggggaaagcatttgtagaccttttgaacgagaaagcaaatgattctggagataaagagataggatatgtgcagaggacactaggtttcagcacacgctatttggaggacagggatataagactggttaccgtcatagttgctggaacagtgcgctggaaacgctaccttgattatctaatcatgtcactatgcagtgaggagaaggttttcagggagatggagccactgcttctacagatattgagaattggctttttcgaaattctcaagcttgatgtacctgcttatgctgccgttgatgagaatgtaaggcttgctaaagtagctttaaggcctggtgctgggaatatggtgaatgcaattctgcgtaaacttgtattgctaaaggagacagactctcttcctcttccaaagatagaaggtgatgatcgtgcccaagctcgtgctctttctataatttattctcatcctgtttggatggtgagacgatggatacggtttcatggaaaagatgaagctctaagattgatgaattggaacaacagtgatcctcatttcagtctaagggtgaacacatcaaaaggctatactagggctgaccttgtaaaacgattggaaagtttacaggttcattatgaagaatcaattatggatgaatttgttcgcattcgggaagggatgcagcaagtcttaaaagctggattactgaaagatggcatttgtgctgtgcaagatgagagtgcaggtcttgtagtgtctgtggttgatccacaacccggggaaacgattgttgattgctgtgctgcacctggtggaaagactcttttcatggcatcacggttgtcaggagaagggaagatatgggctctggacataaacaaaggtcgtttgagaatactcatggacgcagcaaagttacacggtctagatgatatgatcactgacatccatgctgatcttcgactatatgctaaggaaaccacagttaaatatgacaaagtattgttggacgctccatgctctggtctgggagtgctttccaagagggcggacttacgctggaatagacaatttgaaaatttggaagagttgatgtgtttacaagacgagcttcttgattcggcatcaatgttggtaaagccaggtggtatactaatttacagtacgtgttcgattgaccctgaagaaaatgaagagaggattactgcttttgttcagaggcatccggaatttgctcttcagagtgtatgtggatatgttcctagagaatttatcacagatgaaggtttctattcctcaaatccaactaagcactctatggatggggcatttgctgcacgtcttgtccggtcaacgcactaagattataggagttgccacaaggccacaactaggtgtgaagttgaacaaggaatcacatgtattgccctaagtgcacccagtcattgcttcaatatctttatcttatatattcttgaactttgctgcaaaaaaaa

SEQ ID NO: 18072 - DNA, 2940 bp, Zea Mays
atggctccaggctcattaaaaataccctgccccaaaccaaaatccgcggcgcccaaaattttccctccgtcgctagggtttcgtcctatagcaggaaaccgtttgaagcgcccaaagggacggcagcttgccagctttcgcctcactccgccaatagtccacaccgcgctccgcctgctccccggcgccgactcgtttcccctcctccttgacgccgcggccgccagcagtgggatcatggcttcggtcggttcgcggcggctaacggtgctgcgggagttccgccctcacgggctcgcagtcgaggaagccgacggccagggcgtccctggggcgccaccgccgcaagactacgactacttcctctttgaccctgcactcgccatttcccccacccctgaccccagcgatgaggcctcctcttctggtgcagacggcgaccacgagctcttcatccgtgacaatcagataatatggagtaatggttctcgagttcacaaaagatatgtatcacctaatacagtcattatggcttgctggtgtaggatgaatgctatcagtgatgctcttctatgtgtcctgcaagttgatactttatctctatacaatgtaactggtgaaattgtttgtattcccttaccttatgctgtttcatcaatatggccactccctttcggtcttctacttcagaaatcaactgatggaggtcacatggtgtcatcctcgagttcactgttaaatgcaagggatttaaatcgtcctagcaaggaatatggattgacctacaatattccattccaagcaaacatcttggagacagacaacaaagctaatggcgccattatctcgtcacacctcatcttgaaacatccatttgaagagcctcaggcaacatatgttgaagaaaaggacaaactaactatgatgagagattttgatgaaaaaactatctggacaagtgatgtgatacctctaatagcatcatatcataaagggaagtttcagcattctgtctggcaaattgacggtgctagttaccaggaagcaatgaacgaaaatacaatgctacctgtcgatatttcttcacataaatgtgcattccgcaagatatggcaagggaaatgctcccactctgctgctagcaaggtttttttggcaactgatattgatgggatgccgataattagttttttactgcatgagcaaaaaatattgcttgctgtaaggattcaagttgatgatgctactgaagaagcttttggtgatattaagcctcacatgagctggaacattcctgcatttgctgctgcgccagttgttgtgactcgtccaagagtacgagttggagttcttccctttacagacatccttgttttgagttcagacaatgatctacttctctattctgggaagcagtgcctctgcagatatactctccctaatgaattgggaaaggggttcttttcaaatcatgagctaaattcagatatttcagatacttactctgatctgaagatcacaagcatagctgatgctgttgaagggcgtataaatgtgacatgcagtaatggcttgatgctcagatgttcgttgcgcaaaaatccttcctcttctttggttagtgactgtataactgcaatggcagagggtttgcagagttgcttttacaatcagttcatttctcttttttggggtagtgatgccgcctacctatattcaagctctcaggttgattcagaatgggaattttttagtcatgaaataaaaagagtttgtacaaagtatggacaaactttgtcaactaaatcactcacttttccaagtaaagcttgggacttcctgatcaacagcaaataccattcccaatactgcaaaagagccctatcatcttccaattcttttttgcctgtgtcatataatacaggcaaaactgtttttaattcctttctccaggatgaacatagttcagatgtgtcatataatattcggttcatgagagaaacattggagacattgcatgccctatatgagaacctcaagcttaatattttgcggaaagaggatctaggatgtctcgcttcattgttatgtactgttgcttcatctctgggtgaacatagttatgttgattattattgccgtgactttccactcaacttgactgaatccccatccctagtctcttcaaattctttaacaactccaccgtccctgtttcgttggtttgaatattgtctacgtcatggtttgaactccgcaaagctggaagacattcctactctaatgcgcaaacagaaagtttctgccgtgagttggagtaggaaggtgttgtcattctatagtttgttgttaggagcagaaaggaaaggcaaaaatctctcttctggtgtgtattgtgaagttgccagtggttcagcgagaaacactgaagaacttactgttctggctatggttgctgaaaagtttggtcatcggcagttggatttgttaccagttggtgtatctcttgtgcttcgtcatgcactggacaaatgccgtgactccccacctgatgattggcctgcaactgcttatgttcttgttggcagggaagacctagctacggcaaagatggggacagttaggaaagaaaacctgttgtggaacaatgataatttgacatcaatgtcagtcccttatatgctacatctgcaacctgtaatcataccgacaactgcacctgacatccctgcatcagaagttttgaattctgatgattcagattctgtctataaatctgttgaggatggcatggaacatatctttacttcaacaacacaactccgatttggtcatgatttgcgcttgaatgaggttagacgcctcttatgctcagcaaggcctgtgcctatacaaacacctactaatcctagcgtgtcggatcaagacctacatcaggta

SEQ ID NO: 18073 - DNA, 2282 bp, Zea Mays
ctccgctccgctcccgtcccgccatgggcaactccctcgcctgcttctgctgcgcgggcggcgccgcggggcacgtggcgcccgccgcgctcccctcggaccccgcctacgacgagggcctcggccactccttctgctacgtccggccggataaggtgcccgtgcccttctccgcggacgacgacctggtcgccgacgccaaggcggccgaggacgccaccacgttccgggccatctcgggggccgcgctcagcgccaacgtctccacgccgctctccacgtccctcctcctgctgctgccggacgagtcggcggcctcctcctccggcttcgagagctccgagtcgttcgccgccgtgccgctgcagccggtcccgaggttcccgtcggggcccatctgcgcgcccgccggggccggggccgggttcctctccgggcccatagagagggggttcctctcgggccccctcgacgccgcgctcatgtcgtccggcccgctccctggcgccgccacgtccggccgcatgggaggcgccgtgccctcgctccgccggagcctgtcgcacggcggccgccgcctgcgggatctcacccgcgcgatcctcgcgcggacggagaagcttcagggttcgatggatctcggcctcggcctcggcctcggctcgcccgatggcgccgggctgcagctgcagtgggcgcaggggaaggccggcgaggaccgcgtccacgtcgtggtgtcggaggagcggggctgggtgttcgtcggcatctacgacggcttcaacggccccgacgccacggacttcctcgtctcccatctctacgccgccgtgcaccgcgagctccgcggcctgctctgggaccagcgcgacgcgcaccccgaccagccgaccacgaccagcaccacggcctcagatcaccaggaccgccgccgccgccgcgcccgccgctcgagaccgccgcgcggcgccgacgatgaccagcggcggtggaagtgcgagtgggagcgcgactgctccagcgccctgaagccgccgacccagcgccctcctcggggcagcagccagaacgaccacctcgccgtgcttaaggcgcttgcgcgcgcgcttcgcaagaccgaggaggcctacctggacgtggccgataagatggtcggcgagttcccggagcttgcgcttatgggctcttgcgttctagccatgcttatgaaaggggaggacatgtacctcatgaatgtaggtgacagccgggctgtcctgggaacaatggacagtgtagacgtcgagcaggtcaccagtgatggattggttggggatggcacgccgctcttgtcagctgtgcagcttacatcagaacacagcacgtcggtgcggcaggaagtctgcagaatacggaacgagcaccctgatgacccgtccgcgatctccaaggaccgtgtgaagggctcgctcaaggtgacgagagcgtttggagctggtttcctgaaacagccgaaatggaacgaggcgctgctggagatgttcagaatagactacgtcgggtcatccccgtacgtcacgtgcagcccttcgctctgtcaccgcaggctcagcacgagggacaggttcctgatactgtcctcggacgggctgtaccagtacttcaccagcgaggaggcggttgcccaggtcgagatgttcatcgcgacaacccccgacggcgaccctgcccagcacctggtggaggaggttcttttcaaagccgcgaacaaagcagggatggacttccacgaactgatcgagatcccacacggcgaccggcggcggtaccacgacgacgtatctgtcattgtaatatccttggagggcaggatctggaggtcttgcgtgtaaataggtcggccatactagattagagaaagaaacgtatatatctgtagagatagagagaggttcttgcaggcctattccattactcccagctgctcctgtacaaaatctcaacgaagcaccactgggtgggcttgggatctcggcgcatccaagttgaatcacgatgagaagatgcgtcccctggagcgcagtgccgtataagatgttcatgtaaaagaagatctgttcaactactgataactaaaatagcgaccaattggtcaagtttttttttgacctttttttgggggcatcctctgtgttcataccacaggtaaaactgtacatgtgcgcagtgcgcggcagactgattcaaagtcggacttgtatggttctgaagtactccgtactaaactttatgcaaatacgcga

SEQ ID NO: 18074 - DNA, 1464 bp, Zea Mays
atacaaacgtgatagcctcatgctcgcagctcgacaaacgacagcggcctagccccgcctccccgttatccgacctatccccagcgtcgttgggtcatctccggcagctcccccgctaacacctccatggcgtcgaagcaggcggcggctggcgaagcccttgcggcccaaatcaacggcatgtcccgccctgagatgtacgacatgatgtccaagatgaagaccatgatcgaccacgaccaggagacggtgcgccgcatgctcgtcgacaacccggacgtcacccgtgcgctctttcgggcacaagtggtccttggaatggtgaaaacacccaaaactacacaagctttggacatggtccaacccacagcagtgccaacagcaccttcctcagtcaaaactactgcaccagatcatgtcagcttgcccccgcccccattacctgctaaccagcagagtgttgctcaactttctgccccgttttcatctggcttgtctaatgtgggatcgaccatggaccctcctactatttcagcaaatccaccacaatcagcacaagcaaaaggataccttatccatcagatgccttcatcagctcctcagccatctcaacatccaaatatggccctacctcatgctcctccacagtattccaatgttccatcacatatacctatagttcatagtcagccacagcaacctttgcaaagtcctgcaatatataatcaacagttgcaaccacctttgccccaattgtcaaggccgccttttcctcatcagatgcattcacaagtaccaaattcatttgggttgactcatgcaaatgctccgcagcacatgttacaacaaccaatgtttcatccggttgcgaatcctcaaactaatttcctccctggccaaccaccattgcctagccagccaccaccacagcagctgtaccagctgacacctgagatggaaaagatgctagtccaacaagtcctgggcatgtccgctgagcagattaacatgttgcctccagaacaacggcaacaggttcttcaactacgagacatgctacggcaatgatagatcgtcagttgactgggtggagaagtttcagttcactgcagcagggatcccgagtgtgggtgcctgttcgttttagccttttgtatcacctgattgacatcccgactagtctgcagcctaccttggatatgcgattgtagaatggtagtcgttgtcgtcatttatagaaatgcttgggcaatatgttttccgaaggactcacaaatgaactgcatgttttggtccagttcagccgcttcaatttcaagtcgtgttaaacatttaccatagggcccctgtggctccgtaccaagtaccaaccactcctacggtgcattcatacgaaccttcataaaaagaatgaggatacaattctaggttctatttgaaccatcttaaatttgactaattctg

SEQ ID NO: 18075 - DNA, 408 bp, Zea Mays
agccattctgagtcactccagagggcatcagtggggcagggccagaaatgctccttcgtcagtcttcagatcttcaaggccaagaaattgttaatacgaactttggaggtgatactggagacgcatttgaagcacatgaatggagatatgttcggacatttaacggtatcagaatttttgaagatattagtattacaaacccaaaggttggaaaggttatacttctgaaatctgttggggtggtcagtgcaaaccctgataccgtgtttgaagtggtcctcgatcttgataaacataagcgatatgagtgggatatgttgacagctgatttggagttggtggaaagaattgatggatactacgatgtggtttatggaacctatgaacccaaatatttaaattggtgga

SEQ ID NO: 18076 - DNA, 1230 bp, Zea Mays
gtggaaaccctttgccaaccatgagcatttctacacaaaaaggaagccaaaaaaaacccaaaaataggagaaaaaccatcccactccaatcttcgaagggtcgaactaggcccgtcagagaatcagagctctgaggctgctcacatcaggccaccaccaacccctcacgtcggcggtggcgtcgtcggcgaaggcagagatggcgtccgtggccgcggcggaggtcgcggcggcggcgctccggtcggtgctgtcgcgcgcgcagcaggcggcggcgcgggcggggcgcgcgccggggtccgtgcgcgtggtggcggtgagcaagaccaagccggtgcctgtcatccggggcgtctacgacgcgggccaccgctgcttcggcgagaactacgtccaggagctcatcgacaaggcgcctcagctggcgtgccaaaccttgatatggttgagagtgtcgatgatgagaagattgctaaccgtcttgatcgagtggtagctgacttggggagaaaacctcttaaggttttggtccaagtcaacactagtggagaagaatcgaaatttggagtagatccctcaggatgcatggaactagcaaagcatgtcaaactgaactgcccgaaccttgtgttctctggtctgatgacaattgggatgcttgattactcctcaacccctgagaatttcaaggtaaaatatagtatattctgggatgcagaaattgtgtacgagtggcaatatggcatgcatatgtgcgcttatgtctgttaaattcataggcgctggctaactgccgggaagaggtgtgcaaggagcttggaatacccgaagagcagtgcgaattgtctatgggcatgtcggctgattttgaacaagcgattgaaatgggaagcacaaatgtaagagttgggtcaaccatatttggtgcaagagaatacccaaagaagaactagggtgtttaactatatttggtgcccaaagaactagggtgcttatgcattcctgtcatgatggtagtggcacagaatctgcaacagatccaaatctgatgatgcatcatatatgtgcagttgtgtgcccattctactcagcttaaaacattttgacacccttttttggcccaaagtatcaataaggaaagttaataaaaagcattagaccacatgagtatcgattgtattttgatgtcgacagattttgtttacagttcaaacatccctgttacattat

SEQ ID NO: 18077 - DNA, 3510 bp, Zea Mays
aaaggcagttcttacacgcgggccctcggcttcaccggaaatcgcctcgggacgggagatctcgcgggccggccggcggcgagaggatgtccaccgcgcccgcgcggcgcgcccgcccgccgctgccgctgcagaacggcgcggagggcgacgacgagcgcgaggaggaggttgatgaggaggaagtgggcgatgacgaagcggaggaggaggaggacgacgacgacgaggaggagccgcggctcaagtaccagcggctaggcgggagcgtgccggcgatcctctccaccgacgccgcggccgccatcgccgtcgccgaccgcatggtcgcgctcggcactcacaacggcacgctccacatcctcgacttccagggcaaccaggtgaaagaaattgctgcgcacacagcaactatcaacgacataagctttgacgcagacggtgaatatataggcagctgctcggatgatggcacagtggcaataaacagcctcttcaccgatgaaaagctaaagtttgagtaccatcgccccatgaaggcaattgctctagaccctaattatgcccggaactatagaagatttgctactggtggtttagcaggccaagtacttgtgctgacaaagaagtcttggggaggttaccataagaaggttttgcgtgatggtgaagggccaatccattcgatgaagtggagggcggatcttcttgcttgggctaatgatgcaggggtcaaagtgcatgatatgagaacagacaaagggatcgcattcatagagagaccaaaaggcattcatcgaccagagttcttgcttccccacctagtctggcaggatgatacagtcttagttgttggatggggaacaagtgtcaagattgcagcgatccgaacagatctatctcagggactcaatggcctacaaagaactatcaccacagctagttctgagaagtatgtggacattgtgggctcattccaaacaggctatcacatatctggggttgctccatttggtgaccttttagtcgtacttgcctatattcctgatgaggatgaaaaagagaaaacatttagtacttctgttacttcacgacagggaactgcacagcgtccagaaatacatcttgtatcatggaaaaatgatgagcttactacagatgctctgcctattcatggttatgagcattacaaggcaaaggactatgctcttgcacatgcacctttctcaggaagtagcaatgcaggtggacagtgggctgctggtgatgaacctttgtattacattgtgtctcctaaggacatagtcgttgcaaagccaagagatgctgaagatcatattgcttggcttcttcaacatggttgccatgaaaaagcattggctgcagttgaggcagggcaaggacgcactgagcttcttgatgaggtgggctcaagataccttgatcacttgataattgaaagaaaatatgctgaagctgctcaacgctgcccaaagttgttgcgaggatccccttcagcatgggagagatgggtcttccactttgctcatctccgccaacttcctgttttggtcccttatattcctacagaaaatcctcagctgagtgatactgcatatgaggttgcccttgttgctctaactaccaatccttctttccatgaacttctcttgactactataaaaaattggccaccgacattatactcagcctcaccggtcatatctgccattgagccacagctaaactcctcatcgatggctgattcattgaaagagctgaattgtatgtgatcaatggtcaatacgaaaaggcactttctctttatgctgaactcctgaagccagaagtattcgagtttattgagaaatacaacttgcatgatgccattcatgataagattgtcaatcttatgatagtggacaataaaagaacagttcacctactgatccaacatcgtgatatcattcccccatatgaagttgtggagcagctgttgcataccagtaaaaaatgtgacaagagatatttgttacacctgtatttgcatgctttatttgagatagatatacacgctggaaaggattttcatgatatgcaggtggagctttatgctgactacgagacaaggatgctactacccttccttcgaaccagtcagcattacaggcttgacaaggcatatgaaatctttgcacaaaaagaacttgtaagggagcaagtttttgtccttggtcgaatgggcaatgctaaggaagctctgtcgacaattataaacaaactggaagacatgcaggaggctgttgaatttgttacggaacagcatgatgatgaactgtgggaggaactgattagacaatgcctccagaagcctgaaatggtagggaatctattggaacatacagttggcaatcttgatcctctgtacattgtcagtttggttcctgatggcttagaaatacctcggttgcgggatcgtcttgtgaaaattgtgacggattaccggacagaaacttcattgcgaaatggatgcaacgatatacttaaggctgactgtgttaaccttttggttaaatactaccacgaggctcggcgtggggtatacatggtaagcatggacgaggaggtacacggaaacagagctgacgatggatcatcgcggggacacgagagatcatctagcgtccgggctctagatatcaagtccagaacaagatgtggtgcccggtgttgtttgtgcttcgatcctttgcctatccaggacatatctgtcatcgtgttctactgctgccatgcgtatcatctgtcttgccttgaaggtggcttagactcgatgagatcaaacagtggtcaggatagtgacggaggcatggacgatgaggatggttccccatcaggccagtctcgcatgcgctgtgtcttgtgcactactgctgcttcataattttataccgtgttgggtagtacacactaccttgtgttgtgttgtaagttttgagccatgtaattattgtgttcttttcgcgtgttacacataacacatgcttacaatagcgtaattcttttgagggaggccatgtcctcggcaaggagagttctgtgtaaatttgatgaaccagcatgagcaaagctgtgcggcatttccatctttttttaatgccacgtttgccagataatcaaaagtttattgacattacacgatgcagaactgttcatgtagaatgtgcctgtctatattatacactgttctatttgggactagggcatggtagaattccccagtttcttctcacttcctccaggtcttcatgaaagtgcttctcgcaatatacagaaatcagatcgcttgagaccggcttttgttgcccatgggaagtaatgcgtttctcactgaaccttgagggcaatttgaacaggatactcagcgttcgattctagccgaagtgtttggacggtgacatattgcgctgtagctattggattctgaaggcagtatgtatccttcgctgc

SEQ ID NO: 18078 - DNA, 1128 bp, Zea Mays
ttcatatcggtgtgccatatcattatgcttgaggtggtggtatgtaccttccattagggaggatccaccaaggagtttgttcaacatggatgaagaatacaattcctctggaatatagcgaagaatgcagctgggctcccatctttgtgaggcagtcaaatttcaagttacctgctgatccgtccactcctattatcatgattggtcctgggacagggctggctccttttagaggcttcttgcaggaaaggttagcattgaaacaatctggggcagaattgggcacttcaatccttttctttggatgcaggaaccgtaatatggactacatatatgaagatgagttgcaaactttccttgaggagggggcgctttctgagctaattgttgcattctctcgggaagggccaacgaaagaatatgtgcagcataagatggtggaaaaggccacagatatttggaacatcatctcaaatggtggttacttatatgtttgcggtgatgccaagggaatggctagagatgtacacaaaatgcttcatacaatagtccaagagcagggatctttggataactccaaaaccgagagctatgtaaagagcctgcagatggaaggaaggtacctccgtgatgtatggtgacacatcacctcaaataagccatagctctagcgtgtggaagtaaagctggctttgcgtgtatgacatgtctaatgccaacccaatcgtcagctttggaatgaagcgtgccattgatgatatactgaaatgagttgatcagtgcaattctttgacatctaactatttattattatatgagatgggaggaactgatggagaataaatgctgctgtagatttgtagaagttcaaaaaaattgggtacccctgacaagtttgtagccaagggggtacatcatacagtttgagatgaggacactatgtatactgtttgagacgaggacattatgtatactactctagaaggctaccgaaaccaaattttgcatctgtttattaaaagcttgtacttttatcatggtatccgtcgttggcaatctacaactttgtacagccgcaatgttgcatcgaaggtgcagcttgcttcggcacccgtagggatgcaagtt

SEQ ID NO: 18079 - DNA, 1493 bp, Zea Mays
ggggcacatgcttgtcctgcgcaggcaggttaaggccaccccaagcaggagtctgcttccgttccattgcatcccagtcccagccaaagcaggatgccgcacgccaagacggactcggaggtgacgagcctggcgccgtcgtcgcctccgcggtcgcctccacggacccgcggcgccgtctactacgtgcagagcccgtcccgcgactcgcacgacggcgagacgatcaaggcggccacgtctgtgcactccacccccgcgctgagccccatggcgtcgccgcgccactcgcactcccactcccactcgtccatgggcagggactcctcctccagccgattctcgggccacggccacaacaagcgcaaggccgacaagggcggcagcaacaagggcgcgccgggcggcaaggggtggcaggagatcggcgtcatcgaggaggaagggctcatggacgaggaggaccacacgcggatcgtgccccgcaagtgctactgcttcctcgccttcctgctcggcttcgtcgcgctcttctccttcttcgcgctcgtgctctggggcgccagcaggtcccagaagccgcgcatcgtcatgggcaccatccgcttcgacaacttcatcatccaggccggcaccgacgcgtcgctcgtgcccaccgacatggccaccaccaactccaccgtcagattcacctaccgcaacaggggcaccttcttcgggatccacgtcaccgccgacccgttccagctctcctacagccagctcacgctcgcgtcaggagacgtaagtgaatctgtcctcgtccgtccatccagatggagatccatctatcctggactgtctaacaaagggaatccgtgaatgaaatgcagctccacaacttctaccagcctcgcagcagcagccgcaccgtcagcgtcgccgtggtcggcaacaaggtgccgctgtacggcggcggacccacgctgacggcggcgccggcggccgggggcaaggggcagcagcaggccagcgccaaggtggcatcggtgcccatggtgctgaggaccacgctgcactcgcgggcctacgtgctgggcgcgctggtcaagcccaagttcacgctcgccgtcgagtgcagggtgctcatgaacccaaacaagcagaacaagcccatctcgctcgggaacgcctgccactactcatgatatatttagcctctcatactagctgctcaacatcaccatgcccatgcatccatctcctacctacctctcaattgtactgtaatggagtatttattgatttatttatgctttgcttcgtcttctcttctctgtattgattttctttgttcattccttctacctttcgtatgcatattttggggttattttcgtctattttaatagtgatgacggtgaggctaggtatgtctttcaagagtcgtcagaaggcggaaactttacatgtaaactcaaaacatttaatctaaattatggaatagtccaatg

SEQ ID NO: 18080 - DNA, 3005 bp, Zea Mays
cttgtgcattaaattcagtggcgaaaccatctcgcaagaaaaaacctgaggtcttaactcggatcacgggttgaaatttgtgttggtgacaagccatgaacagcgcaaccaccagttgttaagtaaccctcctgtaaacttgaagcaaccgaagcggagagcagaaatggtgttccaaaagaggtcctcgtcagagttggaggcgtccggtggaggccaagtcgcggagatgccgcgcgttcccaagtctgcgaggggcaagagatcggtcaggaagaaggaggcccagaacccgccccagatgtcagcattcgaccttctcgcgacggtggcagggaagctgcttgatgagggggtgggctcgctggggaacatgagcgctggtgccccagctttgactgcatgcgcgaaggatgtccgtgtgaagaaggagcagtgtgacgaggaaatgaagcagttcaagcatgaggtgacagatcaggatagctgcaatgagagtgcaattctcccgcacattgtgttccagcgggcggtgaataatgctcggaatgaggatcctaaggcgaagtctgaggcccaggacaaggaatcctccatgatcagctgtaccaaggctgaactgggttgtaattttggtgtgattgcagataggtggtcgcctgaatccgtggaatcaggagccttcacaggagatgcagtggcgagcctgatgccacctgccccagcaggatttcataagaatgcacccgaaatgtataatttgcttgattcaatggatgtggatgtcaagcctcctcctttggtcagctctgacagcaccggcgagatgccattgtatggcgataaagttcaccgctcaacctccttaccaagggtctcgaagggagtggggttttttgctgtagatagagatgatgacgacgataagtcctctgggtgcactcatcccagcaccaccactaacaaggatttcaggtccaattgtacagctgagtatagtagggtaaggaagttgctcaccagtaagtacaggaaagttgctccagcgagggtttacaaatctgatctttcctatagtgatgttgatcggaagccttctttccggaacaaaaaaatgcattatacacgacagaggacacaaaggagtacattcaagcgtaggaagctctttgatcgccattcagttctagcatctgaatttggtaccgcacatggaaagggaaacacgaagaaggttaccggaagagactcccatgctgtgtctttggaagcaaacaaggggactagttcaacgccattccagaaatctcgtgggtcaaatgattgccatgtgaaacttaaaattaagtcttttaaggtgcctgaacttcttgttgaaatcccagaaagtgcaactgttggctcactaaagaaaactgttctcgaggcagtgactgcgattctcggaggtggtctacgtgttggtgttcttcaccatggaaagaaagttagagatgataataaaacgttgattcaggctggtattggtcaggaggatatgctggacaaccttggcttttcacttgaacccaactgtacacaaaacccacaagtccaagctcctgaagatatcagtttcctggaaaccattgatactgctgaacccctcgcaaggattgcacctgctgactcgtcttctaagcatggtgaagttgacctatcacaggagtttgcattaaccccattagcaatgaactaccagggcagtgatcatgattctgtgcactcccctgggggcgtctcatcgcccgataaagtctccacaaactcgcgagctttagttccagttccagctgcagatcccaatgcaggagctatagttccagcgaataagtctaagaggtcaccagagcaggggcaacgcagaatcaggcgcccgttctctgttgctgaagtagaagcacttgtgctcgcagtcgaaaagcttggaaccggaaggtggcgagatgttaaacttcgcgcgtttgacaatgcgaagcaccgtacctatgttgatcttaaggacaaatggaagacgctggtgcacaccgcgagcatctcgccgcagcagcggcgtggcgagccggtgcctcaggagctgctcgaccgggtcctggcggcccaggcctactggtcccagcagcaagccaagctccagcctaagacgcccccgctgctggctgaggctcgcttgctcacctaataaattcgatgatcctggctgatggcctcctccgaggccgttgcagcctttgtataaagtcagtaagtcagtcagtcccttcacaggaggtttaaggaagatatattaggaaaaaaaagaatacacatataaggtacaagaagcattgaccgatttgttgtaatatctactcaccaacagatattctttaagccaggattctctctccttgtgaatttaaccaaaggaaagggtatttctttggcaaattgtacatgttgatggtggaagaagaagatgatccatgaactgagatctggggtgccattgctcacaatttttgcagttgtgactgagaaattgaaggtcctgcttgaccaagctcggctccggctccggcttttggattctcctgcgaagaagttgttgcctcctcgcagaagctgagagccgaacagtgtatttggtttgaattgcagcctatagtataatttgattcacccgtacagacggccacaaaaagccgtaaagggagggtagcttcttttgttgagtctaggcttgcgagctgggccaaagcggcaccgaaagaaagcttcagattcttttgttcaattaaattcattcttttgttagtggacagtgacggaaggataggacattaggagggatggatctttggttctcttttccttttttttcttctattaaattagttgtactatgttatgtcaccaatcttgtagttaccctcaaatttgtaattgatgaaattaagaaattggaaggaaatgctttcgtacca

SEQ ID NO: 18081 - DNA, 1384 bp, Zea Mays
agtgatttagtagcagaaaagatcaagaggggacatttatgagcatgctgttgttttgagtatgaaatttgaggaccaagatgcgtttgaacgcaatttctgccagctgaagccttattacgtggatacatggttagttctttgtcacccaatttgtcgattttattttcctttattattttgatttctatttttttaggctgaattcatgtgatgcttcaggtaataaaaagtttaaagctgattgcgaaaggcatatttttcttatgcacaagcattattaaattggttgtggctgcatttgtaaattgagatactaaactagtggaagcaaaggacttatttgagttgtttaactagtctaagtgaaaactaaacccaacgtttctgtcagacccatcagattatcaagtacttttaagtattaactaaaagaatagcccgcacattgttgtgggactttcttagaaataaatttggtatatgcatatcgttactgtatgttctctggatactatgtatgtatatttatgatattgactcgcatgttattttattgcaacagatctggtaaaaaaggcaagctaatggaagaaaagccaatagaatattagagatcacattatagaaagataggatgatgaaacaaataacatatgttgataacttgtacattgatagattaaagattaaaagtattgtgcataatagggatgacgcggatatttttttataatcatcaaaggatggcattgacagtttgcatgaaagggtagcaagttagtagggcatttagtggggaagatgtggacaccttgcatgaagagagagatatagaacatctagtggggattagctttatagagtatatagataaattcataagcttccactattgctcgacgtcccggtgccccccccccacctctgttcattatccttggtcttcacctccacctgtacctacatctccatctaccgaacatcaggtatgcatattcatcatcatttatttgttgttagttatattatgatgtaactcaacaaatgttatttgtacatgtatattagacccctccaactaccttaccgacgcatgaacaagatggcgagttagacttagtagaaaccctcttcactagtggaggtatcgaccatcactcttcactgtaacccgatggtgatcagcgaccgtgagcttccatgttattgcgttatgatacttgagacttttattatgactatgtatgagatattgtctcttattagtactggatgatgagatgtgtcttattatgactatggatgagacttttgtgatgtaattgatgagactatggatgagacttttgtgatgtaattgatgagactatggatttaaata

SEQ ID NO: 18082 - DNA, 1282 bp, Zea Mays
agctagtctaggattctcagttgatcattatctagcaagatctaaaagacattcaagcatcggtaaatcctgtggcatcaggtggagcacaacaaactgttcaagctggaccattatatggtataggacaccatggatcttccaccgcaattgcttatggtggtacatacttgccatattcttcctcagctggacaatcgagcaataatcatcaagaacatggatttcctgagcgaccagggcagcctgagtgtcaatattatatgaggactggcgattgcaaatttggaactacgtgtaaatataaccatcctcgagattggagcactcctaagtccaattacatgttcagccatctatgccttccacttcgtccgggtgctcagccttgtgcgtactatgcccaaaatggatattgcagatatggagttgcatgcaaatatgatcactcaatgggtacactaggctacagttcatctgctttgccactatctgacatgccaattgctccctatcctattagcttctccgttgccacgttggctccatcttcgtcttccccagaatatatttcaactaaagatccatctatcaatcatgtagtatcaccagtggcaggacccgcgcctgttggagcaatcttgccaaaaggggtattccatcatgataccattatgcaaactcagactcctacaagtgccggcagttcaagccctggtggtgggcgctgattttactgagctggtgggagtgatcctctcatcataaattttctatcacttgacacagagaagctgcggcgagggtgggtttctttaccatcagaataagagagcattgataggtcacacgcaagctcgattcactagcaattttgggttcttccgttcatgtccaaaacgggaaaaaggaaaggtttttgaatgtcaggttccgtagagcatattgggcgccttggtggggctcaggtccataccctcggtaaataattctcaggcaagaaaattttcgttgttatcaagaaaattttcacatgcagagttactgggttcctccacctttcaatttttctctttccttttgttttctgtatttcgtcatactgggagcaaggcgcattgtaatggataaaaaatgcttaattgaagagatcttgctgtcaatactgaaatggctctattcacgagctcgacttgacacttatatattacgtccatgtccatttcataaagtgtagcgtttcagttttgtcctaagctaaagtgttttatcagatttgtag

SEQ ID NO: 18083 - DNA, 1480 bp, Zea Mays
gctttattgaatagagaaacagaagatataagtcaaacttgtccgacgaggcaacgatagtgtgttacacttctaataattgccttttgttaggcccataaaaagtatggaggaatgggtactttactagtcaacaaggtatcagcagagtcagcaaaccagttcggcgagttggtagctgatcctgaaacaaatgaactgctgcactatacggaaaagccggagacttttgtgagtgcagttttgctctttgttggtttatttgctcgttgtaattttttcggttgagattttgcatgtcatatttttgctctgaaattgattgcacctttcacatgcaatgattctcagtgagtaattggcatagttgatagcagtaatgcagtttatctatgtgtaggtgagtgatctcataaattgcggagtatatatatttactcccgatatccttagcgccattgaggatgtcttaaaacagaaaaaagacagagcaaatttgcggcgtgtatctagcattgaagctcttcattcagcaactaaggcgcttccaccagactttgttaggttagatcaagacattttatcccctcgagcgggaaagaaggagctgtacacataccagacacttgatttctgggaacagatcaaaaccccagggatgtctttgagatgctctgggttatatctctctcagtttcgccatacctctcctcatcttttagcctcaggagatggcaaaagaactgccactattgttggcgatgtctatatccatccatctgccaaggtgcatcctacttcaaagattggcccaaatgtctctatatcagcaaatgcacgcgttggagctggtgccaggcttatcaattgcataattctggatgatgttgaaattatggaaaatgctgttgttatacattcaattgtagggtggaaatcatccattggaaaatggtcacgtgtacagggcgaaggtgatcacaatgccaaacttggcattactattcttggtgaagccgttgatgttgaagatgaagtagttgtagttaacagcatcgtgctcccaaataaaactctcaatgtcagtgtccaagaggagatcatcctataataaccatcgtttttttttgtctaattccatataaggtctgagtaccaatcacatagtttaagtttattcgttctcaccatgtaatgtaaccttccattagattgagattattagtttgcatttatacctgtcttgcagcatgacactgcacaatcttgacttgctatgctactttggttagcgattgtggtgatgtaaaaaatgtacaaacaggtgacaccattttttgtgagaatgactcaagacattacatcaaatgtgaattcaactgcgtgttgtataaatttttaacaaaaatgcatgagcagttagagcactactctatcagaaatttgttgcaaactctaggggcttaggacgtgagcctag

SEQ ID NO: 18084 - DNA, 1441 bp, Zea Mays
agcaagcagagcgccgtgacatcacgaaacatatagagctagctgctctgcctctgcttcaccaatcacctcgcggaggggaaggtttccccctttgacacagccgagctcccctccatcagcagccagctcctcgtcgcaaagcaagaagatgatgctcgcgtacatggaccgcgcgacggcggccgccgagccagaggacgccggccgcgagcccgccaccacggcgggcgggtgcgcggcggcggcggcgacggatttcggcgggctggcgagcgccatgcccgcggccgtggtccgcccggcgagcgcggacgacgtggccagcgccatccgcgcggcggcgctgacgccgcacctcaccgtggccgcccgcgggaacgggcactcggtggccggccaggccatggccgagggcgggctggtcctcgacatgcgctcgctcgcggcgccgtcccggcgcgcgcagatgcagctcgtcgtgcagtgccccgacggcggcggcggccgccgctgcttcgccgacgtccccggcggcgcgctctgggaggaggtgctccactgggccgtcgacaaccacgggctcgccccggcgtcctggacggactacctccgcctcaccgtgggcggcacgctctccaatggcggcgtcagcggccagtccttccgctacgggccccaggtgtccaacgtggccgagctcgaggtggtcaccggcgacggcgagcgccgcgtctgctcgccctcctcccacccggacctcttcttcgccgtgctcggcgggctcggccagttcggcgtcatcacgcgcgcccgcatcccgctccacagggcgccccaggcggtgcggtggacgcgcgtggtgtacgcgagcatcgcggactacacggcggacgcggagtggctggtgacgcggccccccgacgcggcgttcgactacgtggagggcttcgcgttcgtgaacagcgacgaccccgtgaacggctggccgtccgtgcccatccccggcggcgcccgcttcgacccgtccctcctccccgccggcgccggccccgtcctctactgcctggaggtggccctgtaccagtacgcgcaccggcccgacgacgtcgacgacgacgatgaggaggaccaggcggcggtgaccgtgagccggatgatggcgccgctcaagcacgtgcggggcctggagttcgcggcggacgtcgggtacgtggacttcctgtcccgcgtgaaccgggtggaggaggaggcccggcgcaacggcagctgggacgcgccgcacccgtggctcaacctcttcgtctccgcgcgcgacatcgccgacttcgaccgcgccgtcatcaagggcatgctcgccgacggcatcgacgggcccatgctcgtctaccctatgctcaagagcaatgtgcagttgccgtttgcggcccgccaagctagc

SEQ ID NO: 18085 - DNA, 2459 bp, Zea Mays
ttctttgtgaagatgttaatgaacttgatgttaaacctgatgggtcatggcgtgtgatgggtgatgccgctaccagagatttatctcagtggcatatgcctgatggtactctttgtgactcaaaggaagatacaaaccctggtgtcgcaagtgttaatgagttcaagagagagggtgcttctgatgaacatagaactttgaaacttggaattaaaaaaaaccctattggattatggcaggttagcagtaaagcagatgatatgaaacctgtggttagaaatcacatccaaaataacactgggttttcaacaccaaacattgtgcctatgatcagtagccccactgggagttacagagatggcgaagatgtaagtgtgaaccaagaagggggtggtattcaatttgatatatcattgaaccaagagtttgacagttttgcccacaactttggtcagacatacaatacagaggatagaccacaacatccacaccataatgctgcagatgtcattgttcttagtgattctgatgaagaaaatgacccgactgttcagccgccagctgtctatgaaaatactcctacaaatgatgacagttttcctttcgtcactgatgctgccggatctggatatcctgaaaggtaccaggaggatgctagtgttggtacaagtggtcttggtttattgaggcagaacactggtgaatttgaaataaataactggcaaatgctttcttacccacaaccagagcaagggtttcagttttttgtgactgatactgatgttggcaatccttttgttgctccacataattcctttactattgcaccagaagactactctcttggctgtaatgttggaatagaggacccctctgcagctcacgatgtttcaatttgccgaaacagtaatgatgtgcatggaagcttggttgataacccactggcattaacaggtgacgatccatctttgcaaatttttcttccaagtcaaccttccactgttccccttcagcaagaattgagtgagcgttctgatactccaaatggagtccaccctaacgattggaggatatcgcttacgcttgccgctggtggagggggcaatgaagagtctacaagtgttggcggtctaaaatcacaaccaaaagtttcatcgaaagagcttctgctcttggaagcatgaacaatgacagatgcactggatctaatctaaatcctaaaaggattgaaaatatattttctcatcctcgccaaccgcggtctgttaggcctcgtctgtgtttgtcattagatactgattcagagtagtttggacatcacactgggatagctgaatttgctattaatctggtaaagttggcttccagaatcttgatcgttactgtggagggctatctggttattctggttgatacaaagagatacaccagtgtggatgctttgttgcattaacctggtaagattcaagtgttctatatgatccaagtgggatctgcatagagttcatctaatggttggtacaggatattttctaactgggagtggtttaatgtggctagtggagcaggctgtacattgtccctgacatttactgggtataaaggaatagggggccatcacttggcacaagacaaatacatgtgttgtgtgtaccatcattgtatttagggtttgggtgctaatttagatgtttattaccctgacgtttgatggagaataaattattccttgaagtggtggtcaataaacagagagcccttcggttttgagtcggagctgctgaccgttcatctgttcttgttgcgaagtggtcgctcccgctttggttcagctgcagctttcatggcgggactgaccatgccaaagtcttgtgtagcagagggcaatctccatgatgtcatgcgatacaagtgatctgtattttgccctacaggatgacaagtttctttgtgcaacatgctgtattattggttcgatactctttactatgtgggttcagtgcaggtgcataggacataccggcagtctccggactttgctgtgatctgcctggagcagagcatctgccgcctatcgcacatgtaaacttgcaggtggtggtggattgtaccagctttatgaaccctggcgattgaaaggcgctgggattgagtactgggtacgaagaacgtcgtttctttcagaacatgaaagcacatcgtcggtgcacagatggtgaaatcatgctctgggcgcaaataatatatctgttgctcggctgaccatcctctgatgccagcttgatcggtagaagacaggttgttaaagtaattgtaggaatgtaacttttagggctagtttggaaacttaaaattcacttttagatttatgagaattgagtagaaagttagcttatttccctggagaggatttaagttttcagactagtccttagctataagacatcatgagaatatca

SEQ ID NO: 18086 - DNA, 1144 bp, Zea Mays
attcagcttgatggagcacaagaactcaagcaagatcaatgactaaggtgttgtctgaacagaaaccggactcaggcatctgacagatgggagaattcatggatcggagtacagttttggagcacatgatcacccatcgagtggagtttttgaggtggaaccaaagagctgcccagggttcatatacagatgtacggttttcataggccacacaactctgaattccttggaatttcgagaattcattcagaggatggcctcagaataccatggagatacctaccacctcatttccaagaactgtaaccactttacagatgatcttagcaccagattaacaggaaaatcaattcctggttgggtcaatcgacttgcaaggctaggcgccttttgcaattgccttctaccagaaggcttgcggcttgagtcaactgaaacaaagcatcttggagactgtcgtttctcagatggttccaataccaccagcaacgataactctgacgaagatgaattggaagataaacacctgcttccgactacttctgttggtgaagacacaattgtaaaagaaattcacagatgaatttctggtgaagccttgcagtgatttctctatgtattctaaaatgtaatgggtttcaatactcattgtgcagcttgtcgttcattatgtatattgtcattgtattttaaaatgtcatgtgctctttctgttgtgctctgaaattttgtgtacatttggtgggtagtctgtatttatggttgagttcatttcacttgttgaatgattgaataggtggatgaatgagagaataaaaattcttatgtagaagcactcttgacttgattttcaaattttaacccaaagacatcaaaagctctaaaaggggtcaaatcaagaatacttcaatcaaatgtcgtttggttgttccaaacaaattcttggggagattatgatctatcaggccaaaataaacttgatttggactttggaaagtacgaggaaaaaacaaacgggaggcacaagagtagagcggtggcgccactcaaatgttttggcattgttgggacgcgacagatctccccatccaggtaccaagtaaggcttgagtattttctctataattctgatctctaaagtggg

SEQ ID NO: 18087 - DNA, 1019 bp, Zea Mays
tcttactacaataactgcaccaatcataaacttcaataaattaaattgactattaagctagtcctctgcctcgagtatagagccaaaatatagtgccttcgtcaagatacatgtcttgagttttttttacatttaccaccttaaacacacttgaagacacaatttaagacaaccattgtacatgtcctaaccacataacgctggaccggttttacaccttgacagtctcgtcccgctggtcgtctatataaggttttgttcggttacatggaataaaatcttatcacggatttaatccggatctaaattgaatgaatccatacctcacactcaatcccataatgagattaaatccatcatttaatttatgttttgcatagtttaattttttttccaaaccattgggttataatccataatagatttaaccgaataaaaaagttagagtagccttagtttattttggaatatatattgtgacataaatttagtttcaaaccgtgttaatccagagttggattgtgtgtgtaaaagaacaagacctgcctggtgctcctgaacgctagtgacttttcagagctagctagcgcgcgatctctttcctccgcgcaaccgcaacgcgtcaacggcgccggccacgtcaacaccgtgtcgtcgtcaacaccgtgtcgtgtccatcgcacgagaaaatcaacctcggccggcgtttcaacagctcgaccgcgccgcgcgcttgtcctctcctcgtggatgccctgggcctggggaaaccgccgggcgggacgccgccgtgtgcgcgtgcagtggccgcgcgcagccatcgcgatgccgtgggcgtgtcccgcccggccaagccgagaagtcagcggcacgcacgggacgacgagacacgggagtgcgggttttccgtttgagaacgcgctcggaccacgaggaaacttggtgcgcgggcggggcggccttggacgggtggccatggccatgccggttgcccggcgcgcgcgcgcggcctgtggttg

SEQ ID NO: 18088 - DNA, 3038 bp, Zea Mays
cccccccccggttgtctctacctcctcacgacgcgaggaaccgatcaggtcactgccggacccgccggagatccgctcagcccgcgctattccgatccgaaacacctcgtcggatctccagggatctgacagaggaccagcgcgtcggctgctgacccggcggggcacgcgcgcacgccagccatggcgcgtggtggcggaggcgggtgctgcccgccgatggatctgatgcggtcggaggcgatgcagctggtgcaggtcatcatacccgctgagtctgcgcacctcacagtctcctatctcggcgacctcggcctcctccagttcaaaagaccttaatgcagagaagagcccgtttcaacgtacatatgctgcccagatcaaaaggtgtagtgaaatggctcgtaaattgaggttttttaaggagcagatgtcaaaagctgacataggtcctacacaactaaatgaaactcatctggattttgatgacttggagataaagcttggagaactggaagctgagctaactgaagtcaatgcaaacaatgaaaagttactgaggacctacaatgagctattagagtaccatactgttctccaaaaggctggtgattttttctattcagctcaaagaactgctgcatcacaacaaagggaattggaggcaaatcaatctggtcaaacttcactggagagccctctgttggaacaggagatgtcaactgatccatcaaaacaagtgaagcttggttcattgagtggccttgttccaaaggaaaaggcaatggctttcgaacggatcttattccgtgccacaaggggtaacattttccttaggcaggagcctgttgatgagcctgtcactgacccagtttctggggagaaggtaacgaagaatgcatttgttatattctactctggagagagggcaaaaaccaaaattctgaagatatgtgatgccttcaatgcgaaccgttacccattcccagaagatgttagcaaacaacttcatgctgttcaggaggtatctggaaagatctcagagttgaaggcaacaattgacatgggtttagctcatcgtgacagtatactaaaaaatattgcttctgattttgaacagtggaaccatctggtgaagaaggaaaaagcaatttatcacaccttgaacatgctgagcgttgatgttacgaagaaatgcctagttgctgagggctggagtccagtttttgcaagcattcagattcaagatgctcttcagcgtgctactgttaatagcaaatcccaagttggttcaatatttgaagttctcaacacaaaagaatctccaccaacatatttccagacaaataaatttacttcagcgttccaggaaattgttgatgcatatggtgtagccaaatatcaagaagcaaatcctggagtattcaccatcgtgactttcccttttctatttgccgtcatgtttggtgattggggccatgggatttgcttgttacttgcaacactttatctgataatacgggagaagaaactagcttcacagaaacttggagacataatggagatgatgtttggtgggcgttatgtaattatgatgatggcagttttttcaatctacacaggattaatatacaatgaatttttctctgttccatttgggctttttggtaaatctgcctatgcatgccgtgattcttcttgtagtgatgctactactgaaggactaattaaggtaagagatgcatacccttttggtgtggaccctgtttggcatggtagccgcagcgagctgccgtttctcaattcactgaagatgaagatgtccattcttcttggagttgcacaaatgaaccttgggattgtgatcagctacttcaatgcaaaattttttaggaacagtcttaatgtgtggtaccagttcattccccagctgatcttcttgaacagcttatttggttacctgtccttgcttattattattaagtggtgcacggggtcaaaagcagatctataccatgttatgatctacatgttccttagcccaacagatgagattggtgaaaaccagttgtttagtggccagaagacagtgcagcttgttctacttctgcttgctctggtgtctgtgccttggatgttgattccaaaacctcttctattgaagaagcaacatcagcaaaggcatcaaggtcaccagtacgcaatgcttcagggcgttgatgaatcagtgggagcagagctgggggaacatcatgaggaagcacatgaccatgaggagtttgagttcagcgaagtttttgttcaccagctgattcacacgatcgaatttgttcttggtgcagtctcaaacacagcttcgtaccttcgcctttgggctctgagtcttgcacactccgagttgtccactgtattctacgataaagtactactcatggcatgggggtttaacaatgtcatcatccttattattggcatcatcgtcttcatatttgccacggttggtgtcctgcttgttatggagaccctgagtgcattccttcacgcactgaggcttcactgggtggagttccagaacaagttctatgaaggtgatggttacaagttcgccccattctcctttgcgctgattcgtgaggaagaagattgagatcgtcccatgtagccgatgtacaatctttgatggcctttgttcccggaacaaatcattttttcatctgttgtctcggatggatcataaacctcagtcccctttgtttagacatgggacgaacagcaccatttttccttgtttagctatgcagaggatttttgggtcggttggcggcaaacatggggggtgatatcaccattgtatgatgctaataagtagttgccgattgggcggtgtgttggatataaataagcactgtattgaaggttaaacattccgctacgttcgttgtcaataaagagtgctatttacgctgctggcgttagtcatttcctggtctgttaagcattgccagtgcttcgttcgcctttatctcattgataccctc

SEQ ID NO: 18089 - DNA, 1803 bp, Zea Mays
tgttactcagaccatcaaaccaacttaggaagatttgcagcgttaccagcctcaatatattatatcagtaccactggtctacgaaactctgtacatttcaattcataggcagatttcatccagttctgctgctcgaaaaattattgctctttcacttatcaagataagtttcctatatatggaggcaaagaagatctatgagggaacagttttatcaaacaatcttgtcaaaccatcagtcatcgcctatatgatgaagtggctgtgggcaagattggttgctgcatttctttggcctttacataatctggcgaagattctagtatacaagaaaattcattcagcaatcgggatttcaaaggctggtattagtggcggtggaagtcttccgatgcatgttgataagttttttgaggccattggcattaaagtacaaaacggctatggccttactgagacttctcctgttgttgctgctagacgaccattctgtaatgttcttgggacagttggtcacccaataaagcatactgaaatcaagatttttgacattgagactggtgaggtccttccagatggttcaaaggggattgtgaaaattaaaggaccacaagtaatgaagggatactataagaacccatcggctacaaatgaagcttttgatcaagagggttggttcagcactggagatgtaggttggatagtacctcatcatgccatggggccaagtcgccagtgtggagggatgattgttcttgaagggcgtgcaaaggatacaatagtcctatctacaggtgaaaatgttgaacctgctgagatcgaggaagcagccagcaggagtaccttgattaatcagatagttgtgatcgggcaggatcaacggcgtcttggtgccataattgttcccaacaatgatgaagttctggcagaagcaaaaaggaagtccatccttggtgaggatggcgagctagcgaaagataaggtcatgaacatgctatatgatgaattgagaacctggacagcgcactgctccttccgtgtcgggccaattctggttgtcgacgaaccattcacgattgacaatggtctgatgacacccaccatgaaaataaggagggacaaagtgacagacaagtacaggagggagatcgaagccttgttcaagtgacacgcggagcgcgtgcgcacccatcagagttcccttttccgagtacaagacggcaaccgtacggcgtacatacagacacctgcaagctgcaatgcgtccatgtaccatgtatacgtacgtacttgcgtacggtcggaagatgactgggttggaactggaagagatgatatggcggagcggccggtgggagaacaccatgagacttgttactagactcgaatgttcgtaggttgcatgagcaaaatgacatgtgttccacaattgcatcattcaataagcgattcactgagccagataaggtcttgttcggttagttctcaatccatatatatggattgagtgagtttaaatcccaaacaagtcaaacttcttcttaatttttttcaatctcatccaatccatatgtaatgacaataaccgaacaaggcatgaatcaataaaattctcccaaaccaccgcaggtaccatgcaattggtaaaaatatcatgcttctatcttatagatatctgaaaccaactttacagttttcttaataccataagaatatttgtctgatagaaacatggaaaaaatacagacagctatgtacaactcttgttacattgaaatcatcgagacgttcgataagaggagg

SEQ ID NO: 18090 - DNA, 728 bp, Zea Mays
cccgccgcgaagccgcgcgctcgttccattccatccatcatccattccaaccctataaatccagccagccctcgccctttttcccgcagctaacgaccgagcccaaaaagaacaagacgcgatccaatcatcaccactcgcccagtcgccctagctagctagctaagaactccagcgccgatcgagagctacctagatctctctctctctctctctctctctctctctctctcgagcggggtcgggcaaataataaacggaacatctggccatggcgtggaagaggaagaacggcagcgccagcgggtcgcccgcacgcggggccggcgccggctacgaggaggcggagaaggtcccgagaggccacgtcccgatgctggtcgctggcggggacgacgacggcgatggcgaccaagctagcttgtagcattgtacgtacacacagataatcctagctagctgattggtttgttcttcaatatattggttgatttgatccattattacattcatttctgtatatatttgatgatagaagcaggttgacttataactgtaaaacgcaggcagcgcaacaccataaggcaggcctgcatggctgcatatatatattattatcgtctcgatctagcttcttgcttatcactagctcttcgtcggtagctccattagtccacatgtcaataaaggttttttagagctctaaacggtttcagatccatctgata

SEQ ID NO: 18091 - DNA, 723 bp, Zea Mays
ttctatgcaaatttagaagccaacggctcacctctgctggctgctgctactgcacatggatatcatgtgtgagtttcgtgctggtaagatgtctcatgagggaacacgagtggttccagacacgcgcaagggtcttgtccgcgttggtaggggtgaagagggattagtccattttcagtggcttgaccgtggacagaacatagttgaagatgatcaaatcatctttcctgatgaggcggtctttgagaaggtgacagaatctcctggagggtttacatcttgaagtttaagcaagacagcagaaaattcttcttctggatgcaggaaccaaatgctgatggggactcccagacttgcatgcaagttaatgcctacataaatcgatcattagatgctgaggctgatcttcgagtacctattgaagcagaaatgtctgaagatacggctgatgatgatatctcttccagagctgggaatctagttgagagcatgaccgctgatttggctggtgaagtgacgtctgctgctggacctgtacgcttggaggatctgcagagaattctgagtgcaatacagtcatcaggtgctgcagctgaccctgatgctggagtaggactaggagacatcttgaagcctgatctggtcttgccattaattgaggacttgcccattgaacaattggcatcacatcttccggagttcatggccgttgctcaattccag

SEQ ID NO: 18092 - DNA, 1214 bp, Zea Mays
catttagaagtggtcggctggtcgctaggagcctcatcacgaatcagcaccagttgatgggacatcagcggatgaagagagtgatagcaacatatttccttaccttcttgtaaatattggatcaggtgtcagcatgatagaggtaattggtaagggaaagtttgaaagaattataggatcccatctaggcggcggtactatccttggtcttgctaggcttttgactggttgttcaattacgaagaattcctggagttgagccagaggggcaataatctgtctgtcgatttgactgtgggggacatatatggggaagaaggttatccgaagattggccttccagcatccactactgcggctagctttggaaaagtgaactcaagcaaactttctgagtataaagtagaggatcttgctgcagccttactgaattctttcacatacaacattggacagatagcctactttgtggctaatctttcaggcctgaagagaattttcttccgaggtgcttatgtctgtggtcatgagaagactatggacaagatttctcgttccctaaaatattggtccaaaggtgaagttcagacgacatttctatgccatgaagggttcttgggaacactaggtgcattttggagttatgagaacatggggatcgacagtttggcggcacatgaagtcatcagggaagtcttgcttggtgcaccatacacagggcaattcccatctttacctgtcactcaacaacaggagaatggagaacatggtactctcgaaggggaagtagaaagcttacgacatgacaatgccttgctgaaggctgaggttgagcgattacaaaaggagaatgcgttgctaagagctaagttggtaagatcaggcgagacttcaacattgtgatttgtaacacaataaaaagggcgagccgcagcttgttgtaaattttatctgtttagaaaatggctcaaaatgtaactcatataggaaaactgaattctggaaaagaaatgccaattagcattgttcatctagtgagccttgttgtataattatttatatattctttatacaagagcctatgtatttgctccgttcatgtaatcttgttcctgtaaatgttgtataaatagttaccaaaatccagtaagtatccggctttgtaattttgtcgaaatagtagtgtatgtttccaagttccctttggaaaaaaa

SEQ ID NO: 18093 - DNA, 1740 bp, Zea Mays
tttcaacctcttctggtggttgcaatgttgtggataaaattaaatttgcaccaaaagttgggatatcaggagaggcctgaattctgttagcagaatcattaaggaccatggtattactggtgtttttggtcctgtattagaactggttgattgtgaagagaagttctttacagctgttgaggtcactgctgcaaatagcttgttccatgtggttgtcgagaatgatgacatatcaacaaagatcattcaaatattaactagagaaaaaggtggaagggtgacatttataccattgaacagagtgaaagttccagatctcagctgtccgcaaagtcctgattttgttccattgttgaaaaaattgaaatatcgatctgaccatcgtcgtgctttcgaacaggtttttggcaggacagtcatatgccgagatctggaaactgcgactaaagttgcacgtagcaatggtctagattgcatcacacttgatggtgatcaggtagggaaaaaaggtgctatgacaggaggcttctatgattctagacgctcaaaactaaagtttgtgaagataataagggataacaagacagcaattgatagaaagacgggtcatctagagagtgtcgtaaacaagctaaaagatatccttttttggtttaattataatttagttaccaaacagcagcaaatggatgctgaacgtgatcatgcgaagtcagagttggaacaatttaaggctgacattgccagggctatgaagcaaagggggtcacttgagaaagcccttgtcaagaaggaaaaatcacttaacaacatctgcaaccaaattgagcaagtccagtctagcattgcaatgaagaatgatgaaatgggcacagagcttattgatcagctaacttcagaagaaagagatctcctttcacgattgaatcctgaaattactgatttgaaggagagatttctaatgtgtaaaaacagtcggattgagatcgaagcacgaaaggaagaattggagaccaatttatcaacaaatcttatcaggcgtcagaaagagctagaagcgataatttcatctgcagattctagaaccttgcctttggaagctgaggcaaaggagcaagaactgaaaagttccaagagaaaccttgatgaactaacttcattattaaaggctaatgtcgatgccataaataatttcaccagaaagatggatgatctgaaaagaaaaagggatgatctgaaggctcgtgaagctattttagagcagactgtacaagatggtgccaaagacttagaacagttgatgaacagcaggaacacttatctagccaagcaagaagagtgcacgaagaagatccgagatttgggcttgttgcctgctgatgcttttgaagcgtacaagaggaaaaacaagaaacagctacataagatactctatgactgtaatgagcagttgaagcagtttagtcatgtgaaccaaaaggctcttgaccaatatgtgaacttcacagaacaacgcgaacaactgcagagaaggcgagctgaacttgatgccggtgatgtgaaaatcatggaactcatatcggttttagaccaaaggaaggatgaatccattgagcgcacatttaaaggggttgcaaggcacttccgtgaagtgttttctgagctggtgcaaggtggtcatggatatttggttatgatgaagaaaaaggccaatgttctgattgttctgttttattgcgg

SEQ ID NO: 18094 - DNA, 1373 bp, Zea Mays
ccactgctttgtgttattacccttacaacgtgattgatcatctggatctataaaaagtttgggataagatctgcagttttgaatgctgagttgccacaaaattcccgactacatattatagaggcattcaacgcaaggctatttgattatctaatagcaacggatgacactaaaacaaaggagaagcaaaccaatgaggaaaataaaaaagaggcaacattgtcccgcaaacggaagaagcaaaccaataaggaaaaccagaaagagcaaaaggtgtcccgcaaacatttgcaacagactttagatgctgaatttggagttgtcagaggaattgacttcaaaaatgtatttacagtagtcaattttgacatgcctctggatgctactgggtatgttcacagaattgggcgaacaggtagagcaaataagactggtgcatccatatcgcttgtttcaccaaaggaggatagtacttttaaagagattgagcatatgttgcaagatgtcgaaaagaaagatatggactgcatttcacctttcccattacttacgaaagatgctgttgaatctctacggtatagggctcaggatgttgcaaggagtgtgacaacacgtgatgtacaggaagcgcgtcgacaagacataaagaatgaaatcctcaattctgagaaattgaagtctcattttgaagagaatccaacggaccttgatttgctcaaacacgataagttgctatgcaacaaggaaattcctgcatacctgcgtgatgtccctgactacctaattgatccgaaaacaaaagaagccagcaatgctgtcaagctttccagggctgctatgcatatcgacaagccccaaaggcggaaaaggcaggggtttaagggaggatcagggaaaagcagagaccctctcaagacattctctgctgagggcaaacgagggagacggaggaaagaaagggagggagaaccagatagaagaaagaagagtaagaaggcgtgaagttgatttttcaagcagtttgctatcaagctcgcccaattttgtaggctttgtttgaagcaacttgacaaagtgctgtatcggtgacactcgtaggtcgtagctaaggagtatgtttttattgcctgatggcaactcttaatttttaaagtgtactcgcttccccccttttcctgtactgttaggaagcactaatgacgtgaaatttcattcaccaaatcaggggtatttaaagctaataatgttaagtccccccaggtggaacattcacacaaaactcgcccattccccgtggacctgtcccagatgaggccgcgcacaatgttccatttcttcacctatcaattttagatttactaaaaccatattca

SEQ ID NO: 18095 - DNA, 1786 bp, Zea Mays
aggagaaaggttgccatctcgtgtgtgtgtgtctgttggatggatctctgtgagccatgccctctttgtcttcttgcttttgctttcttggtcccttcccttctcttttctagcagagctctcgtggttcttggccttccgtgtgtctgccagcgctgccagctttcacataaacaagttggggaagcagttgaggttttctaattcttcttggaaggattgagatctccagttctgataatgggttcttttgggatgaactggaatcagaaggaccccatggtgtgggattgggaacatctagtaccgtctgtctcaaatgcagttacaaggcacggatctgctaattcatctggtggtactcttacttctaactcagagctagggcatggttcatccaagagctctatttcagcgtccattgattcaccctctggagtagggaacagcttagagttcaacttcgccgctgttgagaggcatgttaagaacacgggcacgaacggcagagtcgatgactcggggaattctccatcgtcaatgatagctttcaaccaaggagagccattaatcagcctgaaacttgggaagagggcttacttcgaaaacgcctgcggaggacaggatgccaaggtttctgcagcttcagacgttacttctgcagccagcgtggtcaagaagactaaggtgtctcagcagaatgcaaagaactggtactgtcaggttgaagggtgcaaagttgacctgtcttctgctaaagattacaatcgcaagcacaaggtctgtgtagtccattctaaagctaccaaggtggttgttgctggtctagagcgtcggttttgtcaacagtgtagccgttttcatggtttagcggagtttgatcagaacaaacgaagctgtcgtaggcgtctgatgcatcataatgcacggaggaggaaacctcaggcagacacaatttcattcaattcatcgacaatgttttatgatacaaggcagcggacaaatcttttctttagtcaaccactttatggccaagtgaggagcaatgcagggtcttcatgggataacttgggaggcttaaaattcatggagacgaaacatccgccagtgcatccaacaaaaacagcatcccctgatgaactgcatttctcagccctccagataactagtgctgcggctcacaccggacatcatcatgatctcgatgggttcatggcgttcaagggaaccagcacaaaggtccttaaccaaggcgtggaggcttgggcggccgcttccagctcgaacaacggaggcccagaaggtgggcgtgctctctctcttctgtcagacggctcgtggggctcgagttcagccgtcatccagcagcccacatctcacgcggacgccggtgcattgctgccgcccctcgccaccgttgccgtctccaacgccgccgccgccgccgggcatcctctggacccgtccccgggaaggttctggccgcaagacgatcatcccccgctcgtcgacggacccgccacgcagattccggagctggcgcacctccggatatggtgaaaggaaacgcatgtgatgcggtgactggtgacatgccagttcgagggcctggctgggaacacatctggttggttagcctgccgctctggcttgaatttgccggcgacgacagtctttgtttgtatcttttgatcagaacggacacagacatgtttgcacaatataatgtgacgagtccctctttggggttgaggagtgaggagatggagaacgataggaggcaaaa

SEQ ID NO: 18096 - DNA, 957 bp, Zea Mays
gcgaaggaccccaacgaccttttggtgatcatttgagattgatctacaggaaaggtcactacaaaagtagatgtgtatgcatacggtgtgatactaatggagatgattacgggaaggaaagtactcgatgactcattacccgaggatgaaacacatcttgtaacgatcttccggaaaaatatgcttgacagagagaagttcaggaagtttttggaccccgccctggagctcagtgctgaatcttggaacagcttgctggaggtggctgatcttgctcgccattgcacggcgcgggaaccacaccagcggccagacatgtgccactgtgtgaacaggctttctagcctagtggatcagtggaagccaacgaatgttattgatgacgacgaggagggtgggacaagcgagatgggtcttcaccaacagctagagagatggagatgcggtgatttcactatatcagattcggagtcattcagcacatacaacacatcaaggaagtaccattgacaattagtgagtcctttcctttgtcatatataaatgaggaaccatgatctggggcatcaagaggctctctacagctatgtagatcacgaacagctttgaagggcaacgtgccagcctgtcaggtattgtagttaccccactgaaaacaaggttggttacttgataatcagcatatacattaatggctgctaacctggtttaaacttgagggaagtcgtgatacttgaaacttgtgctgtatctagcttatccagtttgtatcactgcctcactgggggcattgagaaacagtttgttaagagggaaaagacacgaaagaaaccatacttccgaaagtgcattctggtggttagttttttaggccgcagagggttgctttttgtgtacaaccaaccttgatttattattacttactccctccgtaacaaaataaaattcgttttagct

SEQ ID NO: 18097 - DNA, 1101 bp, Zea Mays
actcgcagtcgcaccacttgcacacgggcggccaccgcacatcagcacttttacgagccctcctatctctcgatttctcgcgcagcggccctccccttctctcgccgccgccgccgcgtgttccgtcgtctcctctcaccgatggcttttgctaaggtcggtgctgcgacgcaattggagaacagaggcgcgctgtcgaaaaggttacgcaacgacgagaatgatgccagcacctcctgctcctggatatgaccgactacctctgttttacggaggaggtggtggcgctccatctccaatttcacttggatctggtagctatggtggtccatatccacaccttgggatgcgatatggttatggtccaccagtaggagctcctggttcatatggccttttctcgtcatatggtcaacctgggccaatgagtggtatgggatatggcccaggacctgagctaggccgatatagctatgggtttagaggttctccaatgccggtttctagcccatggtctggtggagcaatagctgaaaacaatgacaacattgcttcacgaaagcgccgtggaggccctgatggactttctgagggtgactggacctgtcccaaatgcgacaacattaacttttccttcagaaacacttgcaacatgaagaaatgtggagctccgaggccaactcctggagctaacacgagctcatctaggaaggacaataaggaagcccctgaaggaagctggacctgtccagagtgcaataacctgaactacccgtttcgttcggtgtgcaacaggaaaggatgctcgtacaacaagtcagccccgacgaataactgaacctaacctccgcacagcgcaccatattgttgagacgtgtcgtcgaactattcttgtatccttagattgtatcctagctagtcgtgtgtaatctttgaactgcacaaaaatgtgtgcctggagacgagcgaatatattcattacgtttaatttgttcgttatgtttaatttacttgctatactttctatgttcgaaattataagtcccgtcattgttcccaacacagtttaaaaatagaagattcatttttttcttgcgctaa

SEQ ID NO: 18098 - DNA, 1097 bp, Zea Mays
actgttttgaacctgtgacctggtgaattagaatctgtcttggcagaccatttctcatcatttggggatctttcgtccttgtcctggaagatactgaagcccataaccttgatgcaaccctaaaaccttcgctgagttgctcagcttgtgtgacttacacaacacgacaatcagctgagaaagcatttattggtggtaaatcttgcaaaggacacacactacgatttatgtggttgacagcatctcctggctcaaataaccattataggcatcagaatacctcagttcatgtgaggccctctactatccctggccatactcaaagcatatcatctgagtcccccagccctgttgggaaagtatcatctcttgctacatctgttatggtagccattcctcataataaatccatctcaactgtggaaaatacaaagacttctccagcgggagtttccaaagtttcatgtggtagctcctctctatcatcaaatgataagtgtccttctgaatgtggttccacaaggaatgttatctcagattctgacgttccacaatgaggcttaatgctatctggacgaggtggtgttatgaatcttgatttggtggctcggctatttcatagcgcggttaaggctgtaaaaagaaaaaaaagagaatgtttaaagaaatatgggttcaaaagcatactggaagtggaggctttctcggtaaccaccgtctaatcatctcattgttcacggagactgagtggtgtaggttatttgtacacttcattttgggggcgcatcgtgctgaaagcagttggtaatatgctaattctgtagtttgtagctcctgctgaaatcagctttgtggattatgttgtgagcacgatgaacatcaaactctcgcaagtcccatcgaggcatcttgtcgaaaaacttctgctgtgcatactgaactaaattttgtgccggtgtatcatctgtcgactatcgtgttggtctatttagtatcccttgtgatcgtttaccttactgtgattctgatttccttttcatatatgtatgtgtatatctttatgttctccccacactcctgaataaaaaaataaagaa

SEQ ID NO: 18099 - DNA, 814 bp, Zea Mays
ccggcgcctgcggcctgcggcctgcggcctgcgctgtactcgcgttcggtgcgtggccggtggcgacgatgtggcgggacgagagggaggtcgtcgtgcggggccccgcgtgcagctcgtccgcggtcaccggctggttctcccaggacctgagcgacggcaccgcggctgctgcctctaccacctccaccgcgagggcgaggccttctggcgaggtggacgtccacggcttcgccttcaacagctccgtgctctgggaccccgagcgctggggccgctacccgacctccgagcccgacaagtcccaggactccacgaagttcgtccagcaagtggttctggaagatcttagcaaggtgaagggcattccttccgattgttcagaggtcatggtatggcacgtcgatacggccgcgccttctccctcgtctccgcagaacaagaggagatagagagctgaacaccatagaagagaacggacgagcctggaggacggccggagtggtgtacactgtacatgcatggctacaccactgagatgctgattgtcctcctagctagttgcaaagaaggaaaatttttggttttctcaccggaggatggatccacctctgaccccccccccccccccccctccatcataatgtgcgattttctgctattcttttttttccttaaaaatgtgatatatgtatattttcccttttctttttactcaagtgggtttaggtgaatacaaacataataaccccttgaagtgtttctcaaggatgtaatggatagatggcaagctaaaaaagatcaacttaacaat

SEQ ID NO: 18100 - DNA, 3265 bp, Zea Mays
tcgcgacgtcggacgaaaactgctgatatgggagaagaagcgacacttctttcttggaagcatggcggatgggggtattgtggtagccatttgccaatatggtggagaattcacttctggccccaatggtaatttgacatacaaaggaggcgaggcgcatgctgttgatgttactcgtgacatgccactggagaacttcaaggatgaggtgtccaaggtgttccatgttgacgtcactgacatgtcattgaagtacttccttccgaataattacagaacgctaatcacaatatcatgtgatcgagatttacaaaggatggttgattttactaccagtgccacacaagtggaagttttcttgattagtagagtagaaaacaggagtattgttacttactctggagcttctgcaagtaagcctggatctaatgctcctggtgataaaaggaaaaggccaccttccaaaaacaaggtatccaaaagtaacaagaagactccaactcccagtgctcctggcacttcagtccaacctagtgctaataatgtgaaacagccaagaccaatagctattgaaaccaacgacaacagggtattccaactggaatttggaagtgatgttgcctttgccaccccagctggaggtgcttctactgcgccagacattctggatcagcaaaaccttgctcttgttgacactgcacatcgggaaccaattggccatttcgatgattcaggtgactcgtatgttggttctgagatcactgtagatcctcagcatggactcgacaatcctgttatgttttgggatgacattattaaaggtgttggtcaagaatttgataatgtgaaggatttccgtgctcaattgtgcaaatatgccattgggaaaggatttgcgtaccggttcattaaaaatgaaactactcgtgtcacggtaaaatgtgttgcagagggctgcacatggcgaatgcatgcatccgagtcatctcgtaacaagaaatttgtgatcaagaaaatgacagatgagcatacatgtggaggaggaaatggagaaggtcagcgtcgagcgacaagacaatggctgaccactgttattaaggagaagctgcatgataatccgatgttgaagccaaaggaccttgtcaaggaaatatatgaacaatatggagttacactgacttattcacaggtctggcgaggtaaagaagtagcacagaaggaactgtatcatgctatcagggagacttacagccatttgccctggtattgtgagaggcttacagagtccaacccagggagtattgctttgttatctccaatggtggatacaaagttccgtcgcttttttgttgcatttcatgcttctttgcatggttttgcaaatgggtgcaggcccctattgtttcttgacaaggttccactgaaagcaacaaatgagtacaagttgctggtggccgctgcagtcgatgctgacgatgctgtctttccagtggcatttagcgtcgtcgaggatgaaaactatgaaagttgggtttggttcttaatgcagctgaaattccctgtccaaaatcacagctacgcttacaatgccatgacattcttgtccagtggacagaagggtctggatgctgccgtttctcaagtttttgaagatagccatcatgccttctgtttgcatcatatcatggaggaattcaaaggagagctgagaaagggaccatggtcacaacaaataagagaggggatgattgaggattttactcgcgccgctcaagcatgtagtattgaggattttaacacgtcaatcgagagcattaggaacatatccactgaagctgctgagtggatcatagcaagcaagcctgagcattggtccgacgccattttcagaggctgtcgatacgaccatttctcctcaaacattgttgatgccttcaataactggataccaaccaagaaggagggttcaattgtgctgatggttgactcactgagaacaaaaataatggagataatagaaacaaggcgtgaggcttgcaaggcgtggtcaggacctttgacgccttccatggaattcaaagcacaggaggaggtgacgaaggctggtaaaatgactgttctgtgctcttccgaaaccgtgtttgaagtgcgaggcaatgcgatctttgtcgttaatctcgcaaattgggaatgcacctgccggaggtggcagctttctggcctcccgtgcctgcatgctgtcgctgtgttcaaccggatcgggcgatctttctacgactactgctccaagtttttcagaatagagagctaccatatgacttactcaggaacgatcttcccaatacctgatatggacactgttgattttagtgccggtgcaaatctaatcccgcctcccaagccacggacgtcggataaaccaagaaggaagcggtttaaccccaacaagatccccacggtaatacggctctgcagcaggtgcaagcaagcaggccacaacaaggcaacctgtgaagctattttgtagacaaaaaagtagctgctgcatctggggtttgtattttatagcagcgtaaaggatctcaagtttttgctggagcgctatggctggtgctgcctgctttctgcagcttcttatctggaaaggggaaattgggtatcaggcatacatatgattccctgtgtttatgtgggagccgtagcttaaatcttttgtggagtgggtggatgaacccaagtgttagggatctgtctgctagtacagcatagattgttaccagttcgacaactctaggtagtccgtagtcttatcgtctagatgaaaccattagctgtttattctcatgtagatcgatcttcgcacgtgccatggtggttgctttcgtaatactatctccgttctcaaatatttatcgtccgttagtttatttttaaactaaaacatgacaaaataaaaaaaaacggagggagtatcgttttgtacaactttctttgtgtgcgctcctctcaactcttaggtagaggctgccagtcaaaggtgcaaatagtatggctagctattttgccaaacggaccgaactcgtaactccgaagagaggaggctccagcgattcggtcggtattcttgatccaggtgttcagggtataataattaaaaagaaccacatcagcctaatctgcaaccttgagatctaaccgtatagtgttcgttcttgcaatgaaggctaagcaatttttatttgatatccaagaacatcattattca

SEQ ID NO: 18101 - DNA, 2353 bp, Zea Mays
ttctcggaggacgagggcgcgacggcacgcggcgaaaacgacgcggccgcgtcgccaaaaccgtcgcctcgcttcctccctcccatgacgggctcgaaacccgcgcccgccgcctcgcagaaccctagcgcggtcccgcatcgtcgtcctcctcctcctcctcctcctcctcctccgccgccggtgacagcggttgcgagggtgcgcgaagaaggcgagctctcctccggcgccgacgacgacgagactctgcaaactcagctaggtgccgcatccattcttgggaagtttgtggaggctggatctcaagtgccatcggcaagtctcctcggtaaaggcagtaacaccttgattgtctcaaatgctctgaatcataaagcgtctgctccaagttacaagaagatcatgagggtgaatcaggggcaattcaaacctggcactaaccggaatctttcatggcagaagcctgtgtcaagtgataaccttctgataactttctcagatgatgatagtggggcagactctgggaagacagggcgagataaagttaggaaggctagctctcaaggtacacagagaacagggaacagtatgcaaactaggatcatgagagaggaagtatctcagcagaaaaaccttggttcaaaagtaggtcctgcacacttgcctgcttttccattcacacatagaaatgttggggccggcagggcatcaggtaatacctttttcaggaaagagctgcctgtccgccaagttaatcctctaaagtctaaacagaaagttcaaaatggggtaggagtacattctgaagatcataggttagaaatcttgcgccataagatagctgctaaagaaaatgaactaaaaggtcaaaaaagacctttgtccgctgttgctacaaagaatgcagatttttcttccaatcagccaaggctgccatctgaaaagataaggcttgaagcttccagcattggtgaatattcacgctttaatagtctgtctgaacatagtggaggaccaaataaaaggttgaagctcaatcagcagtacaaccaattttgtagtgacctgacaccattggcacctattggttctatatcaggaaaaaccaatgtgcaatcttcagaagtgacaaatcggtctgaaaatggaattactatgaaccttaatgttaatgaaacagatacaacagacacaacagaacttgcagatcaaatacaacaaggtggggcaactaagagcctacgtcaccacaaagattcaggaggtgctgagaaccatgttatgcttgagtcacatgatgggcttgcagcacaaccaccatttactgacacacaaactataccagaagatacaagtgcgttggcccctgtgacgtcagcccaagctaggcaacaggtactggctgttggtacttcacctgtgttagacggaacaccacaattgcaacctggaaaggagaatgacgaatgtttgaacagcagtggccagataggcgtagagacacagaacacaatattgttctctctacttgagatggaagaattacaagacaaggaattggaggatgctcaggagcatagacaaaaatgtgaagctgaagaaagagaagctcttagagcttatcgcaaagcacaaagagctttacttgaggcaaatgaaagatgtgcaattcttcgtagaaaaagggagatttgctcttcacaagtccatggtttaattgcagagaattcttctttggtgcagtctttgagtattcggaatcctgaagatggccttgcaatgccatcactgctcaattctcagattcatgcagttagtcagattcctgaaaatcagggtggtagacacaggctgtgtcctgaagaaccttctcagcagcaaattgataagcatgaagatgaagcacgtccacactattgtgataagcttgctgccagcacagctgatcccagctctgtgagtgctgtcaatgctgacagcatcctttcagattatatggaggatgatcttctgttcccgactagacaggcaagatcagaatgtgctctggatgttgagaatcaaatggaagaaactatacatgtatatgcagaggaaaacagacaagtttctggtgacggtggtgaggattatgaacttttagaagcttctttgaggtctagattggtggaaaggtttgggaagaaatcatgtttgaatggcaccattgatgaaggtactgaaggacttgctgttgggaaagtagctgcagaacatggcaagcagtctgcatatgttggacatcagttacaggaagcagagcagaatattatgacaactactcttgaagcaatactttattttgttgtgc

SEQ ID NO: 18102 - DNA, 2698 bp, Zea Mays
actggattgctgctatggcctacaggaagtggtgccactgtggctgcagtagtctgtgcggctgtggccgggcaatggagtgttgcggaattggacaaattatacagtatagcattaaatggttcagaagaagaaaaaacagctgctgcaaagattctttgtggtgcatcacttgttcgtggctggaacattcaggaacatgtggtcggtatggtggtcaagctattatcagcttctttaccctcagattctgcaacttcaactcctgggagcatgagcaactaccttgctcatatgtctacattaaacgaaatcttactcggtgtgtcttatggtgatgccatccacattctttcattgttccagatgttgctgtggcgttaatgccaatatgtgaggcttttgggtcaataccaccgccacctaatcacaagtctaccattcttggtgaaatatctgtttatacagtcttctcttgtgcattcctttgtcttcttcgtttgtggaagttttatagacctcctcaagagtattgtcttgctggtcgtggaggctcagtaaagctggaactgactctggactatctgttgttgatgcacaataatcacattgagttctcaaattcatctgcctctaatagggattcttgcaatgatatgggctcagtaaatgaggttcctgctcagctgatttatattgattcttttcccaagctaagggcttggtatttccagaatcaagcttgcattgcttctccactttctggtctttgcaacaaaaaccctgttcatcaagttgcgaacaaaattttgaatatgatttgccgaaaaatgaataaaggtgtggtatcgtcaagtactctttcatccacttctagtagtagtgtcagtggttcctctgtaagtgcatcagatgatccttgccaaaggcctgctgtttctggttgggaatttttagaagctgttccttttgttcttgaagctgttctgacagcatgtgctcatgggcagctttccagccgagacttgactacaagcttaagggatcttgtggactttttgcctgcttctcttgctgcaattgtgagctacttctcagcagaaattacacgaggaatctggaaacctgtcccaatgaatggaattgaatggcctagtcccggtgcttctcttcattccattgaagctgaagtaaaggaaattcttgcctctgctggtgttcagattaacagctgctatccaccttgacgattacatttaagctagataggagtttggagtacattcaaggggtcattggacaggcgctagagaactgtgcaggggggagttcctggccaagcatgcccattattggggcattgtggacacagaaagtgcgaagatggcatgacttcatcgtcctctcttgtatgcgttctccattcggcagagacaaagatgcagttgcgcagctcatccaaagttgcttctcgtcctttctgcagtcttcatccagtggttctgatataattgcaaaccgtggagttggggctttactaggggactcaatcacgaatcaaggtcttaggctcccaatggcacctggtttcatctacttgagaacatgtcgaactttccatgacacttactttgttagtgaagtgatccttaagcaagtgattgagtgggctcacaaacttgcaaacggatggtgtttcaatggtcctccgcagttgaaatcagggcggacaccactatcttgtgcagcatccatggtgcagcaggtcgcgttgcttggtggaggtctcctatgcatagcaggtggaccacttgtggtccaggtgttgtatgaggaaacactgccaacactgctgctatcagccagagatcagagtttgaaaggccctgggccagtttctagcacactccaaggttacgccatggccaacatgctcttctactgtggtagcctgctttggggagcggataggacttctcctgtcatgaaattgtccttcctctcgaggcggccacgggtggtgagaacccacatggatttcatagctggtgtgttggacggacacattcttctgggctgtgacccgggtacgtggaaagcgtatgtgtcgcaatttatgttcctggtggtgaaatttgttccgtcatggttgcgggacataaagctggacacgctaaagaagatagcagctggacttcggagctggcacgaacacgaccttgctctgtctcttcttgaacgaggaggaccacaagcaatctctgttgtagtcgagacctttctgtaatccttccgtttggacattttgcccccacctgacatagcagccgccgttaagggtttgtagttggtgatctgaggtctagctgaagtaatccggatgacccttttgatccagaattacacttgtgctacccgggtaactgatgtttatctcatgtatggcgagctcatcggggttttcgtgaatccaatacggaagaacatgcaacctactagggtgtacttcagccctaacatgtataacatgtgggaagttcatgcaacctactagagtgaactttctgtatattttgttgcaatgcatcgtgtttcctatctgcggtaaaaggagagaaaataattcccgcgtttttgtccgtcaacttgttaaccgcactttgctcttctgggttcgcatctcactcttatcgtccac

SEQ ID NO: 18103 - DNA, 2932 bp, Zea Mays
ctgggagccacaagtctgcagatttgccggccggggagggacctgcagccctgcacggccgcacgcgcgccacacatatggacggttcctgatgcgtcggcattcattctgccgccgccgtgcgtctacctctctgtcgtctcgtctctgcgcgcacccggcctgcttgcctccaacacctatatatacgtgcggcgcgcgcgcttcacaacaccacagcacaggttacaacaagtagcttgcacttgactacgtcgatcgtaggcggcgacgaccacgacgacaatggcgcggtgctctacgtgcgatcgtttctcgaggttcatggagacgacggacgagttcgcggtgccgccacgtcccgcgctcgtgcacccggacgccgacggcgttcgaaccccgtcggccctcggcccgctctcccccgaggacccgccacccgcgttcatggagcgagattggcgacacggcggcgataacacggccgcgtatccagggtgctcgccgttccagccgtccgcggccgggcgcccggtctcgatcagcctgccggcgtcgccgacaggcgggttcgacatctccagcaggacggaggcggagctgcagcgggatgccgccgccgtcacggacgcgccgccgccgaggatgatgatgctgccgccgttcgccccggcgccggccatggctctcgagcagcctggcaaggtggtgttccggtcccagccgatccccgctgcgccgccggtaggtgacgggggccacgacgacgagttcggccgcagcgcgccggcggccatggccctcgagcagcctggcaaggtggtgttccggtcccagccgatcatccccggtgcgcctccggagggcgacggcgccgcccggggccacgacgacttcggccggagcgcgccggcggccaagacgcgcagggacagccgggacaccagctacgactcgttcaagacgtggtcgggcaagctggagaagcagatcgccacgcacctgctcggcagcagcctgcagcagcaaccggagcacggggaggagccggaggaagacgacgcggcgagcgaccgccgcaactcctccatgcccaaagtgcagcgcttcttcgccgcgctggaaggccccgagctcgacaagctgaggtcctcggaggagctgatcctgccgtccgacaagacgtggccgttcctgctccgtttcccggtgtcggcgttcggcatgtgcctgggcatgagcagccaggcgatcctgtggaagcggatcgccatctcggcgtcgacgcggttcctgcacatcacggtgaagatcaacctggtgctgtggtgcgcctcggtggcgctgatggcggccgtgtcggcgctgtacggctgcaagctggtgttgtacttcgaggcggtgcggcgggagtactaccacccgatccgcgtgaacttcttcttcgcgccgtggatcgcgtgcctgttcctggcgatcggcgtgccggacgtggtggcggccacgctcccgcactggctgtggtacgtgctgatggcgccgatcgtgtgcctggagctgaagatctacgggcagtggatctcgggcgggcagcggcggctgtcccgcgtggcgaacccgtcgaaccacctgtccatcgtgggcaacttcgtgggcgcgctgctgggcggcatcatggggctgaaggagggtcccatgttcttcttctccgtggggctggcgcactacatggtgctgttcgtgacgctgtaccagcggctgccgacgagcgagacgctgccccgcgacctgcacccggtgttcttcctgttcgtggcggcgcccagcgtggcgtgcctggcgtgggcgcgcatcaccggcgagttcggctacggctcccgcgtcgcctacttcatcgccatgttcctgtacgcgtcgctggccgtgcgcatcaacctgttcagagggttcagcttctcgctggcgtggtgggcctacacgttccccatgaccagcgcggcgatcgcctccatccgctactcgtccgaggtgaagaacgccttcacgcagtgcatgtgcatcgggctggccgcggcggccacgctggccgtggcggcgctcttcctcgccacgctgctgcacgcggtggtgtaccgggacctcttccccaacgacatctccatcgccatcacggagcgccggcgcagcaagcccctcgtcggggaaaagatgctgctccgcctgcgcagcggcaagaaggtgcagcaggcgctctccaccgcccccgccgacgccgccgcggacctggaggccgcgcgcgccgccacgacgacgtcgtacacgtagacggggggtgacggatgaaccgggcgggggattgatagctccagcgtttgcttggtgcagttattgttcgtattatattggctgggctgccgtatggggcaggcagctcgtgcgctctcggcagccggcactcaaatcggcaggaggcaaaacaagatacgtggctggattctggatgatacgaatacgattgcaaggtccatctacggggtgaccatatacgtacgtacgtacagatacatatgcgagagttgtttatactgcagggttccttttctcatgaaaagaaaaaaaacatcagacgtgaactacagtgagaatgtatgcatattacgtagagaaatgacatctacaaagataaatgctctggctcttgttatcccgttgtttggcaacgcgtggaactggaacgcaatttgtgctcaatttggcccattacctcttctaagtaatccattgcaggtttctcggctgctgggccgacagtgttttttttttctgttagtcaaaccactgcgctgtggtgggcttggtggtcttggccccatacctatttcgttctctttttgttaaacatagatgacaccacagacagatgagaaacgaa

SEQ ID NO: 18104 - DNA, 1982 bp, Zea Mays
tttcatgttaatatcatactttttaggaatatataggaacaatggttacttgatggtttcgtgcaatggtgggcttaaccaaatgcgagctgcaatatgtgacatggttgtaattgcaagatatttgaatgtgactttagtcgtgccagagttggataaaacttcattttggaacgatccaagtgagttccaagatatatttgatgttgagcactttataacctcattacgaggtgaagttcgcattctgagagaattacctccaagggtaaagagaagagttgaacttggaatgtttcactccatgcctccaattagttggtctgatatctcctactatcaaaatcagattcttcctttgattcgtaagtacaaggttctccatttgaatagaactgatgctaggctagcaaacaatggtttaccaatagaaattcagaaacttcgatgccgagtaaattatgcctccctcaaatttaccccacaaattgaagagttgggcaagagagtaattagaattcttcgccaaaatggacctttcttggtacttcatttacggtatgaaatggatatgttggctttctctggctgtacacaaggttgcagtactgaagaggcagaagaactcacaagaatgaggtatgcttatccatggtggaaagaaaaagtgattgactcagacttgaaaagaaaagatggcctttgcccattgacgcctgaggagactgctcttgtcctcagagcacttgacatcgatagaagtatgcaaatatacattgctgctggggaaatatacggtggaaagcgcaggatggcttctctaacttcagcatacccgaatgttgtgaggaaggagacacttctggaaccttctgatctgatgttcttccagaaccattcatcacaaatggcagcacttgattacttagtatccttagaaagtgatatatttgttccaacatatgatggaaacatggctaaagtcgttgagggtcatcggagattcatgggttacaagaagaccgtcttgttagaccgaaaactcattgttgagctagtggaccggtacacaaatggttctctgctgtgggatgagttctcttcactgatcaaggttgcccatgcaaagcggatgggatcagcttcaaagaggatggtgattcctgacagacccaaggaagaggactatttctatgccaatccccaagaatgcctccaggatcgtgattttttgcaaacatcataatatcctttcatgtctatataccatgttcacattataccattcttctgcaaacaacacaactgaacccaaaagcaatattttggagccagaaaggcgactcggcttctgtcgagtcatagatgaggccgatctgtaaacttgagggagggagggagggaaggagaaaggctgaaagggggtgggtgggggtggatttagttggtaaatacacattatagaatggagggggatttgttcattccaaaataaaaaaaagagagatgggcttgtatagatggtgatagaattaccgctaagaagaatgtaacttagatgcagctgggtctgggttcctgcatctggtcttgcgttgtgtaacatagcagttgttcttggacagccgcccccattgtccccaccggcgaaattttggcaaccatgtagaaagatgtatacactttttattgtatcgatacaacctgtattatatatgtaaattgtgcagaatgtttgtaccacttgcacattttataatgtggttagtacattgaattccttcacggagggtgcttgttgacatctgagttcgtgatctacgggccaaagcattggtgaaagtgtttctgtcggtactgatgatttcttcatgtgggctgggcaaaaacaacgcagagcgttttatcagtttgcatgtgtccgttggcattgtgccaatgccaacgtacttttatttcaccattggcagctttgtcagctg

SEQ ID NO: 18105 - DNA, 1634 bp, Zea Mays
tttacactgggtgcacgtgagattgtttctaatcagaaagtgcaagactccggtggctcatctcctcacaaccagtcaagttccaagcttggtactccaggtccagatttctggtcatggttacctccagtacaagatagcagtaaacaaaaggaaagcaatactggtttgaagccatccaaaaaattagataccttttccagtcagcctgatctgttgatggaaaaggaacgcttggcggattctttaccactccctttcgagacagctttcttcaagaaggaagatcgatctcttcctcccttccaatcatttgctgagcctgagaatgtggattcctcggccgatctggccgctgacaaagaggacacgttcgaagaacagttctcgaaaaatgcagccgaggtggctcgcgcgctcagtgagagcgtcgggaaaccatcacacggaatacatctagatggctcaatgtggtggaaggaagtaggtgtagaacgaagacctgatggtgttgtttgcaagtggaccgtgatcaggggagttagtgctgatggcgctgttgaatgggaagacaaatactgggaggcctcagaccggttcgatcataaagagttaggctcggagaagtctgggcgtgatgctgcgggcaacgtttggcgggaatactggaaggagtcaatgtggcaggattacacatgtggggttatgcatatggagaagaatgcagacaagtggggacagaacggtaaaggggagcagtggcaagagcaatggtttgagcactatgactcgaccggcaaaaccgaaaaatgggctgataaatggtgcagcttggatccaaacacaccgctggatgtcggccatgcccatgtctggcatgaaagatggggcgagaagtacgacggccttggtggcagcgaaaagtacaccgacaagtgggccgagcgttcggagggcgacgggtggtctaaatggggcgacaagtgggacgagcacttcgacctgaatgggcatggcgtcaagcagggggagacatggtgggcgggcaagcatggggaccggtggaaccgcacctggggtgagcggcacaacgggtctgggtgggtgcacaagtacgggcgcagcagcagtggcgagcactgggacacgcacgccccgcaggacacgtggtacgagcggttcccacactttgggttctaccactgctttgagaactcgccgcaactccggtccgtgaagaggcagccgccgccaccacgaaaatgaagcctgaagagatcatgctggcatcagcagcatgtgctgttgtgaactgaatgttcagactgatatgaatagaaaggcctgtagaagttttgccgtatattctgaaacaccttttttcttttagcctagaaagattatgctggtaagcttttgcccaaagtctaatgcacgcagttactgcgacttcttctgtgatgttttttttttggtgtcagttacctcctgatttcccaaacactcagactagcactgctgggattgggaatgtatctggccagtcatgagactgagatttcccaaagtttgtatgccacagtgctattctatggtctagcagcaggttggagttctgcttaaatgaagcagca

SEQ ID NO: 18106 - DNA, 988 bp, Zea Mays
agacaccaccaccaccggtcaccgaaacgcagcaactgacaggcacctgacggagagctagtcgctctgcagccgagtcgagtcgaactagcgcgcgagcgagcgaggaagaagaagagctagctatactgctgcttcctcgcgcgcagcagcagcagcaaacgaagaaaccagccccatgggcggcagcgcggatgcgaacggcgcggggtcggtgcgggtgccggtgccgccggcgcggccgttcctggacacgttccgcgggaacctcaaggagaccttcttcccggacgacccgttccgcggggtggtgcgggagcgcggggccgggcggcggaccgtggccgcgctgcgctacttcttcccgttcctcgagtgggcgccggcctacgcgctgtccaccttcaagtccgacctgatcgccggcatcaccatcgccagcctcgccatcccgcagggcatcagctacgccaagctcgccaacctgccgcccgtgctcggactctactcgagcttcgtgccgccgctggtgtacgcgctgatggggagctccaaggacctggcggtggggacggtggcggtggcgtcgctgctcatcagctccatgctcggcagcgaggtgtcgccgacggagaaccccgtgctctacctgcacctcgccttcaccgccaccttcttcgccggcgtcttccaggcctcgctcggcctcctcaggttgggcttcatcgtggacctgctgtcgcacgcgacgatcgtggggttcatggccggcgcggcgacggtggtgtgcctgcagcagctgaagggcatgctgggcctcgtccacttcaccacctccaccgacgtcgtctccgtcatggaatccgtcttcagccagacacaccagtggcggtgggagagcgtcctgctcggctgcggcttcctcttcttcctcctcgtcacccgcttcatcggctagagcctagtgaatccgtgactgctagagata

SEQ ID NO: 18107 - DNA, 696 bp, Zea Mays
agccacctcatcaccttgcttcgtctccacggtgatctgcctaacagagaagctgcaaggcaaggagacatccctgtcggcaaccatcgctgcccaagaggtcgaccagccaaacgaacacaccacaggcactgagaaattgctggcgcagcagctcaaggacgacctgcacagcagctgcggttgcactggacatggtgccctgtcttcggaggaagaggatggtggcgtggtcagcgatgagggctgcaactttgatctccccgacgccatgtttgctgttggggtcaccaaccatggtgctgaggaggcgcagctggccaactggacatcttggttctggaactgatcggttgatggatggatgcatcaagtgcaaagagcaaatcctctcctggtttcgactcttttctgcaacatataattactgtgttgattatgtgccgtcagatgttttcaagtaatgaaacagaactgatgttgtaagtttatgtttctgaagatttgtatgttcatatatataataatatgctttgaacatgagactccaaaagttgaaataagtggatgtggagacctgttgtgcactagcagccagcatgcgtttttatgctgctttagacatgaaaatgtatatccaacacaggcctgtgaataagatgatgaaagtatatccaatcgctgcacttcatttgg

SEQ ID NO: 18108 - DNA, 1330 bp, Zea Mays
ccatttgctcatcttttgttcagtttggtgcctttgctaagatatcgatacattgctgtgggcaatgagcctttcctgacaagctaccagggtcaattccaatcatatatcattccggcgatgacaaatattcagcaatcactggtgaaagctaatcttgctagctatgtaaagctagtagttccctgcaatgctgatgcttatcagagtgcttctgttccatctcaaggagtattcaggactgaattgactcagctaatgacccagctggctgcttttctgagttctagtggggctccatttgtcgtcaatatctatccattcctcagtctttatcaaaattcagatttcccacaagattatgcgttctttgaaggatctactcacccagtagtagatggtccgaacgtgtactacgatgcatttgatgggaactttgacacattagtttctgctctcagtaaaattggctacgggaacctaccaattgcaattggtgagattggttggcctactgagggagcaccaagtgcaaacttaactgcagcaagggcattcaatcaagggcttatcaatcgtattacaagcaacaagggaactccactccgacctggtgtgccaccagctgatgtatatcttttcagccttctcgatgaagaggggaagagcatactaccaggaaactttgagcggcactggggaatcttctccttcgatggacaagccaaataccccctgaatcttgggctgggaaattcagtactgaagaatgccaaagaggttccgtaccttccatcacgttggtgtgtcgcaaaccctgctcgggatcttgacagtgtttcagatcacatgaagcttgcgtgcagcatggcggattgtaccactctgtactacggaggttcatgctatggcatcggggagaagggcaatgtttcatatgctttcaacagctactatcagcagcagaagcaggacccaaagagttgtgattttggtgggcttgggatgataacataccttgacccatctatgggcgaatgccgctttcttgttggtgttgatgatagcaagagctctgcagtcgcctcttgtggcggtggatgctgcggggtctgctgtggactctgggttttagctttgtgggtgctcacgtaccttagaatgatgggttccgcttgattctcaaattgatatacctttgtgccaatgtttagaaagattgtacaattgacttctaggtctaggaaggaatggactgcactgtcgccacatgagattaggaaaccaggatttatatatataatttaatttattgttgaaaattatgccc

SEQ ID NO: 18109 - DNA, 1800 bp, Zea Mays
gtatagaaaacggagctgataggaacgagattttttacatccattttcatccctagctgtggtcccacaggtcgcaccattctcccctcttcttccgccgatacacacgccctgcacgggggctcgccgaggcttcagtttactactgaagcacgcaccgcagcgtctccaccttctgctcaacctccgcttccgtaggtgccggcgctaagcgaggatccctccgttcatcggtcccgacggcacctcgactcgtttcgtcggtcgctggtaaggaagccctaactattttcttcctcggattgactgcttcctttttcgagttgagatcagttcagttggagagattatctatttctatgcttgtgtgccctcgaatccaaatcttcctttcgtggtgcggatgcgtgaacggtcctccaatccaatccccttcgagtggcgacgggtgattgactgcgatatgaggcaatggttatgttgtaactgccactttgatgacgaggaagatggccatgacaaggaacaggccaaagctcagagcaataagatagaccccaagcagaagtcttcaaaacctcctgttagtcaacctgagccagagttctcccctccaacaattgatgttcctgaattgtcattggatgatttgaaacaaaagactgatgattttggatcaagtgctctgattggtgaaggttcttatggacgagtatatcatgccgctttagatgatgggaggcaagccgcagttaaaaaacttgatgcatctgaaaatgagcctaatgatgagttcctcaaacaggtctcactggcatcaaagctaaaacatgaaaatcttgttgagatgttgggttattgtgtggatgggaattatcgtatacttgcttatgaatttgcaaccatgggttcgcttcatgatgttttacatggaagaaaaggcgttcaaggcgcgcagcctggccctgtgcttgactggatgcagagggtcaaaattgttattgaggctgcaaaagacttcaatcttttgaaccaagcaccagatatggcagctcgtctccattcaactcgtgtattgggaacttttggatatcatgcacctgagtatgctatgactggccagctgacacaaaaaagcgatgtctacagctttggcgtggtccttttggaacttttgactggaaggaaaccagtagatcacacaatgcctcgaggacaacaaagtttagtcacatgggctactccaaggttgagtgaagacaaggtgaagcaatgtgtagatcccaggttgaagggagaatatcctccaaagggagtcgctaagcttgctgcagtggcagcactgtgtgtgcaatacgaagcagagttcaggcccaacatgagcattgttgtgaaggcgctttcgcctctccttcaacaaagacctgcaccaggcaccgcagagccagccccgcaacctgtgagctgaatccagtcacgtgtgatgggacctcgcagcatcaggcatctccgcgatcattcaatcagcaagtcattgagagtattttgaatatttgttctgtagcattctgttcctggcttgatgttggcgctgcacaatgacaatggtatatgcagtaggtttgatttttctttttcttttaccttctctataccagtaccaagttaccaactgttcgtagattttcagaattcgctgcttgaagaatagatgcaggatgatctggattttttttttggtctggcgtggcgttgctgccttctcttccatggttaccaaataccatgattgaaatcaag

SEQ ID NO: 18110 - DNA, 938 bp, Zea Mays
tggagatagcattatcggcgcatgtccacgttgattcatcaatcagttccacaatccacttgcctcggccgctatcgtgaccgggaacaacaactgcgagatggccacggtggagacctcgggcacggcgatagggtcctccgggagatgggcactacacggcaagacagccctcgtcaccggcggcacccgcggcatcgggtaaacaatgtaggaacaaacataaggaaaccaactactgagtttactgcagaggaatactcgtttctgatggctactaatcttgaatctgcatatcacttgtgccaaattgcacatcctcttttgaaattatctgggtcaggcagcattatattcatatcatctgttgctggagcgataggaatctttagtggaactatatatgctatgactaaaggtgccattaaccagctaaccaagaatttagcttgtgaatgggctaaggacaacataagagccaactctgtcgctccgtggtacatcaccacttcacttacggaaggaattttggcaaataagaactttgaggaacaagttgtgagtcgaactccgcttggacgtgtcggagaacctggagaagtatcggcacttgttgcttttctttgcatgccgggttccacttatattagcggccagacgattgcggtcgacggaggtatgactgtgaacgggttttaccctcccaagccctaggcggcagctgccatgtttctttgtgctgaggaaacgacaatagctgttgttcttggttgttgagaaaaaaaatctaataaaatgtatgtaaaggtaaggttgtcatgttgatactgttcattacattacataattctatcagggcaatgtgaagaacgttgtgtttagatctgaccggtgttagcaaccctgcaatgacgcgagctagctttgacagttaattt

SEQ ID NO: 18111 - DNA, 581 bp, Zea Mays
gtcgcccccacgctagtcgcccaaactacgcaaccgatatattccccagcacccccgttccagccgtccaaccgagacaccgcgtgcgaaccaagcagaccccagcagaagaagcgaagtcgtcgccggagcaggaggaagagcgagcagcaagatgtcgtggcaggcgtacgtcgatgaccacctgctgtgcgacatcgaaggccagcacctcagcgccgccgccatcgtcggccacgacggcagcgtctgggcacagtccgagaacttccccgagttaaagcctgaggaggttgctgggatgataaaggactttgatgaacctggaactcttgcaccaactggtctttttgttggaggtacgaagtacatggtgatccaaggtgaacctggagttgtcatccgaggaaagaagggcactggaggcattactatcaagaaaactggcatgtccttgattatcggtatctatgatgagccaatgactccagggcaatgcaatatggtggtggagaggctcggcgattacctgatcgaacagggcttctaagtaatcttcaagatgaaagacaagatcgcta

SEQ ID NO: 18112 - DNA, 632 bp, Zea Mays
gccagtagtcaaatgcttgtctcaaagattaagccatgcatgtgcaagtatgaactaattcgaactgtgaaactgcgaatggctcattaaatcagttatagtttgtttgatggtacgtgctactcggataaccgtagtaattctagagctaatacgtgcaacaaaccccgacttccgggaggggcgcatttattagataaaaggctgacgctggctctgcccgccgatccgatgattcatgataacttgacggatcgcacggccttcgtgccggcgacgcatcattcaaatttctgccctatcaactttcgatggtaggataggggcctaccatggtggtgacgggtgacggagaattagggatcgattccggagagggagcctgagaaacggctaccacatccaaggaaggcagcaggcgcgcaaattgcccaatcctgacacgggaaggtagtgacaataaataacaataccgggcgcgttagtgtcttgtaattggaatgagtacaatctaaatcccttaacgaggatccattggagggcaagtctggtgccagcagccgcggtaattccagctccaatagcgtatatttaagttgttgcagttaaaaagctcgtagttggaccttggg

SEQ ID NO: 18113 - DNA, 1818 bp, Zea Mays
agattgggctggtccggccactccgacacccttatataaagtcccgaaccctagaggccagcaccttcctccccaactcgccgtctgccttctgcgcctccatttcggcctctgtcccttgcaagttcaatctcacctccaaccatgggtaaagagaagtcccacatcaacattgtggttattggccatgtcgactctggcaagtcgaccaccacaggacaccttatctacaagcttggaggcattgacaagcgtgtgatcgagaggttcgagaaggaggctgctgaaatgaacaagcggtccttcaagtacgcgtgggtgctcgacaagctcaaggctgagcgtgagagaggtatcaccattgatatcgctctgtggaagtttgagaccaccaagtactactgcacggtcattgatgcccctggacaccgtgacttcatcaagaacatgatcactggtacctcccaggctgactgtgctgtccttatcattgactccaccactggtggttttgaggctggtatctccaaggatggccagacccgtgaacatgctctccttgcgttcacccttggagtgaagcagatgatttgctgctgcaacaagatggatgcaaccactcccaaatactccaaggcacgttatgaagagattgtgaaggaagtctcatcctacctcaagaaagttgggtacaaccctgataagattgcctttgttcccatttctggttttgagggcgacaacatgattgagaggtccaccaaccttgactggtacaaaggcccaaccctgcttgaggctcttgaccagatcaccgagcccaagaggccttcagacaagcccctgcgtctgcccctccaggatgtgtacaagattggtggtattggaactgtaccggttggtcgtgtggagactggtgtcatcaagcctggtatggtagtcacctttggtccaactggcctgactaccgaggtgaagtctgttgagatgcaccacgaggcacttcaggaggctcttccgggtgacaatgttggcttcaacgtgaagaatgttgctgtcaaggacctcaagcgtgggtttgtggcctccaactccaaggatgaccctgccaaggaggctgccagcttcacctcccaggtcatcatcatgaaccaccctgggcagattggcaacggctatgcccctgtgctggactgccacacctcccacatcgctgtcaagtttgctgagctcattaccaagatcgacaggcgctctggcaaggagcttgagaaggagccaaagttcctgaagaacggtgatgctggtatggtgaagatgatacccaccaagcccatggtggtggagacattctcagcgtatcctccccttggtaggtttgctgtccgtgacatgaggcagacggttgctgttggagttatcaagagtgtggagaagaaggacccaaccggcgccaaggtgaccaaggcagacggttgctgttggagtcatcaagagtgtggagaagaaggacccaaccggcgccaaggtgaccaaggcggccgccaagaagaaatgatgcgatcccgtgtctgcttttgcagtgcctggataacttgccactaaagttgtgtatgcggttgttgctgttattgcgtggactgtttgctgcggtgtctcctgtgtctgttgtctgttgtctttactatcagtaatgctcctgagacttgtatttctccttttggcgccgctaaatggaattttcgaacaatgattttcgtgttattattttacaaccttttcgaacaatatttacacgtctgatgtgttttgctgaga

SEQ ID NO: 18114 - DNA, 380 bp, Zea Mays
aaagtgcaaacaagagtaatatcaatagcccagaaaaagatgatggcgataaggaaaccgcacagcttgatacaatacccaataacaaaggaaaaggaccagcagatacaattgaatcgccacctaaaaggttcaaataagggacgatacgcatcggaaaagaaatggacatcaaatcctccgagaactaaagtttcactcagatcttcgtcgaccttttgagttgcacaatgtctattttgcaacatatgtataattatatatgatgacctactcagctctttgaaaacaatttatgtaaatataacagcctaattctacgtagtggacaaaaatgttgactctgattatagctcaggtaactctatttcatataaaca

SEQ ID NO: 18115 - DNA, 3250 bp, Zea Mays
atgctgcagatgctgggcttccgcgggggaagccccagcaccggcgacgcgtcccccgccatcagcggggacggcggcgcggccgcgcggccgctccgcctggtgtactgcgacgacaagggcaagttcgtgatggaccccgaggcggtggccgcgctgcagctcgtcaagggccccgtcggggtcgtctccgtctgcggccgcgcgcgccagggcaagagcttcatcctcaaccagcttcttgggcgaagcggcgggtttcaagtggcttcaacacatcggccttgcaccaaaggactttggatgtggagtgcgcctttgaagagaactggtctggatggaactgaatacagtcttgtgttgttggatactgaaggaattgatgcttatgatcaaaccgggacctatagcatccaaatattttccttggctgttttgctgtcgagcatgttcatctacaaccagatgggaggtatagatgaatctgcgttggatcgtctctcgctggtcacagagatgacaaagcacatacgtgtccgggcctcaggtggaagctgcacatcatcttataaaccgtcaaacataaacctcaggccctgttatgcatcagacacctttggtgtgcgacgagccgatgacaccgtgcttcctttactacaggacttttatctggatttggcagaagacaacagaaaaattactccacgggattacctagagctagcattgaggcctgttcaaggtggaggaagggacatatctgcaaagaatgcgatacgggactccatccgtgcactttttccggacagggaatgttttacacttgtgcgacctgtgaacaatgagaaagatctccaacgtcttgatcaacttcctctgagtaatttccgtccagagttcagatccggtctggatgctttcacgaaatttgttcttgaccgaacaagaccaaaacaacttggagctactacaatgacaggtcccatccttgctggattgacacaatcgtttcttgatgctattaataatggtgctgtccctacaatctcttcatcatggcagagtgtggaggaggcagaatgccagagggcatttgattctgctgtgggcacttacaattcttcttttgaccataaaaaacatatagaagaggattctttgagagaagcacatgaagatgccatgaggaaggctatcagtgcttttaatgtttctgctgttggtgctggaagacagttagagcatatagatgctgaaaggaacgccctgagattgaaatgcaattcaagcgatgataagttggcattgctgaggaagcagcttgaagcaagcgagagtcacagagctgagtatgtgaggcgctatgaggaagttctgaatgataaacagaaaatttccaaggattactctattcgtataactgaacttcaggccaagagtagcaagttggaacaacggtgcttgagcttgtcttcttctcttgaaactgcaaaacgagaatccaatgattggaagagcaaatatgatcatggtattttgcagcaaaaggcagatgagagtaagttaaaatctcaaattgcttccctagagtctagggtgagtatcagtgagggtagattatcggcaacacgtgaacaggctgattctgctcaagaggaagcatccgaatggaaacgcaaatatgaagttgctgttagtgaggccaaaacagctctgcagagagcggcggtagcacaggaacgcacaaataagaaagtgcaagagagggaagatgctttgagggtagagcttgctaaccaactatctgagaaggaagaggaaattgcaagattacatgcaaaacgtagtcaaatggaaattcatgctacaagtttgatctcgaggcttgaggccactgaagcgaagtcgaagagccatgagtctgattcgttggctttgagggaggagatcagattactgactgataacctggagtctattagaagtgaagctctgtcacgtgagaaggaagttgggatcctggaacaggaaaagaaccatcttgaggagaagtatttgtcacagtgcaaaaagtttgatgagacagatattagatgcaaggaagctgaaagggaagcaaaacgagcaacagaattagctgatgtagctcgtgtagaagcttctgctgctcaaaaggataagggggaagctcaacggctcgcaatggagaggtttgcactgatagaaagaatggagcgacaggttgaagctctagaaagggacaaggctaagttggtagaagagattgagagacttcatcagtcagagaaggatgctgtgtccaaggtcgcattgcttgaaagaaatgtaggtgagcgggaaaaagaaattgatgagatgttgaagcagaacaaccagcaaaggtccagcacagttcaagtgcttgagagtctgctggcaacagaacgtgaagcacgtgctgaagccaataagagggcagaggaactgtcgttgatgttgcaagcaactcaaggcaaactggacatgctccaacaagaaaccacacttgatagcaagctcaagacctctgcaaggcgcttaaggggtgatgctacagagtctgtacatgatatggatatcgatggggacaatgggaggcgtcggaaacggtcaaaaagcacaacaagcccgttcaagaacaatcacacagaggatggcggttccgtatttattggcgaagatacttacaacgggagtcagcaagggacagaaagcgaagactatactaaattcactgtgctgaagctgaagcaggagctcaccaagcacgggtttggtgctcaactactccagttgaaaaatcccaacaagaaggatatcgttgccttatatgaaaagcatgtcatcggcaagtagttcctcggcaatacttgtatttatgctttatagacttccctctgtagcgttgaaactttaattgacacgatcggattgaagcaaacaatgcatgtaacttagtttaaatctctggtctgtgtattgcaacaatggtgcagttcattttagcatgcatcgtcggcaagtttgtagttaggagtcgtgattgaaatgtttgtctttccaatcccggcacaggttttcttgtaatgctatgacgacaatctattcggattccatggttttgtggtgtaattttatgccatcgatcttttcagattctaggcagtgttgtactgttatggctgacagtccctatccaatttgttaataa

SEQ ID NO: 18116 - DNA, 96 bp, Zea Mays
cgccatcacgccgtctagctcatcatccacctgaagcctaacctgccacataagtcgctactgaccggccatgaattcttgtgcgctggaatgacg

SEQ ID NO: 18117 - DNA, 2862 bp, Zea Mays
ccccacccacccacccactctccatggacacgggcatggagttgtcctcctccgccctccttcctccccccaccttctaggactaggcctaaggactaggagtggcgccgcggtgccgtgtggcgttgactggagatccagagggcgccatccgtcctcgatttgaacttgggttcacctcgccttttctcttcctctccctggtctgccattgaggagtcacatgtgtttcagtggcggttagaagcctacaactctacactcacgtgaagttgtggttggatttgttaaccgtccatgttgagggcaaagcaactcagcaccctaactcagtgtgcacggtccttctatcttaatggatcaaggtgcggtagcacagatggagcttcatgcacatgccctgaggatgagacttatgctccaaaaaggcagactgcaagtgctatcgagcagaattctcattcaacccacagaacatttgtgaagattcagcctcctttgcaagatgctactagagctactggccacccagttccagctgttcatgccactacctcaacttcaggaaaggaggctgcatctagtaacagaagcaatcatcctcacagtcatcatcagatcataagaagtgattatgtacagccatctaagcagacagccagaagcatttctcaatctggaattgctggagctggtgtatattcagagctggttaatatcaggtcctcatctaataatggaagcactgatcaggctccacagatgggtactaactattcttatcagattttatctgataaccattcttctaataatagggcacagaatcaacttaactttcctgagggaaagatggcttataacccttccgtgaacaatgaatttgggaagggttacccaagagctggctatgcaaagccaaagcagagtttctcaggaccttctgtgatggtttccagttcaccatcacaaataaggagtcaagggcatcctggtctacctcctgcaaaatatcattctaatcatttcaattcagatgccaggcaagatgatgtacaaactcggaacccatcaggtcccaatgtgtttagtggttctggcaacaaaattcagggttctacaggaagggtaaaagctcatagtggaggaccccaatctaacttaagatcattgaagttattgcgatcagttgagcagtactaccacacactgcagcaaatgaaatggggtccaatgaccgagcatgttctagacaatcttcattgcaagatagatgcattccaggcaaatcaagtactcaagctgcttcatgaccacactgtcgctcttggcttctttcaatggttaaagaggcaacctggattcaagcacgatggtcatacttacacaaccatgataggcatccttggacaagccaggcaatttggtgttttgaaggaacttctggatgagatgagccgagctcactgcaaaccaactgtggtgacctacaacagaataatacatgcatatggccgtgcaaattatcttaaggaggctgtcaaagtatttgaggaaatgcaggaagctggttatgagcctgatcgggttacatattgtacattgattgatatccatgctaaagctggatacctagacattgcaatggatttatatggcaggatgcaagaagtaggcttgtcacctgatacgttcacctacagtgtcatggttaattgccttggtaaaggtggtcaattagcggctgcttataagcttttctgtgagatgattgaaaatggctgcacacctaaccttgttacttacaatattatgattgcgctccaggccaaagcaagaaattatgagaatgttgttaagctgtacaaagacatgcaggttgctgggtttcgtcctgacaaaataacttacagcatcgttatggaagttcttggtcattgcggccatctggatgaggctgaggcggtttttattgagatgaggcgtgattgggctcctgatgagccggtatatggacttttggtcgatctctggggcaaagctggcaatgttgacaaagcgctaggatggtaccaagcgatgcttcaggatggtttgcagcctaacgtgccgacctgcaattcgctcttgagtgctttcctgaagatgaacagatttcaagatgcctacatcgtgctccagaacatgcttgctcgggggcttgttccatctgtgcagacttacaccctgctactcagctgctgcaccgtgggtcaggcacagatgggtttgtgctgccagctcatggccatcactggacatccagctcacatgttcctgctgtacttgcctgatgcagaagctggtggccagaacgtcagggatcacactggttatttcttggacatgatgcacagtgaggacagagagagtaaaaggggtctaatggatgctgtcatagacttcttgcacaagtccggtctcaaggaggaagcaggctttatatgggaggttgctgcacagaagaacgtgtacccagattctgtaagggagaagagctcgtcgtattggctcatcaaccttcatctgatgtctgagggcacagcagtgactgcactgtccaggacgcttgcctggttccataggcaggttctgacattgggcactggtcctgaaagaattgacattgtcactggctggggcaggaggagcagggtaactggatcttcgctggttaggcaatcgattcaaaagcttctaaacctctttgaatccccattcttcaccacccgtggaaatactggctgctttgtcggctgcggggagccactcaacaagtggttgcacaatccttatgttgagcgcatgcatttattgtaagct

SEQ ID NO: 18118 - DNA, 1663 bp, Zea Mays
gctttggccactcagccagcgctcaccaactcaccgagtgtccgagtcgttggcttggcttggcttggctccgcccgttggcatcgtctactcgccgaaaacctcgccgagtccctgccctccctgggcggtgggcgcggaaacccttcgtctgttcgctaaaccttggcggccggatctcccaccttcagaatccatctggtctcctctataaaagcgctgggaggatctgccgactttgccgtccataggcggcgtctctccggtgtcctgcgtctgcgccgcacacatcccccactcttcttccagtgaaacagttcagattgcatttgccagtgcaagcaaatttcagagataaggatggcagcacaactacttttctccaatgcttccagttgccactgcccattaggcatttcaaggataaacgttgggaagacacttcttggtgaaagtgcaagttttcagagaaagaagtcgttttctggtggttcctatcgcttttctcgatttgattgctctgcgaactcccgccgagctgggccaaggcgcaccaaggatactttatatgaccttcaccctgagatctccttgctttatggagaagataatggtgcagctaccttatccagcaaagagcagggtattgacactacagctgaaagattggtggacacttctccctcttaccgctataatgagcccaggattaaagtcataggggttggaggtggtggctccaatgctgtgaacaggatgattgaaagctccatgaagggtgtggaattctggattgtgaacactgattttcaggctatgcggatgtcacccattgaaccagaaaataggttacagattggccaagaattgacacgtggtcttggtgctggtgggaacccagaaattggcatgaatgcagccaaggaaagccaggagttggtagaacaggcagttgctggtgccgatatggtttttgtgacggctggaatgggaggtgggacaggcactggtggagcacctattattgcagggattgcaaagtccatgggtatattgactgttggaattgtcacaaccccattttcatttgagggaagaaggcgggctcttcaggcacaagaaggaattgcatcgttgagaagcaatgttgatacactgattgtaattccaaatgacaagttactgactgctgtgtccccaaatactcctgtgacagaagcattcaatttagcagatgatattcttcggcaaggtgttcgtgggatatcagatataatcactgtgccaggtctggtgaatgtggactttgctgatgttcgatcagttatgtcagatgctggctcatcattaatgggcattggaacagcaacaggcaagacacgagcaagagatgccgcactcaatgccatacagtctcctctacttgatattggtattgaaagagcaactggaattgtatggaatatcactggagggaatgatctaaccttgacagaggtgaatgctgcagctgaagtaatctatgatcttgttgaccctggtgcaaatctgatttttggctctgttatagatccgtcatacactggtcaagtgagcataactctaattgcaactggtttcaaacgccaggaggaaagtgagagccggtcttcacagatgtatt

SEQ ID NO: 18119 - DNA, 472 bp, Zea Mays
ggcacttggggtaggcatttacagaagggcagccctaagcacgtccagaggcctggggttcttgtccttataaatgactgtgactgggagctgtgtggtggtcttgatgcagagttggaagagaaggatgttgtggttttcatctccactttgcatggtggttagtttgattacatcaggatgatagcatcctatgattttcctgaaaatcgcaccttgtatcaagtctttggaagggatggattggtctgagttgtgtggctttctggagatactaattgcaaactgtggaactgcacttgttggtgccaatatcatcaaactatagttccattttcttactgggacgcaggcacataatattgtgcacaaccgatcctgtatttttccagtactgctgtggctctcccccgtttgctgtatatacataaatgaaaggtcaagtgaagtacgtatttctaaacactgttca

SEQ ID NO: 18120 - DNA, 3176 bp, Zea Mays
cgcctttgcctttattcccttcatatatttctcagctcctttgccccctccctctcactgcccactgccgccgctgctctcccactcctctaccctcctctcctctgcttctctgccgcccagcccagcttgccttctcgaacagcgcgagcgcgcaggcgaggagcagcgtgtccgtccgtccttgcactctctgcagcctccctctctctctaccccgcccatctccctccccaggccttcaaatccgcggccgcgccacccgctgcgctgctgccccggtccttgcattgctcgactcgaggcgccccagcgctggtcgcctccgtgccttccgcggtgttcctgggcgcggctcctaggctcgctcattttacttctgctgctcctgtgctgcctcttggggggcgttcctttacggcccggagcagcgcctagctgcttccgccattgatccggcaaccccagctctaggtttgctttgctctcgtgtgtggtagcgattctggtgttgggggggtgccaccaacagttacaggttgtcgccacgccgagggtgtcgtcctgcgttccttttttttatcttctctccgtgatctctctagctgcatccttgcccccccttcgctccttgctttcttctctgcgctgcctttggtgtgttgccagatagctcccgggacttcaccggttcgctaaccggcaccggcccatagtctgcggacaaacaggggccagttcggcctatttcatttcacaaaagggggcaaagattaggcggcggaatcctgttctttcccgattccttttggacatactgctcgagaggaagtgaaagcgcgcaactttggaggttccgaggagggaggaacacatcccttgcagctgcatgaggaggcaggcattgatacaatgagagatgacggttcaagcaagaacaagctgtcctggtccaagacccttgttaggaagtggttcaacatcaaaacaaaggcgaaggacttccattcggattatgcagctgaggaagtcggagtgcagtggaggaccagcagcttctctgatagagatgcatgtaaatccaagaaaagtaggacagagaggttgcctaagaggaatgtggagcgagatggtagagtagggaacggatttgatggtgcctatattacaaacacacaggactacagggtcttcgttggtacatggaacgtgggcggaaggtcaccatctagtcatttgaatctggaagactggcttcacacttctcctgctgctgatatatatgtgatagggtttcaggaaattgttcccttgaatgctggtaatgttctattgactgaagacaatggtccagcgaggaaatgggtctctcttgttagaaaaactctgaataatcttgatcagcaaggctctggtgtctataattaccacaccccctcaccagctccggatccaatcgtggagctcaatgttgacttcgagcgatcgtcaagaagacaaaggaactcgtcgtttttccatcggcgttcgttccaatccttcaaccgtagctcaaggatcgacatgatggatccacactcgttagtggaccgtcgattcagtgtctgcgacaggattagcttcgggagcaggccgagtgatgttgacactagcatgaggtgtggtgggtcgtctgatgatgagaacattgacgaggaatcacctagcggtatattcttcccaccgatgccatgtgcatatggtgctccactgtgcactggttctaggtattgcttagttgccagcaagcaaatggttggaattttcctcatggtgtgggtgcgaagcgatataagggagcatgtgaagaacttgaaggtttcatgtgtcggtagaggtctgatgggctaccttgggaacaagggatccatatcaatcagtatgtctctgcatcagacaagcttctgcttcgtttgcacccacttaacgtcaggccaaaaggatggagatcaacttagacgaaatgcggatgtggtggaaatcctgaggaagaccagattcccgcatgtccatggagcaggcgacaggaagtcaccagagacgattctggatcatgatcgtattatttggctcggggacctgaactaccggatagctctttcgtatcgctcagtgaaggctttagttgagatgcacagctggaaacagttgctggagaaggaccagcttcgcatagagcagagatttggtcgggtctttgcaggctggaaagaaggaaggatttactttcctcccacctacaagtactcatacaactccgatagatacgctggcgacgacatgcacccgaacgagaagcgaaggactccggcatggtgtgaccggattctatggtacgggcgaggcctgtcccagctatgctacgtgcgcggcgagtctcggttctcggatcacaggcctgtgtacagcatattcacggcggaggttgagattccgagccagtcagctgctcacttcggcggcatcactcgttccgcgtctctcctggggctggacgagctgccaccgtaccagacttatccacgcagttacatggacataaacttctactgaccggtcatcgtctcgacggggaggacggggccagcagccagccaaggttcagttccatcggtcggaaatcggaatgtttggtagctagcagatgtgactcctttcgccatgcgtttctgtgcacctggcgcctggactcttgctgctgctgtcctgcatgccattgacgcccccaactcctacgccgtgccgtcttcagcgtgcagaatagatactcgaggagatcaatgctttccgagcgtgagattgttgctaggaacatttgcacagctagttttgttgaatcataaccatctgcgtgtcccgatttactacgggagaaagaagaaggagaagaaaaaaaggagtttggttcttgcttttggtgtcctgatgtaatgcaacgagggccgcgccatgggctcattcaaatgttttcttttttttgttttaatagtccgaggaatgaaatgatggcttgtacagcaaactgttccagtaaacccggcctctgttcatgctcgcggcgaaatgatcacctgaacagcatgcatgcaggggtgtcatctagttcctgaacgcttgtgcgcgaagcgaccgtgctg

SEQ ID NO: 18121 - DNA, 1260 bp, Zea Mays
ggtcgatggacagaggcccagagcacacaataaatagaggtttttatgtagctgaaggtgcaaaaatgtgtagtgtggagcaggttggcgagatgcatatttcagagagacagaagtcacttcaagagaattactacttcagttgtcaatgttcaagttgttcagagctaaacctatcagaccttgttatgaattcattctgttgtccacaaagcaactgccttggtgccatatcggaatcaacttactacaggtccaaagagaatttcgtgaatgtttcccttggaggatcttatgtctgcaaactatcattgcccgatgtatcgaaggttgatatggatatggagaatgtcgccaaatctctcttgcaaaatagtggtgtcagtctgaacatagatcatggatgttgcatgagttgtagatcctgtattgatctgtcgtctgctctggctacatcacacagggaagaatctaccatcgataggttgaagaaacatacattcctagacaagactctcatcacagaggcattacaatctctaaaacaactcaagaagttgaggcacccatatagcaaggctctcgcgcaggccgaagacacaatcgcagaggcctttgcgaaggtcggagaccaagaactagcacgaaagcactgtgaagcatcaattcagatcctcgagaagctgtaccacccaaaacacatcatcattgctcacgagcttattaagcttgtttcgattctgctgtccctgggagatggggcaagcgccgcagccacattcgctcaagcagaggcaatattctctctttactacggatctcatgtggagaaggttttgacatacatgggtgccctgaagaaagctgtcattgacgtgtagcgtgctgacaatcctcacgcgggaatggccaacacggttctgcagaatcatctcaccttttgcgcttcttcgaggagttaatgtaggggaaaacccaaaaaatatttacaaagcagtgtggtattgcttgtagtttagtttgttctagaaaacacaaactagctcaaccaaacttcctggctaatgagtttggtggatgttctgagtgcctatgttaatgacttgtttcataaatttttttcgtatatactcgttgccttacaaactcggtcggtagaggaaagatcgctcccacggtattatattaagaagaagctcaattgaagcctcaaccaagaaaggtcatgaaagctgtcttcctgcaacatgagggtccgtc

SEQ ID NO: 18122 - DNA, 788 bp, Zea Mays
cttttactcaagtaaatgcactcgaacgcttcaaagatgatgatgatatgctttggagatctcctggcactcctgttttcactgccccggagtgctgtcaaggttcagcctaccatggtagagcatctgatacatgggcagttggtgtaactttatattgtatggtctctgggcactatccatttctgggggatacattgcaggaaacttatgataagattgccaatgatcctgtggaattacctggcgacgtgaatccccaacttgccgatttgctcctaaggcttctctgcaaagatccaggagatcgcatcacactgcgtgctgcggctgagcatccttgggtcgctggggatgaggggccagtccctgaattcatctgtagatgtgggtttggccgcaggaagaggaatgatgtccgggaagaagttcaataacaaagcatcctcggatggtctaataggtctagcgtagataattgatgatcggcaaagcgaagccctgacgatgagttcgttgttccgtgttccctgtttctaatacgcgctcgactgaacatatttctttttgctacagaatatatactgcgtaaccctatgccagtaaggcaacgtttgtcacagtttcacgttgtcaaacgcagcttaacgggtgatgtttttttttatgatccgagaggaatggataagtgaattttttttttgaaaaaaggtgtatctttacggatggtctacgggtgaagcttccatttcatataaggagccattggtgaagctgttttactgaac

SEQ ID NO: 18123 - DNA, 148 bp, Zea Mays
gacaaggaacctcacgagcccttctcatccgcatcagatctagcgccgcctccttcaccctgctggccggtgagctcctcatcacggtgagtcccatttcccctctactctcctcttcccctatgctctcctcttccttcatcctgct

SEQ ID NO: 18124 - DNA, 4702 bp, Zea Mays
cagatgccggcgaatggcaagctctcggcgaagccctccccctcgccgatggttgctcccgcctcgcgccccaaatttacagctgttacctttctcggtgactgcgacgacgacgatgacttccaacctcctcgcccccgccccttgaagccttgcattggcgccgccgcacttcggttccgtaagaagctcaaggctccatcctccgggaaggagaatagttccgccgccggtggtgccgttactgtggtgggggtcgcttcgacggccgtgaaggatgccgaaaccctagccgccggctctagggttagtggcgacgttcccaaaacgaagagacgaaagaccggtgaaagttgcggcctgtcgaggtacggatctgatagcactaaactaagctgtaaaccgaagatagaattggatagatacggatatggcaaagggtgctgcagtttcttgcccagtgcgatagactcgacggttttggcgctcggtgcggtatgtgattttggagttaggcgttgtgatgaggctcaaatagctgtctccaggcattgtacctcagttcttgaggcggggcacgccacagaagagctgacaccgacaggctctgggtgtgatccacccaaaacggagaagaagccgggcagttctgaagctgtggagggacatcacgactccaggttgattgaaccgaggcttgttgaatcagatgcaaacctcgagtttgtaactgggattcttggctcactgactgataaacaggacacgaagaaagcaaacggggtggtatttggatgtggtgttggatttcagaatgggaactatcacttggattctctacagccagagcttctaacgtcgaactcaaagtatgattctagagtttgtgttagcaatgaaatccaagagcctggtttgggagcctgtaacttgatttcacaggagaggaaagtagcagctggacattctgcatgtgcaacccctgaaaatgtgactgcagagaataaatcaagtgcacctgaggcttgtaaggggcaatgccactccgattcatctgcatcaaagcttccagaatcccatatgatccatgactttgaagttgatggttgcgataattttgagattgggacccagctcagtgagctcattaacttgtgtatgaaggattccatagagggacaatcaaactttggtgcagctcccatggaacagaacactttagactctaagagactcagttcagactatgaagcgaaatgccctctatgtggatcggatatttctgatttaagcgaggagctccggcagctgcatactaacaattgccttgacgaaccagctaaggaatctagtcccaaccataaaaaagagcccagtgttggacaaaatgttgaaactggacgtgttgtcgaatggttaagaaaccttgggttatccaagtatgaggaagtttttatcagagaagaagttgactgggaaaccttgcagtggctcactgaagaggacctgttgggtattgggatcagctctcttggaccaagaaagaaaattatccatgctctaggagagttactgaagaaacatgatgatcccagtgaaatggaagctgtgttaaattcaggaaatactaagaagactaaacttccgatgaatggtaataaattaattaccgaatactttcaatgttcctcatttgatcaaagacaaagaagggtatgcaaagcaaacaagccatctaatctgaacgagaagaaaatttctagtgctaaagtacccactagaagaactgctggtaaaggaaagattaaggatacgcctctttggtgttgcatcccagggaccccttttcgagtggatgcatttcgctacttgagaggtgattgttctcactggtttctcacacactttcatgtggatcattatcaaggcttgactagaagcttttgtcatgggaagatatactgttcgtcaattacagcgagtcttgtgcatcataagattggtatcccatgggatagattgcatgtattgaccctaaatgaaaagctcaatattgctggagttaatttgatatgttttgatgccaaccattgcccaggatcaatcattattctctttgagcctccaaatggtaaagctgttttgcacactggagatttccgtttttcttccaagatggccaacaatcctgttttgcagtcttcctgtgtccacactctaatacttgacacaacctattgcaatccacggtatgatttcccaagtcaagaaatcgtaatacagttcgtcattgaggccatccaagcagaagctttcaatccaaaaacattgtttttgattggaagctacacaattggaaaagaaagattgtttatggaggttgctcgtttgcttcagaagaaagtatatgttggagctgcaaagctgcaaatactgaaacatttagagcttcctcaggagattatgcactggtttacagccaatgaagcagaaagtcacatacatgttgtccccatgtggactctagcaagcttcaagcggatgaaatatctatcgaatcaatatgctggccggtatgaccttatagtggcgttttgtcctactggttgggcatttggcaaaggtaggaaaaagacaccaggcaaaaggtggcaacaaggatcaatcattagatatgaagtgccctacagtgaacacagcagtttcacggaactgcagcagtttgtcaagttcatatcaccagagcacataatccctagcgtaaacaacgacggccctgagagtgcaaacgctatgcttgcccagctgttaaacgagtagaggaattcgttcgtcgcttcaatatcttcggcttggctacagttttctcttcgaaaaccatttgatgaaagggatggacgctggacgagctaacttccaaggactaatacagtgatggcggaagcattcctgatggtgccacccagagttctgacgtggaaatccagagatacagggtgcatagatgcgcacgcagacacccgttggcgccgtggaggtgctggttgacaaatcgtcagccaagattctgtactggaatgggtaccggcgatagcgtgtattgccgaaaccatgtgaaccgtgatttgtgactgtcaagccaagcgagtgaacttgcatgtcattatgagcccatttgtacacgaacttgtccagggtttttctagtgatggtgaaaagtcctgccatgagtgtcacctttctttaaaaaaaaacgtcgatcaaactggcaaaatccgtaggagacccacttgtcagctaaccaccccttgcagtcatccgcaccagggcaccaccaccactccagatgttctagaactatcaggcggcttcctccccctaaccgcaacagttaaaacgccgtagcaactagcaacgctaccacagtgcgcgcttgaagatagtgtcatttgcagttcccggtagcagccatggcgtcggtgcagctgtctgggccgcgggtggtggcggctgcgaaaccggctgcgttgggcgggctcctcctgacgccgtcccttgcggtgccaaaggggcggagggccaggggcctcgtggtgagggccgccacggtcgtgtcacctaagtatacgtccataaaaccattgggagacagagtacttgtgaagatcaaaacctctgaggctaaatctgatggaggtattttacttccagtatcagttcagacaagaccacaaggaggggagattgttgcggttggagaagggagaagttttggaagtaaccgcattgagatcagtgttccggttggtgcacaagttgtctactcgaaatatgcaggcacagaattgaaattcaatgacgccgaccatctcattttgaaagaagatgacataattggtattcttgacagtgatgatgtgaaggatatgaaaccactgaatgatcgcattctgattaaggttgctgaagctgaagaacgaactgctggtggtttgctattgacgcaggcaactaaggagaaaccttctgttggatcagtggtagccgttggcccagggccgttgggcgaggacggcagcaggaatcccctgtcgatcactcctggaagcaacgtgatgtattccaagtatgcggggagtgagttcaagggcgaggacggtgagtacatcgtgctcagggcgtctgacgtgatggctgttctttcctgatccccaaaccatacagcgccaggtgcgcgataggaagttttgatgttgaggccgaaccttatcttttatttgctcttgtttggaattggtggaggcttttgaactgtaatctggtgcgaattataaggaaaataagccgagttgtgtagacttgagacaggactgtgctgtgctgtttggctggtaggtgagctaaccagtgttcagctggtgggtgagctgaccagcacgtcgggttcggctgttcttcctgatgtcagcgttgtacgccaaggttggccaacggcatcaatattactaatagcatctaggctaccgtttgagtttttcatggattaatgacaacacaagatgtgactattatatacttcctctgtttttttatttgtcatgttttagttcaaaaataaacctgttttagttcaaaaatgaactagcggacgacaaatattcaagaatagaagatagtattttgcaaagataactaggcttat

SEQ ID NO: 18125 - DNA, 1138 bp, Zea Mays
ccttgactggtccgcagacggaagcggcgtagcacaggctgacaggcacatgggcactccaaaggctgaagtagtcgcgtgcgttttaggccaggaatccaacgtgcttcaccccaaaaatccatttgctccaacattgcattttaactaccgttactttgagacagatgcacccaaagatgcacctggtgcaccaagacagtggtggtttggcggtggtactgacttgactccctcatacatcattgaagaggacgtgaagcattttcattctgttcaaaagcaagcatgtgataaatttgatccaagttttcacccaagattcaaaaaatggtgtgatgattatttctatattaagcaccgtaacgagcggcgtgggcttggtggaatattttttgatgaccttaatgattacgatcaagaaatgcttctcaacttcgctacaaaatgtgcggactctgtacttcctgcctacataccgatcatagaacggcggaaggacaccccattcaatgaggagcacaaggaatggcagcagttgaggagaggtcgttatgtggagttcaaccttgtctacgaccgtggtacaacattcggcctaaagactggaggaagaatcgagagcatactcgtgtcccttccactcacagcacggtggcagtatgatcataaaccggaagaagggactgaagaatggaaacttctggacgcgtgcataaatccgaaggattggatctgattagccgaagtttctttattcttgagatcttttgttagttttcccttgtgtagcgctaagatatcagaccacgtgtagtttctttatttcttttgtatatctgtaggatcgtgaacaaatctgatataattctgcagctgtttgtatctaatctgctgctcccccccttccccccccccccatgtgaatgagagaatcattgccttgtgtatctacaaaggcttcaggtgtatcatttacctcctgcctattggaaatactcactgatgcaggcaggtctgtatatacccatagtgcttgatgttgtgcatcaacagcaacaaatagtttaaattgtttagggccacaaaacatttacagtttcaacaattgagccttatcatattattaggaaataaa

SEQ ID NO: 18126 - DNA, 478 bp, Zea Mays
agaagactccacgcccgactgggaacaagagctattggaattctagattagccacagagaggcagaggctagttaatatctttagaaacttggacgttgtttgtgatatgttctcaggggttggtcctctagcgatttcagctgcaaaaaaggtcaaatatgtctatgcaaatgacataaaccctaatgcagtgggataccttgagagaaacatggttcttaacaaacttgaaaagaaaatagaggtttttaacatggatgctagaaggtttgttagtgcaatatattcaagcaagcacgtgcaaccaatcacacaaatagtgatgaatttgcccaatgacgctgttgaatttttagatgtgttcaaagggattttatgcaatactaaatcagaactgcattgtgtgatgccaatgatccatgtgtacggattttctaaagctgaggatccagagcatgacttccatgagcatctatg

SEQ ID NO: 18127 - DNA, 665 bp, Zea Mays
atgcctcctggctcgccgtcgtcgcccacagaccccacctcttccaaggtggttcctccgcctagttactgtagtcatggctcccctgccatcattctctccttcctctattgtctccttcctccagacagagaggcggcactggtacaggtgctaccgggcgaggtggagcctaatcgcatcccatggaggaccaccctccaatggatccaggacgtgaggcaccaaatcaatggagggtcgtttctccgcctagcaaccacagccacgactcccctgacatcattctctccctcctctgttgtcttcgtttcccttctctgctgctgggagagagaggtggcacagccgcgcaggtggtaccagcgaggtggagcccggtcgcatcccatggaggacaaccttccaattgatccagggcgtgaggcaccaattcagtggagagaaaaacaagaatcgtgactgcaatggcaaatggaaggtgaaggcccttttgattgacaacttaggaaaagatggaatggaactcaaattttgatggtcggtcaagtgtgtagacttgaaatcatatatacctagttaggctcaactttagcgcaaactgttggtgaccatgttttttagttagtattttagtttggatttagagtacacttatgtatgag

SEQ ID NO: 18128 - DNA, 1070 bp, Zea Mays
aaatatctgaaggcgcgcggttgcgacgcggagcgagtggtggcctggacgcctggtgtgcgctattttcccccgcgcgcgcgtcccaactccaggagctctcgatggtgcccgcggccgcggctgtcgcagcggcgagcccggcagcgctccctcgttcaacgtccccaaggggcagacgtcccagggcccgtgcctgctcgtttcggtgcgctgggccgagcgcacgctcctcagcacttaagtcgggttccgccggccatggccatccccggattcggcagctgcgcggacggccggactgcagccggcaggcggaagtgatgggcagcaccgtcgacgacgacgaggcgtgcgagctggtgagcggctcggacctcgtcatcggcgagggagacgacagcgtcagcgcgtaccttttcaaggccgtcaagaacaacaatggcaccggcatcctcctgctctccgacatcttcggcttccaggactccgccacgcgggacttcgcctaccgcgtcgcctgcaatggctacaatgtcctagttccggacttgttccgtgggaacccgtggaagctgaacgtcccgttcgacggcgacagcttcgagcggtggcgggcggggcaggccccgggccgggtgtccggcgacatcgacgcgtgcacgaggtggctggtggacgagttcaaggccgcgggggtgtccaagaagctgggcgtgatcgggggcgcgcgagaggcgcccgggcggcggtgtacgccggcaggggccacgggttcgcgcaccggccgcagtcggtggaggaggacggcgacgccgaggacgcgttcaacgcgatgcgggggtggctgcacgaccacctgctcgcctgatcggacgatcagacgctgtacacgggtttgggtgttttgtacatacgtactaatatgttatttgaccaagtctcctggtcatcctataataaagagcaaaatccaccattaaaaaaataaaccgagagttatagcattataagtaacagaatgaacgtggttatagagatgtaacaatctaacttcgtctcaatatatg

SEQ ID NO: 18129 - DNA, 2268 bp, Zea Mays
catacatacaccaaccgtgcgtgaaggaaggcctttgctcgccgccacatcacattggcaggcgaggcgagggagcgagcagcagggcaaggcatccacacccacacccaccggacactccctgagaagcgagaagcgagaagcgaagagcggccggccaccatgttctggcacggggtcgcggaccggctgacggggaagaacaaggaggcgtggaacgagggaaagatccgcggcacggtgaggctggtcaagaaggaggtgctggacgtcggcgacttcaacgcctcgctcctcgacggcgtacacaggatcctcggctgggacgacggcgtcgccttccagctcgtcagcgccaccgcggccgaccccagcaacgggagccgcggcaaggtcgggaaggcggcgcacctggaggaggcggtggtgtcgctcaagtcgacgacggacggggagaccgtgtaccgggtgagcttcgagtgggacgggtcgcagggcgtcccgggcgccgtcctggtcaggaacctgcagcacgccgagttcttcctcaagtcgctcaccctcgagggcgtccccggcaggggcaccgtcgtcttcgtcgccaactcgtggatctacccgcacaatctctactcccaggaacgcgtcttcttcgccaacgacgcactgaagaagaacaggctcttcatcctagaccaccatgaccatttcatgccgtacctcaacaagatcaacgagttggaggggaacttcatctacgccagcaggaccctactgttcctgaaggacgatggcacgctgaagcccctggccgtcgagctgagcctgccccaccctgatggccagcagcacggcgcggtcagcaaggtgtacaccccagctcactccggcgctgagggccacgtctggcaacttgccaaggcttatgcctgcgtgaacgactccgcctggcatcagctgatcagccactggctgaacacgcacgcggtgatcgagccgttcgtcatcgcaacgaaccggcagctgagcgtggtgcatccagtgcacaagctgctgagcccacactaccgtgacacgctgaacatcaacgccctggcacgccagacgctcatcaacgccgacggcatcttcgagcgcaccgtgttccctgcaaagtacgcgctggggatgtcctccgacgtgtacaagagctggaatttcaacgagcaggctctcccagcagacctcgtcaagagaggtgtggctgtgccggaccagtcgagcccctacggtgtccggttgctgatcaaggactacccttacgccgtggacgggctggtcatctggtgggcgatcgagcggtgggtcaaggagtacctggacgtctactaccccaacgacggcgagctccagcgcgacgtggagctgcaggcgtggtggaaggaggtgcgcgaggaggcgcacggcgacctcaaggaccgagactggtggcccaggatggacgccgtccagcggctggccagggcgtgcacgaccgtcatctgggtagcgtccgcgctgcacgcggccgtcaacttcgggcagtacccgtacgccgggtacctgccgaaccggccgaccgtgagccggcggccgatgccggagccgggcagcgacgactacaagaagctggaggcggggcagaaggaggcggacgcggtgttcatccgcaccatcaccagccagttccagaccatcctgggcatctcgctcatcgagatcctctccaagcactcctccgacgaggtgtacctcggccagcgcgacgagcctgagcgctggacgtcggacgccagggcgctggacgcgttcagaaggttcggaagccggctggtggagatcgagaagcggatcaggacgatgaacgacagcccgacgttgaagaaccggaaggggccggtggagatgccgtacatgctgctgtaccccaacacgtcggatgtcaccggcgagaagggcgaggggctcactgccatgggcattcccaacagcatctccatatgagcctcctcactgcctgagcggatggtttgtagatgttctgttacgctgtgtgtaatgtgtcgtttattcgttggttttgtcagtctcagggtagggaatggagatgttgattggatccatgatctgtagggttgagagaggagtcacgtctggagaatgttgtcaatgtgtgtttctttcttgttaagaataaaagttcgtcagctcatttatctctactacttattaaagaataaacaaaagaaa

SEQ ID NO: 18130 - DNA, 1348 bp, Zea Mays
atagaaagtatctggtatattttcccaaggcactgcaatccatttacattttggcaaagaaaaaaagaggatggtacgaacttgagagtttccaagttttgtgaacaaaaaagcatctaaggcaaatgtgcatagaaaattcttgtggaacataacagtttttttaggaagcatagcctatgtgaaactaaaaaatagcagacaaatttggttcagtcaaaggaaatgtcgaggcacactttatcagatgttttatggcaaaatgtggaacagagcacctcatcgggtatacaacttatctcttaaaagtatgggaaagccaaattatgaaagctaaatgatggctctaagaaagcgtggtgtgttacatctatggttacaattcaagcactgaatatgttatgaaaaagagcaccgagtaaaggagaatcaaaattgcaatgtgtgtcggtaaaagaaatagtcgaagggcaacatcaaccaatttgccacatttggtgaaaagctaaagggaaaggttttgacactcaagaggagctcatccaaagccactgatggagaagccaccaattctggaagggatcctgcccctgaaaaagcaccatcaatttcaaactctaacttagtgtttggctacctcaaccttttctcagatggtgttcataacttcactgatgggatggctctcgggagtgcctttctgctgcatggttctgttggtggctggtctaggactttatttctgcttgcacatgaacttccccaagaggtaggagattttggtatccttgtgcggtcaggcttcacggtatctaaggccctattcttcaatttcctctctgcgttggttgctcttgctggaacagcactagcattgtctttgggtaaagatccgggacattcctccctgattgagggtttcaccgccggtggtttcatttacattgctgtcgcgggagtcctaccacagatgaacgaccagaaaacaaccatcaagagctcagtagctcagctgatctccctggcaatggggatgctggtcgctctaggcatttctctggtagaataatctgaatccccatttcaccacttgcagctttaggtccaaccgagttaccccaagtcgatataatgctctagcagctccagactagaagcagggttttctgatcctctcgatatatagtaccaaaaagttttttttttttgaaattttggcatctggttatagattgcctcgcatcggtgttatttgaaggcaacccgtcgcactaactgaatactgtacaactttatggccggctggctgatgtcggctcataataaaataagtataaaaaagctaaaa

SEQ ID NO: 18131 - DNA, 995 bp, Zea Mays
gatgacattgtcatcaaggccatgggaagggcgatcaacaagacagttgccatcgtggagcttcttaagagaaggattgctggtctccatcagaatacctctattgaatccattgatataacagacacttgggagccattggaagaaggccttgtcactcttgagaccattcgccatgtgtccttaatcactattaaattgtcaaagaaggagctggatacatcatccccaggttaccagccgcccataccagctgaccaggtcaggccagcagctgactttgatcaggatgcagaggccgtaccaagtggtcgtggaagaggacgtggtcgtcgcagcaggggcaggggaaggggaagggggttcagcagtggagtagactatgatgatgagattggagagccagaggaggctccgcgtggatatcgtggcagagggaggggccgtggagggcgtggatcttttgcagttggaaggggctatggtggtgataattatgcgatggaagaagctggtagatatgatgatgatggatataacgcaccacctatgcaacgatatgaaggtggcagaggaaggggcagagggcgtggacgcggtcgtgggcggggaaggcaaggccatggacctcctccgcagcagtagattggttggcacatcacctttgggatgtcataacctccatttctttccataagataaatgttaccgtccattatattttttatctggttattaggttcatgttgaaagttgacatagtgactctagtgtggaggatgcggctagttaagatttggtagctaggttgttcgtccatttgcctatttattatctcagatcagacttggtgccgttccagttgtgcattgtagcctctttttaccatgaaagttagttcagaagattcttttatgttgttgcaaatcacagactgaaaacgtttgttttcaacttagtaccatggttctgtaattgaacatggtacctaacaa

SEQ ID NO: 18132 - DNA, 633 bp, Zea Mays
ggaagccatacacacatataaagtttatatatttggagccctgggcttccaaaataactagggaagccctggtccaacattacatccggttcagccgcaccaggtctcagacgtctataaagggagccccaggctctagggtttcaagttttatgggcgttggcggtgacgcccaacacgatgcatgagcaatagtgcccccaccctgccgatgtgcacacgacgacagttccctgagggagcatggcggctgcagccatctgaggcaggagcggaggcggttgcggccatccgaggcaggagcggaggtggcagctacggcctcccctaggtgtgagcagcgatggcggatcctagaggcacgcttcgcagcggtggccacctgaggcgcgcgcgacggcggtggctccctgaggcgagtgcggcggcgacgacctactccaatcaatgtttatgcatgaggctgttggttgggcacatattaatactttttcatcaattatttatgcaactttttataagaatttatacttttgcatgattcctgtcatccaatttttacgtgtatgtagtgagaaagaaaatgtcattcaaaatttgcatgcatgcaatgaaaactttcatgacctgcca

SEQ ID NO: 18133 - DNA, 409 bp, Zea Mays
tttctccatgtctacactaccatgattttctcaaatttattaccatgctaaccgaaagggcagttccagtcatcaggaaaaaatcaccacaagatcttagaagaaccaactccatggaatggtagaaatgaccctgagccctgatgttcttctcttagaagttacagggtttgtttttctttgacttctgtttcttctagttttctttgatagctatttaggaatagtggaacgtgcgtgatcaagaagtcacgccatttagaattgatctgttgtcagattgacggttttcttgtgaatgtggccgggtgttgtataaataagaacaataaggttagcttgaagagtggaccaaaatatcctaattacaggcatctattttgacatatcccaatatctgatacaacgt

SEQ ID NO: 18134 - DNA, 3633 bp, Zea Mays
atggaggcctccgcctccgcccgcagatccgccgctagccccgaccccggcgcgaagaagccgcgcctcgcgcagccgccggcacgggaccccagatcttacgccgctgccgccgccgcctccaatggcggcgcaagcgccgccgagcaagcgctggttgacgagctgctcggccagtaccggaccgcgcttggggagctcaccttcaattccaagcccatcatcaccaacctcaccatcatcgctggcgagaacctccaggccgctaagcccatcgccgccgtaatctgcgccaacatcctcgaggttccaagtgaacagaaactaccatcgctgtatctgcttgacagtattgtaaaaaatattggaaaagattatgtcaaacatttctcagcaagattaccagaggtgttctgcaaggcatataaacaagttgatccttctatacatcatagcatgaggcatctttttggaacatggaaaggagtgtttcctctacctcctctccaaacgattgagaaggaacttggttttcagtcatctaccaatggattatcaggtgctgcaccatcaaggactgattctcaatcgccgcgtccatccaatagcatacatgtaaatccaaaatatttggaagcgaggcagcagctcaatcaaccaactaaggggatacttggaagtggtgctaagacagctgtaattgctgatacagacgatgatattgagagggctaataggctaggtactgaaagaagtgcagggagacgattggatgctcctaatgctagacctaacatagagcacattcagagggacccttttagcaatcctattcatgaaaaacttgcaggtagagatgtgaggggccttggattctccaacacttcacagcaggctgttgtgggaactggtcaagttcgctcaaaacccagaggccaagatggaattgggggaccctattatgcctctggtgttgtgtcttctgaagaaaaaattgacaagcgcagcaacttttatacaagcaaggatgttcggccatcaggatctgtacatttcgatagtgctcttcttccaactcgatcaattaatgctaatagagttggtaggccttcatcaaacaaaagctggaagcactctgaggaagaagaatatgtttgggatgatgtaccctctaaaacaacagaatatagtggtacccataatataataaaaggagaatggatgtctgatgatggcaatgctaagtttgcaagcctccaaagtgctaaatgggcagatgcaggacctgtggaatgtatagatcccaagacacataaagttgataatgtgtcaagatttggatttgcagcaggtcaagaaagaagaatttcagcatacatggatcaggaagagtaccttcttggcaagcgtgaggtggaagctagaattgatagggaaattaggccctatggacaacagttcccagcagctcgagattcctctctctgggtgtcccaggaaaaagcactccccgacaatgggttggacccttgggtatcaaagttttcaaatcagccagcagagatgtccatttgtactggcaccatgccagcaagtatcatatcatctgtacctgttaggttatcaggacactatgctggaaggtcaaacctagatactacaaatagtgtgccaataagatcaactgaggcttttgggcagcagaagcatagatattggtcatcttcccctccacaagctcacccaccttcatctactgcaccctttgcacgtcagggttctccaaatcatgacgagtctgatttttatccttctggatcattttctcaattgggccaagatcctcaagaagaatatagccagagagcattgcctgtacttgctaaaggttctcatgttgtggttcacaatgatgaacttactcagggccaacctagtctacaggcaaccctgcagacacaaaagtaccctatcatacagtccaagtcacatattaatccatctgatcaattgcaagcaagctttttgtgtgaaaattctccatcactgttcagaccttccattcagcttggagaagtatctttacccagtgattccacccctataagctcagatctgacaagtgctagtaatttgttggctggtctcataaagagtgggttcaaaccaagtaaccacagtgatgcacagcctcttggtccgagtggctcacttctagtggcttctttatcacttcaaaatgctgctggtgaaaataccattttgcagacacagacaccaaacacttctcgtccaccattgccaccaggtctaccaccacctccatcaacacagagtgcagagaaagctgcgccgctctcgagtcttctcagttccctggttgcaaagggattaatctcttctcctgcctctgattcatctgatgctgtcatttcacagccaaataaagaatcaagcataaatggtaaagatgtcgcagcttcaggtgtgcctttgccagctctgaagtcttcatttggtaaggtgtcatcatctaattctgattcatctgccccaccaaacgcttcgttacccaaagctatcgaaattgagatgggtgacctcattggcctggagttcaagccagagaaacttcgcaagtaccatgagcatgtaattagctacctcgatgaccaaagccatcagtgtaaaatgtgtggtaataggttcgggcttgaagaactgagtttgcacacatcaagctgtgggccaagggagtcaaggactatctatactggtatcgcacctaagagatggtatcctagcaggaacatttacattgatggatcacatgaaattgaggatagcgctgaggcttctgatgcaggtttaggttctgcagaagtgtgtgagtttatggtccatgcagacgagaggcaaattatctgtgcactgtgtggggaaccatttgatgacgtatattcttttgagaaggggaactggatgtacaaggatgcagtattcttggattatgccaagggtaaaaatagctgcggaaacaatgttaagggtgaagagcatgtgcctatagtccatgtaagatgtatgccaagaggctcaaacgatggcatggacgttgactagaatggttgttcacagaagccaagttctcgaggggcctagaggtggatgaggctgaagctggtgtttgcacgaggcaatgtgcatcatcaggtggtctgcggcaactgggcttaagacatacatgtaagatgcttggtggaggtggcaggcgttatcagaaacaaatcttgcgaagatctgcaaccatccatggatttaaccatgccctttacaaagtgcttacacaaagaataaagccccagaggagcacttcggccatgcggttcagaattatcaaaatcttcatatttttggtctccatctgagaaggggctgggtctttatgttgatacaaagagagctttgcaagaggatgtcaaaagaatgtatgatttctttacgtggaaaaggggtatgatatcccgcatgtaagttgagcactgctgttttctgacgatacgtttcttgactgttaggaatttttgcactacgaaactgataatacaacatgatagaggcaggactaagggg

SEQ ID NO: 18135 - DNA, 2688 bp, Zea Mays
cacggatggcagacaaacttgcgaaacaagtctgccattgaggagtcacatgtgtttcagtggcggttagaagcctacaactctacactcacgtgaagttgtggttggatttgttaaccgtccatgttgagggcaaagcaactcagcaccctaactcagtgtgcacggtccttctatcttaatggatcaaggtgcggtagcacagatggagcttcatgcacatgccctgaggatgagacttatgctccaaaaaggcagactgcaagtgctatcgagcagaattctcattcaacccacagaacatttgtgaagattcagcctcctttgcaagatgctactagagctactggccacccagttccagctgttcatgccactacctcaacttcaggaaaggaggctgcatctagtaacagaagcaatcatcctcacagtcatcatcagatcataagaagtgattatgtacagccatctaagcagacagccagaagcatttctcaatctggaattgctggagctggtgtatattcagagctggttaatatcaggtcctcatctaataatggaagcactgatcaggctccacagatgggtactaactattcttatcagattttatctgataaccattcttctaataatagggcacagaatcaacttaactttcctgagggaaagatggcttataacccttccgtgaacaatgaatttgggaagggttacccaagagctggctatgcaaagccaaagcagagtttctcaggaccttctgtgatggtttccagttcaccatcacaaataaggagtcaagggcatcctggtctacctcctgcaaaatatcattctaatcatttcaattcagatgccaggcaagatgatgtacaaactcggaacccatcaggtcccaatgtgtttagtggttctggcaacaaaattcagggttctacaggaagggtaaaagctcatagtggaggaccccaatctaacttaagatcattgaagttattgcgatcagttgagcagtactaccacacactgcagcaaatgaaatggggtccaatgaccgagcatgttctagacaatcttcattgcaagatagatgcattccaggcaaatcaagtactcaagctgcttcatgaccacactgtcgctcttggcttctttcaatggttaaagaggcaacctggattcaagcacgatggtcatacttacacaaccatgataggcatccttggacaagccaggcaatttggtgttttgaaggaacttctggatgagatgagccgagctcactgcaaaccaactgtggtgacctacaacagaataatacatgcatatggccgtgcaaattatcttaaggaggctgtcaaagtatttgaggaaatgcaggaagctggttatgagcctgatcgggttacatattgtacattgattgatatccatgctaaagctggatacctagacattgcaatggatttatatggcaggatgcaagaagtaggcttgtcacctgatacgttcacctacagtgtcatggttaattgccttggtaaaggtggtcaattagcggctgcttataagcttttctgtgagatgattgaaaatggctgcacacctaaccttgttacttacaatattatgattgcgctccaggccaaagcaagaaattatgagaatgttgttaagctgtacaaagacatgcaggttgctgggtttcgtcctgacaaaataacttacagcatcgttatggaagttcttggtcattgcggccatctggatgaggctgaggcggtttttattgagatgaggcgtgattgggctcctgatgagccggtatatggacttttggtcgatctctggggcaaagctggcaatgttgacaaagcgctaggatggtaccaagcgatgcttcaggatggtttgcagcctaacgtgccgacctgcaattcgctcttgagtgctttcctgaagatgaacagatttcaagatgcctacatcgtgctccagaacatgcttgctcgggggcttgttccatctgtgcagacttacaccctgctactcagctgctgcaccgtgggtcaggcacagatgggtttgtgctgccagctcatggccatcactggacatccagctcacatgttcctgctgtacttgcctgatgcagaagctggtggccagaacgtcagggatcacactggttatttcttggacatgatgcacagtgaggacagagagagtaaaaggggtctaatggatgctgtcatagacttcttgcacaagtccggtctcaaggaggaagcaggctttatatgggaggttgctgcacagaagaacgtgtacccagattctgtaagggagaagagctcgtcgtattggctcatcaaccttcatctgatgtctgagggcacagcagtgactgcactgtccaggacgcttgcctggttccataggcaggttctgacattgggcactggtcctgaaagaattgacattgtcactggctggggcaggaggagcagggtaactggatcttcgctggttaggcaatcgattcaaaagcttctaaacctctttgaatccccattcttcaccacccgtggaaatactggctgctttgtcggctgcggggagccactcaacaagtggttgcacaatccttatgttgagcgcatgcatttattgtaagct

SEQ ID NO: 18136 - DNA, 1685 bp, Zea Mays
acggagcctacataacccttcccttcctcgcttccctcctccccgcgccgccataccctcgaacccgagaggaaccctaacaccaaaacgcccccggaggcagctaggagagctcgaatcaccagccatgtcggagcacgacctcacggcgctgatggcggcgcagctggaccgccacctggtgttccccctgctggagttcctccaggagcggcagctctactcggagtcggagatcctggaggccaagatccgcctcctcagcggcaccaacatggtcgactacgccatggacatccacaagtccctctacggcaccgacgacgtgcccgaggacatggtgaagcgccgcgccgaggtcgtctccaggctcaggtcgctcgaggaggccgcagccccgctcgtcgccttcctccagaacccgcagctcgtgcaggagttcaggcccgacaaacagtacaacatccacatgctccaggagcgataccagatcggtcctgaccagattgaagctctgtatcagtatgccaaatttcagtttgagtgtggtaactactcaggggctgctgattacctttaccagtatcgtgctttgtgcacaaacagtgagcgaaatgtgagtgccctctggggaaagctggcagcagaaatcctaatgcagaactgggacgtagctttggaggaactcaaccgcttgaaggaaataattgattcaaagaacttctcatcacctctgaatcagctccagaacaggatatggctgatgcattgggctctgttcatcttctttaaccatgaaaatggtagaaatgggatcattgatctgttcttccaggacaggtacttgaatgctatacagacaaatgcacaccatcttattaggtatctagctactgcagttgttgtcaacaaaaggagaaggaatatgcttaaagagttgattaaggtcattcaacaggagcaccatagctacaaggatcccgtaactgaatttctggaatgcttatatgttaactatgattttgatggtgctcaacagaaactcatagagtgtgagcaggttatactgaatgatccattcctgggaaagcgcattgaagagggaaattttgtcagtgttcctttgagagatgagttccttgaaaatgctaggctttttattttcgagacatactgccgtatccatcggtgcatcgatatcagcatgcttgctcagaagttgaacatgagctacgatgaggccgagttgtggatcatgaatttggttagaagctcaaaactggatgccaggatcgattcagtatcaggaactctcatcatgacaaccaatcacgtcaatgtccatgagcagattgttgagagcttgaagggccttaatatgaggacctacatgctcgcaaagaacatcgttgagccagctcagcaggcaactcggtgaggatagcagacttcacagttttgagacgccaaggactagtttagagacaactgtaaacttttcgagctctattgtgtggcattggatttcaacacctggaaggtggcttgccgtttgatacagcttggagtattatgctgacattttcaatattttgtaatcggaacttcgtaacagtggatccttctcaatgtattgctattattttatgctgacattttcaacatctttctctattaaaaaaata

SEQ ID NO: 18137 - DNA, 910 bp, Zea Mays
tgaagagtcaaaaacaaaatgctatcgagaagggagaaggccacaaacttcaaaccagactatgatattgatatccatatgaaggtcttagctatgagtgggcaagtatccagtattcttacaggctacaaactgaagatgatacatggattcacttgttctcatttcttgttaatggtttgtgccttcgtagtcttctccgatatattgaagcgggtgccagataagctacatgtaactaagaaggcagtacttcatgtcttccctgctgctctcccgcaatcgctccgactctcatgcctgtgcccgcgccgtcaactctccgggctcgatgtgcctttccacgcagcacccacctccactcacactcccaccgtggtgaccccctgttcgtcgacgcgtcgatccatggtcagccaaccagtgaaaaccttcttcgcaatcactatgtatggtactgccaattcacattttacaagtgttgtttggaaggcatctaccaactccaatgctctcttcttgatagcggctgcacataacctattgtgtttgaagttaggaaaggagattggtgttagtatcggaaacccatgattacttggttcgaggttgctagcgtgccagcactttttgggattttagtgactccttatttaatttactcctgtagcccaacattagctgttgagaagctaaagaacatgggtccagtaacaagaaatgaatgcatcatgattggaacgatgctttttgcactctcactacagatttttgggtaagatttttctttttaaagagtgtttttaaccatgagttgccttgcaatctgaagctaaacttttggtagctgaacttatgtatttagtcgtttacacttttcttggcatcatgcaagtaagtacatatacac

SEQ ID NO: 18138 - DNA, 776 bp, Zea Mays
aagcacatgctggagcttataggggagtttgtgaattgtgtgaagtgcattaggatcctatccccccaagaagtgcagcagatgagcttagatggtgatttggggaacaatgtcctctccaaccaggcttgcagcagctcagatggtgggaatgcctggaagcctcgccgcgaccagaaccctggtaacccttccatcgggttctacgaccaatttgagtgacctgatcacggaaattcgagatgagaattatagctgcaaaaagcaaccagtgtccagccatctacagaattatcgccacggaaagggtaagcagatgcaggatgccgtagacgtcttggcttttatagttgggagaggaaatgctcctcagattagggtatgttctagatatatgtgtagttttctttgttttgaaacaatgtaggcaagaagaatgaaacttacctagagctgttgctgagtcgaaacatcagacagatggttaggcaaaacctgaacttcagacagagtaggcagatctgaagataaagtattttgattgagagtattttgtaattctgtattgaactgccgctggggtttgcttgagacccatgcggcactatatgagtctctctcagttcagaaaatactgaagcagatctaagaggtcctactgattattactatatgtttgatgtgaatggccccatttacaaatggacagtctgtccgtctccacttgtaggtgtaatatgttcaacaacaaccaggttttataacactggcattac

SEQ ID NO: 18139 - DNA, 2115 bp, Zea Mays
atgtgggttctccggagcctcctccgggcagcctcgccgtcgctccgccacagctccgggcgcttcaccgcgaggggcgaggcgctgtccgcggccttgggctccgctccggcgcccgcggggctgctggcggtgagaccacgagccgaaggaggctggcggcgggcgatgtcgaccaagggtaggaccatgcggaccaaggtggagaagcggatggcgagggagaccggccgcacgcagcgggagctccgccgcgccgtcaagctcaggaagaagctcatgacggaggacgagaagttcatctacaacctgcgcagggccaagaaaaaagttgctttgcttctacagaagctcaagaagtatgagctaccagacttacaagctcctcgtcatgatcctgagctgttaacagctgagcaactacaagcatacaagaagattggattcagaaatagaaactatgtgcctgttggagttcgtggagtctttggaggtgttgttcaaaacatgcatatgcactggaaattccatgagacggtgcaagtttgttgtgacaatttcccaaaggaaaaaattaaggaaatggctgcaatgctgacaagattgagtggtggaatagtgatcaacattcataataccaaaacaatcatcatgtttcggggaagaaactaccgtcaaccaaagaaccttatacctttcaacacacttaccaaaaggaaggctttattcaaggctagatttgaacaagcgcttgaatcgcagaaactaaacatcaagaaaatagagacacaactccgtcgtaaggggatcaatccagaggacccagttgctatggccagcatccagcgtgttgcctctacgttcttccgagccatagatgagcagcaaggttcatctcagagatagaaactgcagcagagaagcaatgggaggaagaagaggctgcagagaaagaagaatcttcaagaatgcgatattgggagagggaagatgtagatgcaaggaggtgggatgataatagtgagatcgaggcgtcaggtgaagaatgtggctctggtgatgacagagatagtgttcttggactcaacaatgatatagacacaggtgatggtcatcctcggcaattcaaaagcatgaggaacgagaggagcagatccagtggcaggcagatttccattcctgggggattcagaggttccaatcggattccagggaattcagccgatgcttccgacggcactatgttcagaggcagcaacggtgatgagtcggacacggaagacgatgacttgtggatgtcagattacaaggggggagagacgaactctagagccccaaaggtgaatttcccgaatttccacagcagcggtgaggatagtgatgacaacaggaaaaacggtggcaagattggtaaaacgaagaaaaatactgatgaaagttgggacagtgactgactgagggctcaagaaagagtaacgttgatccgtgatgcatggacgaaggtcggcaccaatggttgtcaatgcaggttctttcatcggtggtcttgctcgcatacttgtccaacggaaacttggaggaggtagaagagtaggcatggttttggtgagaacaactgtttgaacgtttgctgcatgttttcagacgtgttctattccagttggcatggtaacctgaaaagttgttgaagcggatgacaaagccagaacaacactgcacgacctgcacaagccggaggttcctgaagttcggtgccgacaaacttgatatgtcgaggttcctgaaggtttcagaaatgtgaaatcctttctgcgatcacatttatattctcatattcttgaagttttgatgtgagcgaaacatgcacgtagatgtgtcttgcgtgggagagttctcttattttcggtaaattgcccggtacacgttattcagagttcagagtgtgtgaagcttttagggcatgtttggttcgttacctcaattgccacactttgtccaacttttctgcctaaggttagttattcaattcgaacgactaaccttaggcaaagtgagcagttagccacaaaccaaacaagcccttactctgttttaatatcgtgtgtttcagcgtca

SEQ ID NO: 18140 - DNA, 741 bp, Zea Mays
cctcgccaccgtcaggatcttgcaaaggctgtgccagaggagcacaagaggtttctgcatgatttggtttggatacatgaagaggaaaatgtgccagttgatatggatggaggacaaatcatctgcaatctgattgctgtccatgctggcctagagaggaccatagatttgaatgagcaacttagagttttaagaactagagacacaagggtgccaaaggttcaaatgcttagtgggaggcaagatgtttgggacacacccaagggtctggccggcaagcagactattattgtaagtggccaccacgggaagctccacatcgacggcctccgatttataatcgacgaaggtggtggttatgaagacaaacctattgctgcgatagtttttccttcaaagacattgatcagaagtaccgaggaagcgggaaccacatcagagaggtgatctagagttctagacatcgtcaggagcagtgaacacggaggcacagttttttctctcttgaagttactgcttgtagtcatgtactcatgtcaaacgacaataggaataacgtccaaaggcaataagttggtgaaccggacctgcgttttctcaatttagtcactgatgactatatgtctatatatattgtaccttgatgctgtcaatttagacgagaccgtacatcctctttttttagggcaataaactttactccctgtcctcaaatatttgtacacaaagagtggtggtgag

SEQ ID NO: 18141 - DNA, 1709 bp, Zea Mays
gcgttgccttcttcatcctcgcacacggcaggcacgtgaccgacacccccagcgcacgaactccaaaatagcgagccgaagggggccacgaccacgagtcctccacctccctctccgccgcgtcgcacgcgcttgacgcgcgccgagagccgaatcggagccacgaggcagccgccccgggcggatcgatcctagggccagggcatgggcggaggggacgccgacgccggcggcgagcccgcggacgcgcaggccacgctccacatccggtgcaccaacggctccaagttcaccgtgcggaccgacctgggcgccaccgtcggggcgtttaaggcgatcgtcgcccacagctgcgacgtgccggcgccgcagcagcggctgatctacaagggccggatcttgaaggacgagcaaaccctagccagctacggtgtggagacagaccatacaatccacatggtacgtggtgctgtgctatcaccaacatctactgcacctgcagccaaccaagaacctaccactgctgctcctgccagttccccggcaacaggattgggtggcttgttgcaaagtctgggtactacaggcgctgctgctaacagtgaggggttgtttggatctgccccccctggattagaccaaatgcagcaacagctagctgaaaatccgaacttgatgagggaaatgatgaatatgccactcatgcagaatttgatgaacaatcctgaactcatacgcagtataataatgaacaatcctcaaatgcgcgagctcattgaccgcaatccggatcttgctcatgtcctcaatgatccaagcattatgcgccagacttttgaagcagttcggaatcctgaactcatgagggagatgatgcggaacacagacagagccatgagcaacatcgagtcttctccagaaggattcaacatgctccgtcgcatgtatgaaactgtccaagagccttttctgaatgcaacaacaatgggtagcgagggtgatcgaaattcgaatccattctctgctcttctaggaaatcaggggtctaaccaagcaagagactcagctgcaaatggaacaactagagcttcagaccccacatcagggtctccagctccaaatactaatccacttccgaatccttggggctcaaatgctggctctgcccaaggagcagcaaggtcctctcctgctagcaatgttaggagtactacagcaagtggcctaggagggttgggttcagcagatttgggaagtacgcatggtgccagtggtggtggctctgatgctaccttgttgactcaagttttgcaaaacccaactatgatgcagatgatgcagaacattatgtctaatcctcagtccatgaatcagctgcttaatatgaatccaaatgtacgtaacatgatggaatccaatactcaaatgagagaaatgattgagaatccagaatttcttcgccagttaacatctcctgaaacattgcagcaattaatttcgttccagcagtctttgatgtcacaacttggccaacaacaagctggacaggagcggacacaatcaggctctggtgcaggcaatgtcaacctcaacaccttgatgaacatgttcagcgggcttggtgctggtggtggcctaggtgttccaaatgctcctaatgatgtttttttgaagttttctcatcaacaaagtaatgtcaaaatttgcag

SEQ ID NO: 18142 - DNA, 855 bp, Zea Mays
ccacatcgcagctccccttcgatgtcgcacgcccgcgcctccccgctgtggcgctgtcccctccctggcacccaccctcacaaagcatcagcctctccaatcagacgcgagccacccaccgcgcgacctcagggtgcctgtgcctgctcccgctgttccttcctcatggccaccgcctgccacctcgccgcgccgctcggcctcgccccgttgccccgcggctgcgcctctgctggcgtcgtggccgtcgtccggtgcggctccaagatcccgagaggcgttgctgtcagggcgacgtccggcggcgagggcgccacggaggaggtgccggagattgtgaaggctgcgcaggacgcgtgggacaaagttgaggacaagtacgccgtggccaccatcggtgtcgctgccatcgtcgcgctctggacggtagtaggtgccatcaaggccatcgacaagcttcctcttctgcctggtgtccttgagattgttggaattgggtatacagggggaggctctgatcggcaaaatcaagagcacttacaaagaaatcaccgggagcagcaactgatcgaacatcatttacaagatgggttcttaagcatatggtagaattgcatccgtaagcactgaagctgccatgcaagtgaaagtgcttctggtcccgacctcagtcagagaaaaaaaactctgcagttgagcaagccgttttactttgtttcagtgtaatatttatgacgtattcccagttctttttccggactactgtttactacgaaaatcccgatctgtgtaaaaatgtgctgcaacaaattcaaaagaaaacacaaatagtacaacctcatgatgttcgtaata

SEQ ID NO: 18143 - DNA, 1820 bp, Zea Mays
gtcgatcctcctcatttcggcactgggccccactcgtcactcaccctttcaggcctccacggcacctcccgacagggactcccctcctactcctgctctcccagcctgcctttacttctcccgaatgctcgaggcctgcaaagctccagcacatccaatcgcacgacactccctgctgctctctgctgagaggtgctagatctcggactcgccgttgatttgattccaagttaaagacagcgagcaatccatagattgaccggtggagagcgagagaaagcgagagagagaagggaattggttggtaggtggagaccggagggagagctcagctcaggagattgatgcttgcatggtgatgcgggcgcgggcgatggggctgagcagcatccggcgggaggtggccgtccctgtccccgtcgaaggatgccggcatcggcgaggaggaggagcagcaggcgcggtaccccgtgacgttcgcgtacctgatctcggcgtcgacgggggacgcgtcccgcgccgcgcggctgctggcggcgctgtaccacccgggcaacgtgtggatcgtgggcaggcccaacctggtaacctaccgtggccccaccatgctgaccaccacgctgcacgccgtcgccgtgctgctccgcctccgccgccgctgggactggttcatcaacctcagcgcctccgactacccgctcgtcacccaggacgatttgatggaggcgttcgccgggctgcccagggacctcaacttcatccagcacacgagccacctgggctggaagataagcgggcgcggccggtgatcctggacacggcgctgtacgaggacgggagggcggagctgatccgcccggtgaacatctccaccaacctcaggaggctgcccacggcattcaagctcttcacagggtcggcgtggacgatgctgtcgcgggcgttcgcggagtacgtgacgatggggtgggacgacaacctgccgcggacgctgctgctgtaccacgccaacatcgtctcctcgcccgagttctacttccagacggtggcctgcaactcgcgccggttccgcaacgccacggtcaaccacgacctgcacttcatccgctgggacaccccgcccaagcagcacccgctctacctcaccgccagggactaccgccggatgctgctcagcggggccgccttcgcgcgcaagttcagggacggcgaccccgtgctggaccgcatcgacagggacatcctccgccgccgggaccccgccgcccacttcgcctacggcggctggtgctccgaggccggcgaccaaaacggcggcgccgcgctctgctccaacccgcaggagcccgggaggcgcggggccgtcaagcccggcgccgggtccaggcggctcaaggccatgctcaggaagacgctgtcgccgaggaatttcaggaggcagcagtgtaggtaggggaactgttctgttatgttctgatcaaacaaacaggtcgttgactcaattttgtatgtatagaaaaggcagatctgaaacgcatcaaagcggcccaaagccaattttgttcagttgattcgcacaagtctgaattgaattgtagtagggagatactcctggtggttgatcatctcatacacggaataataatggaaggggcattatgcaaactgtttagttatatggtactaaactgtttagtaatacatagatgctcgtcaatttgttggtgacaaacagcaaagccaatgaggaaaacatttgatttatcacaggaaatagcgaaacgaatagtgcgacctttcaatcgagtccaacattgtca

SEQ ID NO: 18144 - DNA, 1473 bp, Zea Mays
ccccgcgcgcgtcttcctccggcatgcgccagcccccccgagctcgcccgcgcaccaatctcgccgtcgggtatcccgcccgcgagcccgcgcaccaagctccttccccgcgacaagctccctcccccgcgacgcgtcttcctcctcgccctagatcgccgccccagctctctcctcaccccgcaatccccgccgcccatgctccgctctctactcgccccagatcgtcgcccctgttcgcgtggattgggtaccggtcccaactatctccatggattgcgcgtccgcgacaacccaatctcctcccggtctccatggaagaaggaaattcctgcttgagccaattacagaaggccctgatatttgtcaaattgatggttgtagtgttaaattggaatacaagaggaggcaagtcaaatatggtttgtgtgacagcacgttactaacttactctactatatctgcatgagaaaggatgaaccctgtttgcatgtatactaattaatctacggattcattaatgtgtgaataagattttatttaattatgacagcaaacgtgacatgccattacaatttcgtttatgcaaaaaagtaagttgcttatagtttagcctttggtttcaatttgcactttatagaattatactggcagagctcctgacggagcacctgacggagctcgccacaggtaccaaacggcgcagcagcagttgatgtgcaacccgagtgtactgccgctcgaggaggccagtaagtgccaacaacatgaatagccaaagcagggaaatagggctggcgggggcacatgggtaacttggtcctggagcattggagaaggagcataccacaaggaaaccaacacgcttcttactctagcagagttccttgcttcctgaaggcctcatagctcagattactgggttaacgaacaactcatactttgatggagcacatgaggttcgacattatgtcaggaagcattcgaatcttggtcgtattgtgcttgaagttgctaaggactcgcaaatcccccgccaagcaaactgctagaaatcttttcagaggtggagatgatgaagatgatagtgctgatgccgacacaaatgatcctgttgtaccttggtcattaggtagagtaggagttgggcatatggtgtacatctccggtttgacttgtgccttgagttcaacaaatatgaaagtgctgagagaggtggcatctagaggacgtcatgtcgaacgtgtgaagaatttttttagaaatatgtatatttgtgcgaaactttttagaaacttgactccattttattttctatgttactctcggctttgtttcctatcctttccaatgacttgctatgcatttgcactgtatttggcatgtttaaaactgctacacaaaacttgctatatattttgtccaaaaatactatatccttgttatgattgattgatctttattttgtctgct

SEQ ID NO: 18145 - DNA, 1441 bp, Zea Mays
tacaaaattgttgctcattttttggaatctagaggtatgttggaagaggctcttgagatagccacggatgctgactacaagtttgacctagctgtgcagcttggaaaattagatgttgcaaaggctatcgtcatagaagcacagagtgaatctaaatggaagcagttgggtgaactcgccatgtccacaggcaagctagagatggcggaggaatgccttcttcaagcgaaggatttaagtggcttgttgctattgtactcatctcttggagatgctgaaggaattgaaaagcttgcttctttggcaaaagaacatggaaaaaacaatgttgctttcctctgccttttcatgcttggtaaagtggaagattgcatacagttgcttgtagacagtagccgtatacctgaagctgcactaatggcgcgatcgtatcttcctagcaaagtaccagaaatagtagcaatttggagaaacgacctcagtaaaattaatccaaaagctgcagagtctctggcagatccttctgaatatccaaatttatttgaagactggcaggttgctctaactgtagaaaaaagcgttgcttctcagagggatcattatcctcctgctgaccaatacttgaatcatgctgagaagtcaggcatgattcttgtggaagctttcaaaaggatgcaggtcattgagcatgaggaacctgaagatgcagctgaggaaaatggagaacctgatcaacagtgctaactgaacatgaataggggccgagggaagcacaacgcattggctgcaaatgttattttttcccgagggtaacaaatgtggcccccagttttaccctgaagcaccggaaactggtgatgcttgtggccattggaggccacctgatgcttgtccgatctttctgagtgaaccccaagcttgacatattgatgcttgctacacttttggtgtcgatatgcttcttctgccaacaacataggcaattctttcttctcggatcatctgcggacccgatttctatgcgctcgaaccaatgaactgggtggggactgtggagccattttgtgatgaatagttcgaataatcagtatagaggtacgttgtaagatatgccagattaccatagccatcgaattctcctaggagatgacagtttttgttagccattcattgtaatgatgttacttgataaggaaggttacgtgtagtatatgattgcggttgcgggccgagggttttgcccatgttatacttatatatagtggtatcaatccatcggatcggaggctctcgtctactgatgcctaatcaatgccgatgactgcgagaattcaatgcctagatatgcagtgtaacagtgtctcgctgcacacctattcatcgtttcaaaccatggtccatggaatttattttgatgctggaatgctgcggcatgtacaac

SEQ ID NO: 18146 - DNA, 1186 bp, Zea Mays
gctactgccgatccgttccctcagcccctcacaccgcttacttgactcctcccgaacttccacatctctgctctgccttcccagtctcccatccctgaaaacctcacaaaaccctcgctcgctccccaccaccccgccgcgccgccgcctgtaccagctgcgtcaagatgagtcggcaccctgaggtgaagtgggctcagaggatcgacaaggtttacatcactgtacagttacctgacgcaaaggatgctaaggtcaatttggatccagatggtgtcttcacattctctggcagtgctggtacaaacttgtatgaattgaaactagatctgaatgacaaagtaaacgttgaggctagcaaaataagtgtgggggtcaggtccatattctgtatcgtagaaaaagctgaagccaaatggtggaagaaactcgttcgagatgatcaaagggcacctcactttgtgaaagttgattgggacaaatgggttgatgaagatgatgatggtgctgatatcaacatggatgggatggacttctcgaatttcggtggcatgggtggtatgggcggcatgggtggcatgggtgatatggctggtatgggtggtcttggtggcatgggtggtatgggtggtcttggtggcatgggcggtatgggaatggatgatttcgaagatgagagtgatgatgaagaagtgtcgaaacctcaagctgcggacaaggctgttgaggctgaggagacggagtcagcggaaaccaagattgaggcggctcagagcagttgaagatgcttatgatctaagctagattgtatcctcatgttaattctgctgaatcggaggacaaaccttacatttatggtgctggcaagtcccagtggcgtgccatgaaaatttacgttccgtcttttaactgggtatccgagtgtcgtgctcagcatattatggatattatttccgtaatgcttcctttggtcgccaatcatgtggtgaagagtttgttttactggattgctttatttgttttttggtcgccaatcgaatggtctggtcaaaaggactagtggcgacgtgattttgttatttggttctctacccagcaatacaactcccacggtaaagtgctacagaggagcaccttcaactgagcaccttcaactgtttctaatatttattcttccaatattgct

SEQ ID NO: 18147 - DNA, 1746 bp, Zea Mays
cgatggatatctcattctgctgaagctcatgaagttcttgcatccatgaccccacatgccttaggtctatctgcaccagaaagaagtgaatcgtttcaaggtgtctatatactttttggatgctttaagaaagggcctggaagcattgcacgggtaacatatttgtctgacagcgattgattttgggaaccaatttggtaatcagtacaatggagtgcaacagagaagaagccttgaaagccagggaaattgctgttaagaagttggaaagcagagattttgttggtgctaaaaggattgcccttaaagcacagaggattttcccagagatagagaacataccccagctgttaactgtctgtgaagtacattgtgcagcagaagcaaaagtaaatggaatgttggatttttatggaattctccaagtagaaggaacagcagatgaggtgaccataaagaagcaatatcgtaagcttgtcctctcacttcaccctgataaaaacagttatgctggtgcagaatctgctttcaagtttgttgcagaagcatactcaacattgtctgatcgaaccaaacgatatgcatatgatgtcaaatggagggctgctcccaaagttgcaccaaagcaggctacacaaccaatgtggactacagagccaatcaacaaaaatagcacaaatagtagtgcagcaggatatggaccttggacattttggaccgtatgcattcactgtaaaacaaaatataagtaccatggtgacatactcaatcgtcagatccgctgtcagaattgcaggcagaatttctttgcacaccagacaagtacagaggatgtgccttctgcattctcatcaaaaacagcaaatagtgctgcgcagcaaggctgctctacaaatatcttttctagagagaacaaagaggggcctgtgatggaaggagttaaattttcagcaaagaattctactgtaccagattttggtgacaggaaaaacctaggtggtggggtggatacatcagcagggccaggttctgcagaaatccctactccacggagatcttctaggagaaaggcttgtgctgatgccaacaacatcctgaattctccaaagaaaaagagtcggacactcaaagattggttctcaaatgctacctccagttctaataaagtagttgatgataatgttgcccatgctgatggacatgttagtgaacctcatgtgtctagcaaaacagataatcaagatagttgtgttgtcaatgaaggcaataaaagaaacactaaaacaacttgtgatccacctgctgagaagccttggaatactgggagtttcacgtaccctgacccagaattttttgacttcgacaagtgcagagatgtcaaactgtttgcagttgatcagatatgggcactttatgatgaattcgatgccatgccaagattctatgctagaataagacatgttaataccaccaacttcagagttaagtacacttggctggagcattctacagtgaatgatgatgaggaaaaatggattgataataaacttcctgtggcttgtgggaactttacgttaggaaacacagaggagtcacaagatcccctcatgttttctcacatggtttcgtgggttaaaggaagaaaaaggggttcttatgtaatatatccaaatataggtgaggtttgggctctttataagggctggagtatgcagtgggtctcagatgcagacagtcatagatcct

SEQ ID NO: 18148 - DNA, 1740 bp, Zea Mays
agacaacacaacccatctctgcgacctgcgacaactacacgaaaccacttgatttctgaaaggcaggccacatatataccggttcctcacagagcgtcgtcgcccggtcgccgtccgtcccaccaccggatcccgcccacccgccagatccaggtgtccagatccccgaagggcgaaggcctgaacccctgcgcatatccccatggagccctcgccggcgcaagcgggcgcgtcggaccgcgaccgctcgccgcctccgcccccgccaccgccgtcccagtcgtctaccgcagcgacgatctcatcgccgcttgccgtcgtctgcagtttctggaaagattttgatttggagaaggaaagaagtggattggatgagcaaggtttaaagattgcggagaatcaagaaactagtcaaaagaacaggcgtaagcttgctgagaacacacgggatttcaaaaaggcatcatcagatgagaaactcagtttactcaattctttgctgaagagttatcaagaggaagttgataacctcacaaagagagcaaagtttggagaaaatgcatttctcaacatctatcagaagctctatgaagctcctgatccatatccagctcttgcttcaatgactgatcaagaccagaaattgtctgaactggagactgagaaccgtaagatgaaactagagcttgaagaataccgtgctgaagctgcacacttgaagaaccagcaggcaacaattaggcgacttgaagagcgtaatcgccaactggaacagcagatggaggagaaagtaagggagatggttgaaatgaagcagcgaagcatggctgaggatagtcagaaaactctagaagccctgaaagatagggaacggtcattgcaggaccaactaaggcaagctacagaaagtgtaaagaatatgcaaaagctacatgaatcggcgcaaagccaattgtttgagcttcgcactcaatcagaggaggatcgagctgcaaaggaggttgaagtcagccttctgatggatgaagttgaaagggctcaagcacgattagtcagtcttgagagggaaaagggggatctgcgttcacaattgcagacaactaatgaggatgcaagcaaaagtagtgactatttggaatcaagtgatatacttgagagttccttgaacgccaaggagaagattatttcggagttgaatgcagaacttcgcaacattgaaagtactttatcaagtgagagagaaatgcatgtgaacgagcttaagaagttgactactttactcactgaacaggaaagtgctcttatggagttgaagaaagaactccaggaaagacctacacaaaaactggtagatgatctcaagaaaaaggttcagattttgcaggctgttggttacaactccattgaagctgaagactgggagcttgctactaatggtgaagaaatgagcaagttggaagcattgcttctagacaagaaccgtaaaatggagcatgagctaacacaactgaaggttaaaatatcagagaaaacaagtgttcttgaggaagctgaaaaaaggattgttgaactaacttcaaaggttgaagagcagcaaaagctgattttgaaacttgaggatgacatactaaagggctacagttcaactgataggaggggctcactcttgaatgactgggatattcaagaaatcggctcaagtgaagcatctgagacatgctagctctgttcttaaggcgt

SEQ ID NO: 18149 - DNA, 123 bp, Zea Mays
gctacgcggttgttagtattcgaaccgtcgacctcaccctcgcgcgtaccctcccctaccactccgtctatgacatgtcttgtatctagtttgtagttgttttctccacatattacaaccatt

SEQ ID NO: 18150 - DNA, 3720 bp, Zea Mays
tcttacttacctatctcactgagaccttaagtcgagatgctgcttttttgggcccagatgataatcaatatgctattctggaggaagatagaactggtctgaatctctttagtctcaaagctgtagctacaaaggaagctcttgaaaataatgctgctgtgcttgaagaaaacacttttgctgataatgctgctagtgctacctcaacggaacgtcaaggtcctctacagtttacttttgaatcagaggttgatcgcatattttcttctcctctagaatcaaccttgttgtatgttatttctggaaagcatattggacttgcgaagcttctgcagggatataggctgtctgcagacaacgggctatccattacaacaaaaactgatgggaagaagtttattaagttgaaaccaaatgagactgttcttcaggcccactggcaaacaaccctaagaggtcctgtggtaggaatattgacaaatcagagggtgctaattgcttctgctgatcttgatatactatcaagcagctcaacaaagtttgatcgtggtctcccatcaatatccttttatcttagtcttgcatatacccccctccttatcgtgttatgcaatcacacttgttatctgttctaaataaccatttctttggtgagcacttaaccattttatactatcggtcaatgttgtgggttggaccagcacttatcttctcaagcgcaactgcaataagtatgcttgggtgggacaacaaagtccgatcaatcctctccactagcttccctcgctcagtattacttggtgcattgaatgaccgcctactgcttgtaaatccgacggatataaacccaagacagaaaaagggagtggaaataagggcctgtttagttgggcttcttgaacctcttctcattggatttgctaccatgcagcaacacttcgagcaaaaacttgatctttcagaagtcctgtaccaaataacctcgaggtttgatagtttacggatcactccaaggtcattggacatattaactaaaggacctcctgtttgtggagaccttgctgtatcattatctcaagcaggacctcagtttacccaaatcatgcgctgcaattatgcaatcaaagctctccggttctctactgcgctgtcaattttgaaagatgagttcctgcgctccagagattatcctcaatgccctcccacttctcatctgttccagcgtttccgagaattgggatatgcatgtataaagtatggtcagtttgacagtgcaaaagaaacttttgaggttattacagatcacgagagcatgctggatctatttatttgtcacctgaacccaagtgcattgcgacgccttgcacaaaagttagaggaatctgctacagattctgagctgaggcgataccttgagagaatattaagagttcgttcgactggatggacacagggtgtattcgccaattttgctgctgaaagtatggttcctaaaggccctgaatgggcaggaggaaactgggagatcaaaacacctaccaacattaagaatatacctcagtgggagcttgcaggagaagtcatgccttatatgaagacaactgatgctggtatcccatctgttgttgcagatcatattggtgtgtacctgggtgtgatgaaaggaaggggtaatgttgtggaagtaagtgaaaagagtttggttaaagctatagctgcagctagcagtgagaacacacagccggtgtcttctgcatcagcagagaaaagtaaggcaattcctcgtggtgattcggttggtgatactttggcaaggcaactgggagtccagattgcatcttctgatgaacaggcaaaagctgccgaggacttcaagaagactttatatggtgttgttgatgatggaagtagtgatgaagacgagtcaacctcaaagactaaaaagatacatataaggatacgtgataaaccggctgcacctactgtagatgtcaacaaattgaaagaagccactaaacagctaggcttgggtcctccgctgagtaggacaaggtcattatcagggacacctcaagacttcaatcaggctcctacacaaccaggaggtccagccgcagctgtttccccagcaatgccaaattctgcgattgatttatttggaacaaatactttagtgcagccgcaagcaccctctagttccacaggtcctgttattgcaggcatgggagtgacggctgggccgatccctgaggacttcttccagaacactattccatcgcatcaacttgcggctcaactacctcctcctggaatagtcctgtcacggatggctcaacccgctcctggcattgaacaaggccgaccagtacctaatcaaatgatggctaatgttggtcttccagatgatggggtgccaccacaagcaccaccgcagcagtcccagtttcctccgcagcagtcccagtttcctcagcaaccaggcattcctatggattctattggcctgcctgatggtggtgtccccccacagagtcagccacttccttcacaaggccagtttcttccttcacaggcacagggctttcaacttggtattcctgctccatcacaaccaattgatctcagcgctctcgagggtcctggagcggcgaagcaagctgctcgccctccagcacctactgctgtgcggcctggccaggtaccacgcggggcccctgctgcagaatgctacaagatggctcttgctcatcttgagcagaatcagcttaccgatgcactatcttgtttggacgaagcattcttagcccttgcaaaggaccagtcacgtgaagccgacatcaaagcgcaggccaccatttgtgctcagtacaagatcgcagttgctctgctgcaggaaattgctcgtctgcaaagggttcaaggagctggtgctctcagtgcgaaggaggaaatggccaggctatctcggcaccttgcttccctgcccatccaggccaagcacaggatcaactgcatcaggaccgccatcaagcggaacatggaggtccagaactacgcctacgccaagcagatgctggacctcctctactccaaggcgcccccgacgaagcaggacgagctcaagagcctgatcgacatgtgcgtccagaggggcctgacgaacaaatccatcgacccgttcgaggacccctcgcagttctgctccgtgaccctcagccggctgtcgaccatcggccacgacgtgtgcgacctctgcggcgccaagttctcggcgctctccgcacccggttgcgtcatctgtggcatggggagcatcaagagatccgacgccctcgctggtgggcctggacccgtgccgtcacctttcggctgaaggtcgagtctgctcctttcgtcctccatcggtcctgatattgtatctatagtgttcagtttgcgttcattacattcgattcgttgcagcttgtattgtatgtagcctttttgacgtgtagcacgcttggtgttgagagcaatgtacacctgtactgttgggttggttgtgattatacacgcggttttttttggagctagcaatgtaaggtgcatgtgcatatctgagacgcgaacgtcgacgtgaaacgttctagtctccatagttggtaaatacagttactgcagaaactcgcatctatacgataataacagtgatagagagacctaagggattaattgaatgga

SEQ ID NO: 18151 - DNA, 773 bp, Zea Mays
ctcgtctccctccgctgtccgattgtgcgctgtcgcagcctctgccctctcccagcccgctcctccatctccggtgagacgcgaattgaatcgcatcgaatccatgggcagctcctcgaataccaacacgagcggcggggccagcgacaaggaggagaagaagaaggaggacaagatcaaaggcaaggactcgtcggggccatccttcaaggagaacgaaagggtcctcgcctaccacggccccctcctctacgaggccaaggttcaaaggatcgaaaaccatgaagatgaatggcgctactttgtccattatctcggttggaataagaactgggatgaatgggttgcaaatgaccgcttgttggaattgacggaggaaaacgtgcgcaaacaacaagagcttgataagaatcaggtagttgacaaaacaatgaagtctggacggtcaacacagcataaaccaaaagtctccaatgcggatgcaaaagctgataaagatgacactaagagtctcatttcagtgaaggggaagaaacgtaaaagtcagcttgggactgagattcaggacaaggaaaaaagatcatcacatagtctactagtgttgcagtttcctttgccactgaagaagcaacttgtggatgattgggagtttgttacgcagatggcttgtgaagctaccacgatcacctactgttgatgatattctaaagaagtacttggaacaccgggcaaagaaggatggcaaaaagggttgtttccatcagaatgttgac

SEQ ID NO: 18152 - DNA, 1032 bp, Zea Mays
tgtcctgtctatttctaccgtctcacctctcgtcccgtcttctccacgatgggccacgccacaccactgagcacccttcctccctgttcttgcctctgtcctatactactactactacccatctttagccgccgcgtgcatgcaagaagagaaatagccgccgatcgatcagcgctcgaccgacccgtcatccttgacgaacgaccagctaggaaacaggaggcaccttctttgcacgtgtcagtgccagccagacgaacccaaggtctgtcgaactgcacggccatccgggagctgtacctggcgggcaacaagatcagcgacgtggagggtctgcaccggctgctgaagctggcggtgctggacctgagcttcaacaagattacgacggccaaggcgctggggcagctggtggccaactaccactccctcctggcgctcaacctcgtaggcaacccggtgcaggccaacatcggcgacgacgccctgcgccgggcggtcacgggcctcctcccgagccttgcctacctcaacaagcagcccgtgaagccgcagcgcatcgcgcgggaggtggccacggacagcatcgcgcgcgccgcgctcagcggctcggacagccggagcatccggaagaggacgtcgcggcggctcacgcagagcccccgctcgtcgtcgttgaccagggcccgtggcggcggcggcggcggttcacccacaccaagaaacacctctcgtcgtcgttgaccagaagaaccaactgcgtgattcgcgttgctctttggagacgggagacggtggcgtgactgcgtgcaggcagactcagacgacaccatgattcggcacggcgccagcatgatatgagacaaaccaagtatataaagcaagtatgatgtgagagaattgcgatgcaacacataatgtacatacttgttagggagatattgcttagattaatactacgaccgatgcatctttgtacctgaaaatatcaatttgagcctggttgaagatgaacatccatccaacatcgca

SEQ ID NO: 18153 - DNA, 711 bp, Zea Mays
gtttgttgccaccagttattactgaatgaattagcaatgctgtagcagcaacacaacaaccatgagtcttgcttgtcttgtatgccatggcatgagcagctcctcacactctcttagaagctactcggtgtcaagttcagaggaggaaagccgatgtggagctgctgtggcctgcttagctcgaagagtaacaccagctggaacttctactagtgctgggacatcgaaagtgaccccctttccacccattgtgagtggtcaagttggcacggagggcactcctcgacttcaacgcagccgtgctgtgtccagggaccttgttagagattggaactttgacgaagtaattgtcgcaaattagggtaaccttcaacagttgtcagctgggctttgtgctctatttatcagggaggagattccttcatttgatatatatttcttttcatagtagacgtctggaagtccattactatatacttaatgacttagacgaggaaatgctcgagagggataatatctttcaggagcgatatctggattgttgcagttatatatgctcgcgtatctatgtagctaggataaatgtttaagtgtcttttcctattttcaaatatgtataagttgacatgtacctttatgtatattattatgaacgaatccaacttctgacctcgatctgatattgaaaacggaagtgatgttttggtgcat

SEQ ID NO: 18154 - DNA, 2153 bp, Zea Mays
caggaggcgatatagaggggagaaaaggaaaatcgtccatccaatcccaacttggactcggtggaaatggagttcttcaccgagtacggagaggcaagccagtaccagatccaagaagtcattggtaaaggcagctacggggtagttgctgcagctgtagatacccgcaccggtgagcgggttgctatcaagaagatcaacgatgtgtttgagcatgtctcggacgccacacgcatactgcgggagatcaagctccttcggttgcttcgtcacccagacatagttgagattaagcacatcatgctccctccatctcggagggagttccaagatatttatgttgtttttgagctcatggagtctgatctccatcaagtgatcaaggccaatgatgacctcacccctgaacatcaccagtttttcctgtaccaacttcttcgtgctctcaagtacatccatgctgctaatgtatttcatcgtgacctaaagcccaagaatatactggctaactcggactgcaaactgaaaatatgtgactttggtcttgcccgtgcatcatttaatgatgccccttcagctatattttggacagattatgtggcaacgaggtggtaccgggcacctgaactatgtggttcttttttctccaaatacactcctgcaattgatatttggagcattgggtgcatatttgctgaacttctcactggaaggccactatttcctgggaagaatgttgtacaccaattagatattataacagatcttcttggaactccatcatctgagaccttatctcggatccgaaatgagaaggccaggagatacttaagctgcatgcggaaaaaatatcccgtgccctttactcataaatttcgaaatgccgatcctttggctcttcgtcttttagagcgtttacttgcatttgatcctaaagatcggcctactgcagaagaggctctagctgatccatactttgcatcccttgctaatgtggaacgtgagccatcaagacacccaatttctaaacttgagtttgaatttgaaagaaggaagctggccaaagatgatgttagagaattgatctatcgagagattttggagtatcatccacagatgctggaggagcacatgcaaggtggagaacagattagcttcctctacccgagtggagttgatcggttcaaacggcagtttgcacatcttgaggagcattatagcaagggagaaagaggttctccactgcaaagaaagcatgcttctttaccaagggaaagagtggttgtatcgaaggacggtgatactgatcaacatattaatgaccaggagagaagtgcagattctgtcgcccgcaccactgtgagccctccaaggtcagaagacgacgacatgagcgatgtgaaatccacaagcttaagctctcggagctacctgaagagtgcgagcataagtgcttccaagtgtgtcgttgccacgaagaaacacccggaggacgatggaatcgctgaggaaatggaaggcgccgtcaatggattgtctgaaaaggtctccaggatgcactcgtaagcaggactgcccctggcaacagcaaccttgttgcaaggtttctgtctctggtacactgtattccgacgacagccttggaaaggcaaacactgtatgtcacacagcagtacagcacactgtgctgcgaggttgggttttgcttgcgtacatccatccacagctagttcgactttacctgggtggaagaggaacacaccaccgcctgatggccctttcttcatcgtctgcatttccaccgtgtcatgccagcgctgcgtggcacctctagaaggtagaagccctgcatggattcatgaagaattcctaagatgtagcactagtcagtgcatggaggaaacatagtcggcctgtcgaccatgagatgttttcttgcaaatggagtctggacctatggttttcagttttattacaacggcttctgccgtaggaagtgtcagcagtgtatcatccctgtaatacccaatttataagagaccatataaaaggagaaaaatcatttgctttatgtatgtgtataacatatccacttatcatcacatgtgaatgccatatttaaagataaataactaataaaaagttataccact

SEQ ID NO: 18155 - DNA, 201 bp, Zea Mays
ccgaccatgcgtaccaccggcacgagttcaaaccgtccagccaaccaccataactgcccggaattcgccatggagagcgacgcgcgcgaaaaaaaaaaaaacccacaccggccatcgccatacgacacggcacatcgcgttcgcgttctctcccacgcgaccgacgcgcgacgccgaccacggcgaggtgtccgcccccac

SEQ ID NO: 18156 - DNA, 2891 bp, Zea Mays
caatgtatttgcatctagttggcgtgaggccaatgacctcatccgatccctttccctttcccatccgcgcgtccctactcctccccctccctcctcaacgacgcgagaagacgcaatcctgggagctccgaaccctagctcctaatttgagccccggtgtcatcgattcctcaggagcccgccgcgattcggctcccgtagcagcatagggctccaccgctccccagctgcatcagcatcgacggcggcggcgcgccgccgcgactacgctcgaggaagcacctagtctcggcgggttctcgttcttggaggccttccataaggcggtttcgtggtgtccgagcccggatctacggcgatctgcaagcggaaggcgatagatgaggcgattcagtggtaacccccaatccggtgggtttccggctggcagaggcggaaaggttcgggccttcggcgggtgatcagatttctccgtgcggcgcgcggcttgtgtctaccgcaacggtgtaggactggagcgcaggagccgacgaggcggtggagatacaaaaaaattgcttgcttgtacacttgttcatgttcatttgttcctgctatctgttgtggtttaaagcatcaattttccgctcaatttaagggcgaagacactttttttgttccttccttgttggtttctatggaataatctctatattacagaagaggagtgtggaaaagcaacaaaaaagaggaatataaaatacaaaaaagatataaccagcagaaaaaagagattttttttgagtgggcaagcaaatggctgtgtattacaagttcaagagtgctagagactttgactcgattccgattgaggggcaattcatctctgttgccaacttgaaggagcggatttttgagtccaagcatctcggcaggggcacagattttgaccttatgatctcaaatgctcagactgatgaagagtatgctgatgaggccactatgataccgaaaaatacgtcagtattgattcggcggataccaggacgaccaaggaagcctattgtcacagaacctgaagagacaaaagctgcagaagatggtgtacaagatgtcatgcccacatcgggtgcttttcttggtgattcatctatgaaatatcctgaagaatctgagtgggatgatgagtttggcaacgaattatatatttctgattcagttccttatcagcctgtttgccaggcggttgatgctattgaaaataaagttgacgaggatagtaaaataaaagcacttattgatacatctgcccttgactatagccaaatccctgatggttatggttctggaagaggctatggtagagggatgggtggaagaatgatggctggacgtggctttggacgtgggctagaacgcaggacacctcctccaggctatgtttgtcacagatgcaaagtacctggtcattttattcaacattgccccacaaatggggatgctagatatgatgtgaaaaggatgaaacccccaactggcattccaaaatcaatgctaatgcaaactccggatggttcatacgcactaccaagtggagctggtgctgttttgaagccaaatgaagctgcttttgagaaggagatagagggcctacctaccacacgtcctgttggtgatcttccaccagagctacgctgcccattgtgcaaagaagtaatgaaggatgctgttctaactagtaaatgctgctttaggagtttctgtgataaatgcatcagggactacataattaacaagtcaatgtgtgtctgtggtgccacaagcatattagctgatgatcttctccctaataaaactctaagagaaaccatcagtcgcatattagaggcaccaccaactagcagtacagaaaatgtgggaagcatggtgcaagtacaggacatggagtcagctctacctgtacaacctaagcataggtctcctgctgtttctgctgcttcaaaggaagaggctaaagcatccacacttgtagaagagtctccagatgctgagagcctcaatggaacaaaagctacaaatattgatgcgagttcttcggataagaaagctttgacagttccagatattgctgaagggaccttggattctaagaaagcgaaagaagataaaccagtagaagcaaccccagtggcaaaagattctcaagaaaagtttcctgcaggggaacaagcggtaaagaagaagaaaaagaagaagccacgtgttcctggaaatgctgaagagcaatggaaaaattttcaagattttggaactgaaaatttttcggggatgcccttgggtccaactggagcattcaacccttactggggcggaggagtgccattgccaatggattacatgaatgcaccgtttcctggtcccatgccttacatgggttatccaccaggtccatttgacccttttggtgggggtgttctcccacaagatccatttatgcccccaggatacatgatgccaggagttcctagggatctttctgaattggcagttaacgctatgggaataaacatgggcccgccagttatgagcagagaagaattcgatcccaggaaacctgaacataggaggagacgtgaaatggatcggttcaatgatagggaaagagagcgtgaccgttctcgagagcgagagcgagaacgggagcgggagcgttccttggagagggagagggagcgggagcgggagcgtggccgttctctggagagggagcgggagcgggttcgagagctggagcgttcccgcgagggtgaccgtgaacggcagcgaggcagggacagggacagggactcacgcagagaggccagagcatcaccaggggccattaatgatagttcctcgatgaggcggaatga

SEQ ID NO: 18157 - DNA, 325 bp, Zea Mays
attacatagtatatgtattagctagcaaacaactggtcgataaaaagaagatagcttaacaaaaagttccaaataaagaaaaaaacaaaaacaatgagggtagtaaatggataccaaccgaacttctttgatgcttttaatttgacagagaccggagtgtcctcagcattgaccagaatcttgactccttttcctcccaatgacataagtaaaacagccatcctcccatggctacaagcaggtccttgtaactgagaggcaattttattttcatgtgggtaccacttagctcttggtctatgaaagtttgcaatttccttactgc

SEQ ID NO: 18158 - DNA, 732 bp, Zea Mays
agaatcgtggcgtctccctggggataaagtacttctccagctcctctgcgtcttccgccgctcttgctgtcctctgtgctatccgctagggtttatctgctcgaggaatggcgtcggtgcaggtctccggcgcgggggtcggtgccgcggccttctctgtgaaggggaaggcctccaccggtgcgctccggcttcgctctacgttgaccttcggcgaggtctgcccggcgcggcgggcgttccgcggcctcgtcgtcagggccgctaccgtcgtcgcccccaagtatacaacacttaagcccttggctgatagagtgcttgtaaagattaactcttccgaggagaagacaactggtggaatcttgctccctacgactgctcagtccagacctcaaggtggcgaggtagttgctgttggagaaggaaggataattggggataagaaagttgatgtcagcattcaggttggagctcaggttgtgtattctaagtacgctggaaccgaggtcgcgttgaacgatcacagccatctggttctcaaagaggatgacgttataggtatcttagaaactgatgacgtgaaagacatgaagcctctgaacgaccgtgttctaatcaaggttgctgaagctgaagacaaaactccaggaggcctactgcttacggaaactgccaaggagaagccatctatcggaacggatatgaagggacggaacagagttggctagtggg

SEQ ID NO: 18159 - DNA, 322 bp, Zea Mays
  misc_feature (1)..(2): n is a, c, g, or t
nntggctatgagccaaccgcagataagctttatgaccagccattgttaggatttgtgcggactaaaaacacaatccctgaaaaggagcaaggacaaccggctggaaacaacatagttgaagttgaagaagacgagagcgaatcttgctcgagttctgatgaagatgattcgtggcacgaggatgatcctaagatcatgataattgactacaaattaacttacccaagtggtactgcaacatctgttcttataaatggattccacacaactcatggagatgcaacggcaaagtttacccctcctgctcctgcgtcagtctcag

SEQ ID NO: 18160 - DNA, 1861 bp, Zea Mays
aaacacccctaaattacgattattgttacggaagaggtgctcctctctctatctcccccacgatctccgttccttcccctccccgatctccccaatccgaccagaccggcaggcaccttcgactcgagcggagcaggcgaggcagagatggcgctgcgacgggcgctcctcagatcggtcaacttctcccccgacagcaagtctgcttgttctctcaatggtgctggtctttgtcctgctagtagatcatttagcacccaggctgccactacgtcaagcacaccacagcctccacctccaccaccccctccagagaagactcactttggtggtctcaaagatgaggatcgcatttttcaccaacctctatggtctgcatgacccttttctgaaaggcgcggtgaagagaggtgactggtataggaccaaggatttggtgattaagggggcagactggatagttaatgaaatgaagaaatcaggtcttcggggtcgtggaggtgcaggttttccctctggtctgaaatggtcctttatgcccaaggtttctgatggacgcccttcttatcttgttgttaatgctgatgagagtgagcctggaacttgcaaagatagagaaatcatgcgccaagacccccacaagcttctggaaggatgccttattgctggagttggaatgagggcatcagctgcttacatctacattcgaggtgaatacgtgaatgagcgtctcaacctcgagaaagctcggcaggaagcatatgcagctggacttctcggtaagaatgcttgtggatctggttatgattttgatgtgcatattcattttggtgctggtgcgtacatctgtggtgaagagactgccctattagagagccttgaagggaagcagggcaaacctaggctgaagccacctttcccagccaatgctgggctttacggctgccccacaactgtgaccaatgttgaaactgtggctgtatccccaacaattcttaggcgtggtccagaatggttcgcaagctttgggcgcaagaacaactccggaaccaaactctactgcatctcaggtcatgtgaacaagccttgcaccgtggaagaggaaatgagcatacctctgaaggagttgctcgagaggcactgtggaggtgtgagaggaggatgggacaacctgcttgcagtaattcccggcggttcatccgttccccttttaccaaagcacatatgtgacgatgtgttgatggactacgacgcgctgaaggctgtgcagtctggattgggtaccgcagctgtcatcgtgatggacaaatctacggacgttgtcgacgcgattgccaggctgtcctacttctacaaacacgagagctgtgggcagtgcacgccctgccgagagggcacgccctggctctggatgatcatggagaggctcaaggttggtgacgcgaagctagaggaaatcgacatgcttcaggaggtcacgaagcaaatcgaagggcatactatctgtgccctcggggacgctgcggcgtggcctgtgcagggacttatcaggcacttcaggccggagttggagaggaggatccgcgagcgagctgaaagggagctgttggcggcttctgcatgatgtgccagccgcatgtactagttttctgatttctttctaccgaaataatacaaactgatggagctcctttctgtgtaagcaaatgctagcattcctgatttctttgaaccgtttatgtggatgtttatttgatgcactcaagcatctgacggattttgatggactaggtacaccttttcatagtagaaacaaacttgagggttgtaccgtgtgtatacctgcttgtctctttaattc

SEQ ID NO: 18161 - DNA, 4340 bp, Zea Mays
gggcctaccggcttccaagccacaagtctttcgctctgtacttcacggccgggccaaagcagcagccacgaagaggcgttctttcctccctgtaccatcagcatttagaaattttgtctgctaccagatagtacgacagtatactggacacagacatgaaagtgacttgcatgagttcgtttttgcaaccggataaacacataagaagcaatcgcagcgccgaaataggatgaataaaaccagccacatgttccggtggtgtgtgttcatcagcactcgcacgcaagcagctcctccaatccatctccatctctgggctaaaagatatgaagagagttttagcctgataggccactcgtacctgctgctctaactccgggtcaccattttttgatgagtagagggggctccccgtctcggccctcctgccggttgaggccagcagagtgatgagtgaacggagtcatgcttgtgagattaggctttgtcgttgtagcctccgtcgcagctttaactcttcagagagctaacagtggggccaggcacagcaaagactatgtccaagcaaggaaaaggaaggataaggctaacaattctgaacatggggagaaagaagaagagaaggaagaggttaaaacaatcagcggcataatcaactcagcccgctcgctaggcgatgacgacgatgatatgctttccgagatcgaaagcctcctatcaggagacattgacatccctataccaagcgatcgcttcgacgttaatggacggtcacggtacaacaacgcttacatggctaacgaggcctctgagatagagaagctgcgcagcctggtgagggaaatggaagagagagaggcgaagcttgagggcgagctgctagagtactatggaatgaaggaaatggagactgacatcgccgaactgcaaaagcagctcaagatcaagacagcggagatcaacatgctcaacgacaccataaactcactgcaggcggagcggaagaagctgcaagatgacgttgcatgtggagaggttgccaataaagagcttgaagcggctagaggcaagatcaaggagctgcagcggcagatacagctagaagcaggccagacaaagggtcagctgatgttgctgaaacaacaggtcatcggattgaaggccaaggaggaagaggcggggaaaaaggaagctgaggttcaacggaagctgaagaagctcagggagttggaagtggaggtacttgagctaaggaggaagaacaaggagttgttgtatgagaagagagatctcattgtgaagttggatgcagctgaagggaaaataactgagagtgatgtagttgccaatgcaagagaagagataaacaagctgaggcatacaaatgaggacctcacaaagcaagtggaaggcctacagatgaacaggttcagtgaagtagaggagttggtatacctgcgctgggtcaatgcctgtctgagattcgagctccgcaattatcagactccatcagggaaggtctctgcacgtgatcttaacaggacactgagccccaaatcacaggagagggccaaacaactgatgttggagtacgcaggatctgaacggggtcagggtgacacagaccttgagagtgttgtttcttcaatgccttcttcacctggaagcgaagactttgacaacatgtcaattgacagttcttccagcagatacagcttcctaagcaaaaggtctaatctgatgcaaaaattcaaaaggtggggaaggagcaaggatgacagcagtagtttagcctcctccatcagtggctctccaaggaggaaaccaaagggcccactggaagctctaatgctaaaaaacgctggagatggtacagccataacaacatacggaaagagggatcccaatgatgtcttggatgacgaaaatgtcgcgtcctcattccaattgatgtccaagacagttgaaggttttgctgatgagaagtatcctgcttacaaagataggcacaaacttgcaactgaacgggagaaggctataaaagagaaggctgggcaagcaagagcacaaaggtttggtggtggccacagttcagctctaatttcctctccaaaaggtgcactccctccaaaacttgctcaaattaaggagagatcccctgcagctaatgctgaatccagtgagcaatccagtgacaaccaaaacaacaccctggtggtgagccagatgaagcttgccaacgttgagaagagagcaacaagagttcccagaccacctccccctcgatcaaccgctgcttcaggggctaccagtattgcaagtggagtacaaacgccacgggcaccaggtgcaccacctcctccaccaccacctccagggaaagttggtggcccaccgccaccaccgccacctccaggtgctctaccaaggaaccttggcgggggtgacaaggtacaccgtgcgccggagattgtagagttctatcaaagtctcatgaagcgtgaagcaaaaagggagacatctttagggtcaatatcatccaatgtatctgatgccagaagtaatatgattggagagattgagaacagatcaacattcctcttagctgtaaaagctgatgtggagacacaaggagaatttgttgaatctctagcaaatgaggtccgagcagcaagcttcataaatattgatgacgttgttgcatttgtaaattggttggatgaggagttgtctttcttggttgatgagagagcagtgctaaaacattttgattggccagagagcaaaacagatgcaataagagaagcagcttttgagtaccaggatctgataaagctacagaacagggtttcaacctttaccgatgatccacaacttgcgtgtgaagaagctctcaagaagatgtattctttgcttgaaaaagtggagcagagtgtctatgcactactccgtacaagagacatgaccgtctcacgctacaaggagtacgggatcccatttgactggctgtcagattctggagtagttggcaagatcaaagtggcatctgtccagcttgcaaacaagtatatgaagagggttgcctcagaacttgatgcattagaaggcactgagaaagagcccaatagagagtttttgcttctccagggtgtgaggttcgctttccgggttcatcagtttgctgggggctttgatgcagaaagcatgaaagcttttgaagagctaagaagcaagatgaccacacaggcatctgctccaccaatatctcaaggctgaagcataaattgagcacaggattcagcacacatctggtcttacttgctggagagtgatttttagttgtgtatattaagtgtacagactacagaagagagattcaaattccggtgttgtgtcaagcaagttgtatatgccaagataatacaagtcaggtttgttcatttgtataacagttttagctcaagcataacacttttcattttgaatgttgtaactgtaaacaggcagttccagaatcacagtagagatcagatgcatagttttgcaactgttttttttcagctgggcatgattttgctactacgactaataaaatgtcaaaaaacatccattctgctagtctggtacacatggagataattcctctacatgaaccttgctgtctttgttcaaaaaaaaaaaagtttccagcctgtccgcttggttttaatccgtaacagcttctacttctacagtatttttgtctctatggattacagctgcagcagtccaaacttgttgctttaatccgaagcaaacagttactaccaacatacatacagtgctagactagcagatctgacttgaagaatgacatatcaagaaaaaaaaaatccacctggacggagaaggtcgatgttgcggcgacgagctctacctgaacgtggaagtggaaccgaacacttcgagtggttggctgtggctgcctactagtcgccggggggccgggccccgcctctcggctggcttcagcgcctccgagcgcggtggcagtgtcgccgtcgcgtgggtggaagaactcgtcggttgggttccggctccgggcgcggccgcttgccggggaatccaaccgggagaccgtgaatcgtggttatattattacttgggccctatcaaggccaccacgtctatgactgtgagcttattgtttgggcttgggccgatattcctcttcatccattagatcagtttttaagccctctttattttttaaaaacggttcattgttgcactcttagccgtttttatagtggttttgccgatgtgaaacagaagataaatcgaattaagtttaattttcg

SEQ ID NO: 18162 - DNA, 4831 bp, Zea Mays
ataaaccctccctcgcacgacgaaaaccccccaacgaaataaaaaagattctctcttcttttaccctctccgcccgcttctctctctttgatctcttttcttgcccggcttctgatctctgctcgcctgccgcctgcaaccgccgagggaggaggggaggcaagaaggatcacgccgccggagcgtcatctcttccaacccaagggacggacagctaaagtagctgtggttgtgggatatggaagccgaagtaagcgctccagccgatcttaaggcgcctgataagacgacggtacacggtgatgacaaagaaaatataccgaatggtaatgcaaatttgcaagtgaaggaagccgacaatgatgaagacgatggaacaagatctgatgggtttgagctgatagatgtgaagcaaaacttcgattcagcaagagtggaggaagagatggccgctccaagaagtactacagtcgatacatctcctgttacagaagaaagtgaaacacaagaagacaaaacaacagcacatgaagaacaatcagttgcaacaaacacaagacatctagagtcctcaatgttgaaccaacaaacagaacaattggaaaagctgacaatgcgtattgaggagcttgaatctgaaaatgacaaactggtaaaggacttgacagaagcagaaaataagcagagcctgcactacagttgtctacaagaagctcaatgctctcttgcaatgaaagataaggagctggctgaagtaacagagtcgctgaaagatctgggttctgagcttggaacctcaaaaaagaggattcaagaaattgaagctgaattggattcatcagcagataagctttgtaaacttgaagagttgaaggatgaaagaagcttgcatgctgcacaggaggcgaagagggcctcagaacttgataagatgctagaactggcacaatcaaacatgaaagaaatggaaaaacatattggcagtcttcaagaagaagtgaagggttatcaagacaaggccgctgaccatcagcaaatagaagaatcactgagaaacacaatctcagaactcaaggtggtacaagaggcattggagctgtcaaagtcacaagtggaaaatttgaaacagaagcttgcctcacaggacactgatttcagtaaactaactgaagagttgaatctccattgttcatctgaagaatcccttaaagagaagtctcttaaactagagactgaacttactactgtacttgaagaactacaagcaaagggtgggcttgacaaattgaaggatgaaaataaaactctccaagggtcacttgttgatcttaactcaaaactttctgagaaagattcaatactgcatcaggctgaagatgagctttcaaaagcacagttggtcctcttagaagcattgtcacaaaaagaagagttggagctgaatctgaactctctcagtgagcagcatggcaaatccaaagcttttggagaaaatgcaaaccagaagattctcgatcttgaagcacaaatacaggcaatgcatgcagctgaacaggcactcaagtttgagctaaaagaagccgaggcaagtgtccaagctgctgagaagaaaggctcagaccttgagcaacaactcagtgagattgagaataaatttgttaaatcaagtgaagaaatagagttgctgaaagagcgtattcaacaagaagctgctgtatcagcagaaagaggaatgcagcttcaagaaactgtgaccagtgtagagggatacaaagaaaaaattattgagctacaatcctccctaggttcctcagtgtctaaaaatcagctacttgaacaagaagtcatggagctgactgataaatgttcagagcatcaagaacaagcgcattcagttcggcaaagaagtctggagctggaagatttgcttcacacatcaaagactcatgctgaaggtgtatactcacggacacaggagctggagcaggagctgaataacacatatgaaatgttcaagggggttgaagaagaactcgagcagtacagaagcaaggcttcacagctctctgatgatctggaagcttatcagacaaaagcagctagtcttgaagccgtggtggaagcagcaagcgagaaagaaaaggaatttatggagtcattgagccaaataactgaagaaaagaagaaaagtgaagagctagctgcaaaatatgactgaggtgcacagtagaggtatagaactccaatccgcagctgaatcaaggaatgcggaaattgaagctcaattgcaggaagctcttgaggcagtaggacagaaagaggctgagtcgagaaacttgaatgaaaagctggttgcacttgagtccgaaattgaaagttcgatgcatgtaaatgaagcgttgaaacaggaaatcaatgctaagctggtaatggtggatgagctgcaggagaagtgtagttttataagttctgagaaagaagaagttgcagagaagctgtctattcatgaggagaagttagaacatttgacagaagaacactcaagaggcttggagctcctttctgtagctgaatctcggaataaagaaactgagagtcaactgcgtgaagttcttgaaaagctagcacaaaaagaagctgaagttacagacttgacagagaagctggctttgctcgaagctgagaatgaaaagatgacttgtttgaacgaggcgttaaaagaagtggatgctaagctggtcatgtttgatgagctacaggaacggtttagttctactcttgctgagaaggaagaagctgcagagaagctagctgttcatgagaggacaatctcacaactgacagaggtacacacaagaaccttggagctccattctgtagctgaatcaaagaatgaagaaattggagctcagttccttgaggctcttgaaacaatatcacagaaagaaggtgaagttaaagaatcgtcttcacagaagataaagatattggaggaacaacttgcagagacacatagcaaggtcgagcatttccttacagagaaggaaagcttggttcaagaaactagtagtctgaataaggagtttgaggtacatcagaacaagttgaacgacttacaacttgcacttgctgctgcactagcagaaaaggaggcggcatttgaagagattcattcactgtgtaaaacactcgatggaatgatcgagcacaaagcagaactagaaatacaggtatcttctactatacaagagcacgaagaactgaagagcaagtaccaaaatacaatggaagagaagcagatgttgagtgataaatatgaaacagcaaagaaagagcttgaggatgcaatagccaagttggaggaggaaatgaatgtagacaagtcagaaaaagagtctcacatctcaaagctggagcgacagattacattatcagagataaaatacatggaggagataaagactatgcaagtggaaacaactgaaaagaatgaagcactaacagccaagatgcaggaacacacagacttacaacatgagaaacacgaattggaacaacagttgctggaagttaggaaggaactggatggtgcttaccataccatagtaaatcaggaagaacaagcttctttgagagagataaagtgggacacttttaggatttattcagaggatcgtctggaagctgagcagcagcgtgctgaggagctggaactacaagtagcagctcttaaacaacagctccaagaagctgaggaagaacaagtttctttaagggaggttcaatgggaaggggatcaaaatcattcactgaatgagctgaaatctcagcgtcagtatgccacggacttggagaaacaaatcgaagatcttactcagaagttaagatcagccgatgcacactacaaacagaaggccacagaagagagagataaacttgccgagatcaccacagagttcagcaagttgacacataaagtaagcaagagtgtcgaattggagaagaaggtgcaggaccttgagcagaagctgcagctagcttattccaagtctgacgaacaggcaacggatgtcttggagtcgagatcccgtgagtttagcctggactcgttatcaagtttggtcaaacagcaggacagaactcaggctgccgacaaggcctcgccgagcccgaccctgcaagaagtacaagaaccttctggcaccatggctttcaagttcatcctgggagtcgccctgctgtccgtactcgccggcgtgtttctcgggaagcggtactagcgctcagtctgtggaactctgttggcgcccatcatcagctcatggaaaacccccgctgttaatattgctcccagcgaaattcggttatcagtttgtagctggaaggggggcgtagccagcagaagtttgagaggattgttggccttgatggtgatggttcgacgactttctgggaggaagttggagaccttggaagcccttttgttctcttgttgttgattttcgtcttcattttcagtttttgggtaaagtggggcaaggaatttgatttttgttcattcctaccctttgcgtgcaaaaggccaagtgcacgcaactggttctgcggacagctagttttccgtgtacatttcttctctgtaaagaccaggagtccatggacgcaaaacatgaagcctctgcttgctgtatatgctcgtgtggagagtgcatgtttcgttacctgtgccttttgatgtacacctgaattgcttgaacgagaaatgtcatattattatcagatggtttgaaggacgtgtacacagtggttggattcagatcctctaattttg

SEQ ID NO: 18163 - DNA, 1732 bp, Zea Mays
ttagaagtggatggcttatatctcttcgaagtattgctaaaatttacacgatatgctttggatgtcaatgtagaacgggttgaagatgtcttactgcacaagaaattgctggagcaagcccataaacccatgaatggtctggtctttgatgttcgtcctgcacagggttttactctggaggaaagcactggatttgagtccacaacttcctttaagcaagaagaacaagatccccagtcctcagtattcacatcaagagatcaaaggcctttgcatgaagttatatttgcatgtgacgataagccaaagcttcttagtcagttaacctctctcctcggggagcttggtcttaatatccaagaagcacatgcatattcgacgagtgatggctattccttggacatctttgttgttgatggctgggagtatgaggctgacattctccaaagtgcattgagggaaggcgttgataaaataaagtacagagcatggccgttggtaccgtcgatgtctgctaggatggatcaccaaccattggaggtttctccttcatctgactttgtccagataccagctgatgcagttgatgtttgggaagtcgatctcaggcttctcaaatttgaacaaaaattagcgtctggatcatttggtgatctataccatgggacgtactgtagtcaagatgtagctatcaaagtactcaagcctgagcgggttagcgttgatatgctacgtgagtttgcacaggaagtttatataatgaaaaaggttcgtcacaaaaatgttgtgcaatttattggtgcatgcacgagacctcctgttttgtgtattattacagaattcatgcatggaggcagtatttttgacttcctttacaatagacgaggaaattttcaactcccggatgtgattagaattgcatctgatgtgtccaagggaatgaattacttgcatcagattaatattgttcatagggatttgaagactgcaaatcttcttatggatgatcaggttgtcaaggttgcagactttggggttgcaagggttaaagaccagtcaggagttatgactgcagaaacaggaacctacagatggatggcccctgaggtcattgagcatttgccgtatgatcatagagcagatgttttcagttttgggatagttctttgggagctgctgaccggaaagcttccatatgaagacatgacacctcttcaggcagcagttgctgttgttcaaaaggatctgaggcctactattgctgttgatactcatcctatgctcgctgagctactccagagatgctggcagaaagatcctgctctaagaccaacatttgcagagattgtggatatattgaactctataaaggaggcggttcggagttctgtgcatcacaaaaggcattcatgtcgatctcactccgggagaagacgaggctgttgatgtgccagttttatgtggtgccgcacgcccttttcattttatttttgtagtcgagcgataacttcagaatacggccagaagagcttactgtgttcattccgagaggttttggtaactttattttttttaatttggacttatgcttcaaggattttcatcgttaaaaagcttagaggtgcatatccacgtttacatttggcatgtatctgtatctcgtactcgttttcttaagtttggcaggcaaccaagattttaatgaaaatctttaaccattactcactccgtc

SEQ ID NO: 18164 - DNA, 340 bp, Zea Mays
ggtctgagtagcactccttaggtcctgggttcgactctccgtgggagcgaatttcaggctgtggttaaaaacatcccctcgtctgtcccacgccaaagcacaggtctaaggctcagccccggtcgtggtcgttctcacatgggcttcgatgccgctttgtatgggtggggcaggggttcgggggttttctcgacctgtgtgagaaggtcttcttctaaatacaattcccgggggctgtcttaccccccgcaggtcgagtttttttaacaagaaatacataaaagttctaatgaaaaaatgctaatgtagcttcagtggattaaacatctgtgacgttcag

SEQ ID NO: 18165 - DNA, 2358 bp, Zea Mays
ttcatatgcaaattggaaaatgcagtgtttcagttttacaggatacatgtcggtatacaatctccagaaggctttagctctagccatggaattctcagaaggtttagtgactttctgaatctatcttctgatcttaagagcgcatttcccagaaaagatgccccgtcggctcctccgaagcatgctttcttaagaataaattcaagcaggttgcttctagaagagagaaggcatgcattggaggagtggatgcaaaagttactttctgacattgacttgtcaagaagtgctcctgttgctgctttttttgagcttgaagctgctgcacgttcatatttccaagaacggaatgggcgtccttctgaagtaggttcttctacaaaaagcagtactgcctcttctccacatcctgatggacctgcttctggttctcttgctgagtccaatcaaataaatcaaactcttactcgtggcagcagtctgacaggagcaactggtaatggtgtgcttggagaagctatcttagatcagtccgatgagcttgttagtaatgccttgaatcacaggaaagggaaccttgtattggaacatgatggtaggaatggttcagcagcgtcttataggggagttgtttcagatgaggaccgtgtatctaatcccggccatgctaggaaggactctgctgaaagtattgggagtgatttgagttctttaagaggaattgaattatctattccaggggttagtagttccctttgggatggtgctgtggtggatggacatattagtcaaacagaacatcttactggtttagatatgcatcttttgtatgatatggatgcacaagtcatccttccaaatgatcaaaaacagaagttgactagacttttgatcacaatgcaacaaagaataggggcagcaaaaactgatatggaggatctcatagcacgactaaatcaggaagcagctgttaaagaatatcttactacaaaggttaaggatttggaggttgaattggaagccgcaaagcaaaagggtagagagacactgcaacaagctatcctgactgaaagagagaggattacccagatgcagtgggatatggatgagctccgtaggaagtattctgagatggagtcaaacctgaaggctgaacaaaatgagaaaactcgtgcagagtcagagaaaacaaccgctagtgataaaaatgaaacattacttgaagaattagaaatcaaacgaaaagaagtcgagactttgaaacatcatcttgtagaagctgaggcaaagtctaaagcagataagaaagttcttgtaaaagaggtcaagtctcttagaaactcccaaacagagatgaagaaagtgttgaatcagtatcttgaacagaagactggtttagagagagttattattagagataaacagaggtcagcacgtgcaaagttatgccgagtgaaatttcttcatgagtgtcgactgctgcatgagcgtctactggaatgtagtgctaaatttctagcagaagaacaaggcaattttactattgatccttcgtccttgcctgatgcattagatcttctagcaacatcagacaatagagtacgcttactcattgctgaggctcaacttttagcacgagatgatgaacaaggctcttctgatgatggcgacaattctgatagcatatcgtcattaactatgagctgggaagatgcaaaagttacagatgaagatgcaacgaaaatactttctgatctacttattgacaacgcgcagctgaggctgcgtcttaatgctgtcatccgcaacgctgtaaatactgccgtgaagccagagaaagaaggtagtggcgaggttcttcccaaaaagacagtccttaactggttgttagacagatgagaacacctatgtatattcctgtgatttaggtttcaaacttacgcggcttgaccaaaattatatgatgagcatacctatatagtgccagggcagcatcaggataaaagtttccggccatgagggaagaagatcctggagaagcgtgcgttgctgctgtacggttgtttatttacacatggaaatatcggaggatagtatatttaggcccgtttggttcagggcaactaaactttagttatttttagtctctaaagaagcaaacagggtgactgaaagtaggtgactaaagtttagtcatctagtcaccaaataagtgactaaaagtgactaaagtaggatttttaccttttaccctctctctttattgtccttgctgttgtcaccctctgatagaggtaatgcagttattattcacactaattaatactctttaaacagttttagttactgaaaccaaat

SEQ ID NO: 18166 - DNA, 424 bp, Zea Mays
gtgtgcgtccatttgtgtatccacggaccgcagaagaacctcaaaagctcttcacttttcccctccactccacagcgcaggcgaggcaggcacacgcaagctgccgcatttcttgcagttgcacctcgcaaacagatggggagggcgccgtgctgcgggaaggtggggttgaagaaggggaggtggaccagggaggaggacgagatcctggcgaggtacatcgaggagcacggggaaggctcatggagatcactgcccaagaatgctgggttgctgcggtgcgggaagagctgcaggctgcggtggatcaactacctgagggcgggtctcaagagggggaacatcacggaggaggaggaggacgtgatcgtcaagcttcacgccacgcttggcaacagcgcggcgatcaacccatgaagcaaac

SEQ ID NO: 18167 - DNA, 2679 bp, Zea Mays
cacaaacacaaacactggaaaaacacaacagcgttcgtcccaagtcctaacaaaaaaagcaccgatacctgccaaagtgccagctgcctacggccaccgcgcggcgcatgcctccgtccggtccgtccgaacgctcggaccggatgaatggatgactcctgcagtcagccacttcccttcgtcgctcgtcggcatggcgccacgcctctcacagccacctgaggcactgaggcagcgacccctcccccttgcggccttgcctcctccagaatcgcagacagcttccgccgaatgaatcgtccacttgtccgtagaattgtgcgatcctccggcggctaccaatgttacggtgctctcagtcttatgtttgggctgccactcgcctgtcgccattgcccatcaccatctgtatgatgggtgggtccgtcagtggcccgatcgcaacgtccaacctatcagcgctccttcatggatcatggattcagcggttgacacccagggttgattcttcgcagatccaatgagataggatttgtgactcaagatgatgttctctttgcccatcttactgtgaaggagacattgacttacgcggcactactccgtctcccaagaacaatgacacagcaacaaaagaaagagcgagcgatggacatcatacatgagcttggccttgaaaggtgccaggacacaatgattggaggatcgtttgtacgtggggtttcagggggtgaaaggaaaagagtttgcattggaaatgagattttaatcaatccatctttactgtttctggatgagccaacatctgggctggattcaactacagctctaaggatcgttcagcttctccatgacatagctgaggatgggaagacggtaatcaccacaattcaccaaccatctagcaggctgtttcataagtttgacaagcttattctcctgggcaaaggaagtttgctatactttgggaaggcatctgaagccatgccatacttccagtccattggatgcgccccacttattgcaatgaaccctgcagagtttctactggatctcgccaatggcaacactaccgatgtctcagtcccttcagaattagatgacaaggtgcatatggaaaatcacaatttggagaacaataattccaagattgactacaggccatcagcacaagatgttcatgagtatttggtagatgcctatgagactcgagtggcttttaaggagaagaagaagcttctagcaccactgcctatcagtgatgatctgaaggcaactataacatcatcgaagcgagagtggggcacatcctggtggcagcaatattccatcctcttttgtagagggatcaaggaacgacgacatgattacctgagttggatgagaatcacccaggtcatagctacatcggttatcttaggtttactgtggtggcactctgatcccagcacactaaaaggtctagaggatcaggctggcctgctgtttttcatcgctgtgttttggggcttctttccagtgtttactgcaatctttacattccctcaagagagggcaatgctgaacaaagagcgcgcagtcgacatgtacaagctcagtgcatacttcttggccaggacgacgagtgatctaccacttgaccttttcctcccaatcatattcatggtgatcgtgtacttcatggcaggcctcaaagcaactgccacacatttctttctcagcatgttgaccgtctttctcagcataattgctgctcagggactcggattggcaattggagctactctgttggacatcaagaaggcgacaactctagcttcagttacagtcatgacattcatgctagcaggaggcttctttgtaaagagcgttccaccattcatctcctggctgcgctacctgtccttcaactaccacacgtacaggctcctgctgaaggtgcagtacgaccccgtgccggacatcctgaccaccacgaggcacatggacagcggtggcaccgaggtggcagctctcgtcgccatggtcatcgggtaccgggtgctggcctacctgtccctgagaagggcgaaggccctgggcagctagcgcatcccttcaccgcagtgactgaagcctgagctcgtggagcgggttgggtcattgggtgtgtagggaagtttgtgctatattgcgctgtgaaaagatggaagtctttttttttaacttttctgtctttttcaactaagttctgagcaagtaccaacactgaagaacaaggatctgtagcgagtgtaccagagacaagctgtgctgtaatttttccttcacaacgattgcgtggttaaagtgattgagtataagcgtgagtttagattgccggcatattcttaggatgggtagctctaggacaaattctgttcatactcccaagaacgcgtacatttcatcaatgacattatacgagttcttcgcgatggacagaagcacaggatgaaggcctgatgtcccataggtcagagggaaggtatgatcagtgtttgattcatctacatcacccttatacggtcccatttctgcaatgttcatatgttctaaaattctgggctccatcgatctttccaatctgtgactaaagctcttcttttttttaactgctattaaggtaaacacgcacacgcacaaagaacttttttgcca

SEQ ID NO: 18168 - DNA, 920 bp, Zea Mays
gctctgaggttttcatacggggtttcatctctagcctaccccaacgtgcttgggacaaaaaggctttgttgttgttgttgttgttgttgttcgatgttctctgatatctgaaatttcgacatgccacgttttttttcaatgccttcacgggcgttgcttatcacaaaagcagtaaaggatttatgaacgtaaattgggtgccacacattgacaaagttgcaacatcgaccctatctccatgagtcacgtcatcagcatgccttgaaaagggccaggggagctggaggtcggtttctcaactcaaagtcagatgacaaggaagagaactccgactcgagtcacaaagagaatcagaacggagttgcgccccacaggagcggccaaccgtcaacccctccgtctcccaacggtgcatcgtcagctaatcagggcaggcagtcgtgaatgatggatgattcaaaactcacagctgaagagatttcagcccctgagctagatatggcagcagttttgtacagaaaacgctagcaacatggtgtcggtcggtcggtcggttgttgtaggacatgttccatagaaaaagcatagacgagtctacaggttttggagccttggtttggtcctctgtgtattcacctttctgtacaatcttagtagcgttgtgtaccttcccctggaaggaaggatagcttcagttagcgcttcagaaagtcaagtgtgtagcatattggcttattgtttgctttgcttggacaatggagatttgggagtggagttcataaccctgctgaataaatactcttagctggctatgtgtatgttggacgacaatatgatccctaatgtagtacacgtgaccacctcaaactgaatctggctttgtttaaatgacaccctcacaattggtcacaggttcagag

SEQ ID NO: 18169 - DNA, 830 bp, Zea Mays
ctcactaagtcaccagggtcgcgggttcgaagttgcctcttcgcatttgcgagggaaagccttgcctcggtttatttgtttcctagaccacactcatgtgggggcctccgacacagggatttccccttgccaatagcattggtggagaacagtggaaggtgcaagactaatgagcatggggagaagatacttccggacggaactctgtgggttccaaacctgatgaaagaaattactgttgtcatctcaaacgggagcagtcccactcatgttgatcagaagttaattgatggtccaaaccctaacaatcgccgaaagttgttcataccacttatccttgctgtggagtacttcttggtggtaaaaggaatccggagggcgatccatgcagatatcgcaaacgggaaggtagatgactgggagcagcgttaccgggacctggtgggaagcagggacctcgtagagcagaaaggttctacctcccggaaccgcaaagcctaagttggtgtaccagaaaggattctattcgtgttgagacccacccactcgatctgctgctccttttcctaaatctgtgctgggggctttatagagttcgctggtactacttgaaaaaaaaatgctcctgttgtagttgataagattatgtttcccattttatgacgattggccgtcttcgcaattttgaagatgttatcgaatacgtgttattttattgttttaaattatatatggcatggaaacatcaagtgtggactggagtgctctgaacatcctcaaacgtcggttgataagatcaatgtgttgcagttcggccatataaaatttaa

SEQ ID NO: 18170 - DNA, 2510 bp, Zea Mays
cgccggagcccggagccggaacacgtcaccgatcaccgtcacgcacctcgcctttattattcaaaccttcttctccttgtcctcactcacctacccttctctatcaatcttccattgtccaccaccctcacgcctcgccctcccgtcccggcgacggcgaggccccctccgcctccgactcccgcgcgactgccccggaccccagtctcgcccttgtccaccgtcatggccgcacccgcggttgcctccccgagccgggcgacccccaccgacatccccaccgccgcgccctctcccgcctccccgccgcgccgccttgcgtcggcgccgcccgccgtcgacgcgtccgggtcctcctccccggcctccgcccattcgggggaccagctctccgcccccgacgcctcgagcccgctgctcgcgagcaggagcgaggagtacaggcttctgttccggctgccgcccgacgaggttctcgtgcaagattttaactgcgctgtccaagaaaatattcttcttcagggacatatgtatttatttcttcaccatatatgtttctactctaacatatttggatatgagacaaagaaaacaatacctttgcaagaggtaactgatgttcgtaaagcaaagacagctgccatttttcataatgccattgaaattgttgctggtagtagaaggcatttttttggatctttcttgtcacgtgatgaagcctatcgaattatagtagatggctgggaacaacatgttagtgatgcaagattgctccttgaacgtcaggagacaaagtcagctagtagcagtgaagaaaatggttatgttgtattggaaggaacaaaggaatctaaacaagatggagatttatcactgccggacaggtctgtcaacagtacagctgtctcaagtagcaatgctgatggtggtgattcgaacatcaacatttccaaaaggttttcagaagttgaggagaacggacttgaagacaacatcgtcgcgctaaacccattcaatttggagccagttgatgctcctcctagtgtacctgaatcttacactatgatctcggagtcgaagtttcaggtgcctgtggaggttctctttaatttcttgttgtctgatggtgcttttggctttgtggatgatttccacacaaaatgtggtgacaaagaatttagttgctccaaatggcgtacagatgagcaagggggacttgtaagggatgtctcatttttgcatccaataaaaatttatcttggtgcaaaatttgggacttgtcaagaggttcagaaacttcgtctttacaaaaacaggcgtctagtcattcaaacctctcaatcaataggtgatgccccatatggggaccattttactgtagagggcatctgggatgttgaacaagatagcctagatgagaactgttgtgacctcaggatatacatcaatgtagccttctcaaagaaaacaatatttagagggaaaatagagcagtcaacaaaagatgaatgccgggaagttttcagtctctggattaagctcggtcatgatcttttgaagcaggagtatgatcgatcaaaaggcgcctccagcacacctgattctggtgttcaaccaggggctacaacaaacgaggaaagtgccgtggaagtagcagttccagtggtgagttcctcacatgatgaatctggtgcgagaagcctcattcctcctactcaagatcaccagcagaggacaggaagagatccttccatcacgtccacttcacaagaattgtggggttctctatcgtcatacatgaggtcaaggcaacttggtccagtactagcaatgtcactggtagctctcattatcctaatgcaggtgaccatcatagttctactaacaagacccccccaggtccaaatggatcctcatgggatctggacgggcagttcagggtacagcaaagaaagcatagagtgggtgcagaagcgcctcagcttactaagcgaggagatgcagctcgcggaggcacacatggagacgatgaggcgcgagtttgcctggctcaggtcttacctggagagactgcagaggacgcggggcagcacatgacggcggcgcgtgtacatggcacaggggcacgagttcgctacgcgaattcggaggtgtatacaaatacaatacaatacaacccggaggtggtgttcagtgtttcttctgttgttacagatggtacagatgcaaacagagagaggtggattgttgtttgcagaggtatttgccgtaaggcagaactgcaagatcccggtatagcgttcgatgtaaatagctggagcttccccattgcgctggggtgatgtacaatgtcagggacgagtcactgcgatcacgctacggcggtgacgcgttatgttatttataaatttctgactgaattttaacttctaaaagctacccggtccgtccgcggtccgtccaaaaatgataaacagtactacctccgtttcacaataatgttcttttta

SEQ ID NO: 18171 - DNA, 3095 bp, Zea Mays
gctttttaaaacccccaccgatgtcctgagattggaaagagggaagccgcaggcagcatctgcatctctcgcccacctccgctccgcctactgctgctggtggtagggaggcggagaaggaggcccttgcgcccgcccgccggccggatcagagccgtagcaaccaccacccatggcggacgtgcacgaacctttggtgcgccgtaagaggaagaaggttttggtggactacttggtgaagttccgatggatcctcgtgatcttcgtggtccttcctatttcaactctgatctacttcaacatcttcctgggcgacatgtggtccgccatgaagtcggagaagaagcgccagaagcagcacgacgagaacgtgcagaaggtcgtgaagcggctcaagcagaggaacccgaagaaggacggtcttgtttgcacggccaggaagccctggatcgctgttggcatgcgcaacgtggactacaagcgtgcgaggcatttcgaggtcgacctttcttccttcaggaacatccttgagatcgacaaagagaggatggttgccaaggtcgagccccttgtcaacatgggtcagataaccagagctacctgcccaatgaaccttgcccttgcggtcgtcgccgagctcgacgacctcactgttggtgggctgatcaacggttacggcatcgaggggagctctcacctctatggccttttctccgacacggttgtcgcgatggaggttgttctcgcagatggccgggtcgtcagagccaccaaggacaacgagtactctgaccttttctatggcattccctggtcccagggaacactggggttccttgtctctgcggagatcaagctgatccccatcaaggagtacatgaagctcacctacactccagtcaaggggggtctaaaggagatcgcgcaggcctacgcggattctttcgcgccgagggacggtgacccggcaaaggtccctgactttgttgaagggatggtgtacacagagagcgagggtgtcatgatgacgggcgtgtacgcttccaaagaagaggcgaagaagaagggcaacaagatcaactgcgtggggtggtggtttaagccctggttctaccagcacgctcagacggcgctgaagaggggcgagtttgtggagtacatcccgacgagggagtactaccaccggcacacccggtgcctgtactgggaggggaagctgatcctgcccttcggcgaccagttctggttcaggttcctgctgggctggctgatgccaccgaaggtgtccctgctgaaggcgacccagggcgaggctatcaggaactactaccacgacaaccatgtgatccaggacatgctggtgccgctgtacaaggttggggatgcgctggagttcgtgcaccgcgagatggaggtgtatcctctgtggctgtgccctcaccggctgtacaagctgccggtgaagacgatggtgtacccggagcctgggttcgagcaccagcacaggcagggcgacacgagctacgcacagatgttcacggacgtgggcgtgtactacgcccccggggcggtgctgaggggggaggagttcaacggcgcggaggctgtgcacaggctggagcagtggctgatcgagaaccacagctaccagccgcagtacgcggtgtcggagctgaacgagaaggacttctggcgcatgttcgacgcgtcgcactacgagcactgccgccaaaagtacggggcggtgggcacgttcatgagcgtgtactacaagtccaagaaggggcgcaagacggagaaggaggtgcaggaggcggaggcggccatactggagccggcctacgcggacgaggaggcctaaaagctcgtggtcgttttgcttagcccattttaattagaacttgatggatgtagtgtgtgtctgtctcaagtcattttaattagaactcttaaagctcgtggtcggtcggtcagtcagtcagtcattgtcgttgatgtccagcgttgtgttttttttatattctctaatggaatctctcagattgattcgggacttgctatggctctgctctttgttatgttttttttttaaagttctccaggcgctgctgctgcgtcttgcaaggagcccggagctgatgactagcagcagcagcagcttggaacggtgggaggcagcaccaccatggcaccatgtggctgagctgggctggcaggcacagtgagaaaaagaaagacaccagccatctactccccagtccccccacaagagcaaaagcaaagaaagatgcatgtgcatgtgcagtgcagcaactctgccatgctgtcatgtgggacggcacgggcaccagctgcactgcactgcaccgccccacagttatattgtttactgctgctgtgcccactccttgtatatttgcatcactgcctgcttctggaatcaggaaaggagatcaccacttcactcaagaaggcaccctcccttgccactccttttccttgagatgacgatgacgacgatgaagaagcagcagcagctcctcctcctcctttctctcatgtttctcgttgctgtgacagcagccgctgttgctgccgatccacatccacagcaggtgcaggtgcagcagcagcagcaagcacagatgaggattaacagggccaccagatcccttcttcctcagccgccgccgaaactagactgcccgtccacctgctccgtgcgctgcggcaacaactggaagaaccagatgtgcaacaagatgtgcaacgtctgctgcaacaagtgcagctgcgtgccgccggggaccggccaggacacccgccacctctgcccctgctacgacaccatgctcaatccacacaccggcaagcttaagtgcccctaggccttcgccactcatgttatgtacaataacgtgagatgctacactgcactgcggctctcctgaactcagaatcggatttgcacatctcaaaccaccactctgcctgcattacgagaggagagttaaggtacaagagtttccagaacgcgttgcattgattgatctagagaaccaactactacgtgtttaacaatgaacaataaaaca

SEQ ID NO: 18172 - DNA, 1750 bp, Zea Mays
gcgcgaaaggaagtcgacagcggaacctgttggtctgaacaacgtctctgtatcgacggcaacatcagtgtcccaggataagcttctaggcggattgctgtccgcggcattcgacgaatcctcctgccagagccgctacaaatcgaacctgtaccggaagccatccccgttcccgctgtccccctacctggtgcagaagctgaggaagtacgaggcgaggcacaagaagtgcggcccgaggacgaagcggtaccggcgggccgtcaagcttctcaaggccgggcgcaacacggacgactcggagtgcaagtacgtggtgtggttcccctgcaacggcctcggcaaccgcatgctcaccatcgcctccaccttcctctacgcgctgctcaccgaccgggtgctcctcgtgcacgtcccggcggagcaggagggcctcttctgcgagccgttcccggtcagctcgtgggtgctcccgggcagcttcccgcagaacaatccccacaagctccacatcggcgcgccggagagctacgcgaacatgctcaagaacaacatcgtccgcaacgacgacggccccggcgcgccggcgtcgtcgtcgctgcctccgtacgtctacctccacctggagcagttccagctgaagctgtccgacaacgtcttctgcgacgaggaccaggtcacgctcagcaagttcaactggatgctgctcaagtccgacagctacttcgccccggcgctgttcctgacgcccatgttcgaggccgagctggccaagatgttcccgcggagggaggccgtgttccaccacctgggacggtacctcttccacccgaccaaccgagtctgggggatcgtcaggaggtactacgaggcgtaccttgccagggtcgacgagaagatcgggttccagatccggatcttcccggagaagccgatcaagttcgagaacatgtacgagcagctgatgcggtgcgtcagggagcagcggctgctgccggagctcggccccgccgagccgccgacgaacgcgacggccgacgctggcgacgggaaggtgaaggcggtgctgatcgcgtcgctctactcggggtactacgagaagatccgcggcatgtactacgagagccccaccaagagtggggagatcgtggcggtgttccagcccagccacgaggagcagcagcagtacacgtccaacgaccacaaccagaaggcgctggccgagatctacctgctcagctactgcgacaagatcacgatgagcgcctggtccaccttcggctacgtcgcgtacagcttcgccggcgtgaagccgtggatcctgatccggccggactggaacagggagacctccgacgtcgcgtgcgtccggtccacgtccgtggagccgtgcctgcactcgccgccgatcctcgggtgcagggccaagacggacgtcgacgtcgccgctgtcaagccgtacgtccggcactgcgaggacgtcggcttcggcctcaagttgttcgatagctaactctctcagtggacgtacagctcgacgatccaactcttttctgaactgcgtgtctggcctgtggtctgtggagttaggcatttcgagattcgttgtattcgtttaagcggtaccttgtagtcgtgtacaggtgcgaattaagttaagttacaaaaatgttttgagtactgtttcaaattcgttcttcagaaaacaaatcgcatatatacagtatatagactgctataaatgtttcct

SEQ ID NO: 18173 - DNA, 1097 bp, Zea Mays
caggcatgtagccccggtgctgatgtggcatgtctgcctccacccctccgccaccaccacagccgttgcctttgccgcgagcgaccgtagcgaggttggaagctgtgctgtctattggtgctcatctaatcccacacccaagaaaggctgcaagtggcggagaagatgctttctttgccaatagcgatgctggcggagtatttgccattgcagatggtgtctcgggatgggcagaaaagaatgtcaatccagctctattctctcgagagctcatgagaaacagctctaatttcctcaatgatgaggcggtcagtcatgatcctcagattcttctcatgaaagctcatgctgcaacttcttctattggatctgcaacagtaatcatcgccatgcttgagaagaccgggactctaaaaattgcaagtgtgggagattgtgggttgaaagttattcgtaaagggcaagtaatgttctctatatcccctcaagaacattattttgactgcccataccagataagctcagaggcagagggtcaaacatataaggatgcattggtttgcagtgtaaatcttatggagggtgatataattgtgagtggttcagatggactttttgacaatatctttgaccaagagattgtttccataatttctgagtcgccaagtgtagatgaagctgcaaaagcattggcggagcttgcaagaaaacactcggtggatgtcagattcgattcaccctactcaatggaggcccggagtagggggttcgatgtcccctggtggaagaagctacttggaggcaaactaataggcggtaagatggatgacatcacagttgttgtcgcacaagtgaagacagtagtggtcccagaggacgaggttcagggtggcgacacagaagaacaaaaggggaatgagcagggcgctgcagctgtggttgcatacaaaatgaatgatgaagaagtagcttgagttctgggaccatcctcattttcattctcttcattttacttttctgtgatgactgtattatactgcacataaaggaattgaagcaaaataaatttgtgtgattgtgtctagctgtgcgtatat

SEQ ID NO: 18174 - DNA, 2215 bp, Zea Mays
ttgaacgggggatgattcattgcaagattggtggttgagggtacataattttctcccaaagtgttacattaccaacgttgaggttgatgttagtactgtaaataaagaagaaactttcgatgatcatccatcattggcaccaggacgcaacattccgcttgttaatcttcgaggagatattctagattctagtccttttccgctgcacgatagggcttcctgtccttcaggttttgaagagttgccggtcttgtctgaaggagagcaacatactttggcatccactcctgctcatcctgctggactatatgctctatatgctagttacttatttggtaacttggtggaacaactgtggaattttgcttggcctgccacactggcaattcttcatccaaatctattgcctgtggccattgttggtttcttcacgaagctttcagtgtttgttggggctcccatagttggcaaacttatggatcatttcccccgaatacccatgtacacagcattgaatgctgtgcaggtaggcactcagttgatatcagctgcaactgtcatctatgctctaagaaacctgagccatgcttctacaacagctgtggttctgagaccttggttcattgcactagtggcagctggagctatcgaaaggcttgcaggattggcgctaggagtttccatggagcgcgactgggttgtgttgttagcaggaacaaacaggcctgttgcattagctcaagctaatgctgtgctcaatcgacttgatctagtttgtgagacagttggtgcttctgtttttggccttcttttgtccaaataccatcctgtgacctgtttaaagattgctagtggtctaatgatatgcagtttccctgttctggtaaaccacatttatcatcactcctaaaacttgaatatggtagccagatgtagcgtactcacaatgctatatggtatttccaatttcaggtcatgttgggtcaactaatcaatagagtttcttgccatgcacttgattcctctagaactgccactgatgaatctatttgtgctgatcttttagatgtacgcaggatagttccaaatagcttgagggctatcaaacatggatggaatgagtataagcagcaaacagttctacctgcaagtgcagctaccgtgttcctaaatttcaatgttgcacttgctccaggtgccataatgactgcattattgatgcatcgtggtaccagtccatccattgttggtgctttcagtggattgtgctctatcatgggccttgttgcaacattcatctcctcaagcctggtgaaaagagttggaattctaaaggcgggagctgctggattgatatttcaagcttcactcttgtcaatcgcgctcacagtgtattgggctggttcaatttcgcaaacgacacctctacttatattcctagcatccattgcattgtcgcggttggggcacatgtcttatgatgttgtggggactcaaattgtccagacaggtgttcctgcttcaaaagcaaatctaattggaggaatggaggtttcaattgcaagccttgcggagctagtcatgcttgctatggctataattgcgaatgatgtctcccatttcggcttcctggcgatcctgtctgtgtcatcagttgctggggcagcatggatgttctgtcggtggttaacaaatccaacagatgagcagagggaactattcatggttgatcccctttatcaagttcagatagtggatgaggcaggaaacaaccaggaaaactgcaggcgcctacttgctggtggtgcttgttggatctgcaataccgttacgatgatactaagatacagtgtgacatttaggttcaatacgggatacacttagggtagaagcatttgctcctcgtggcctcagccatgcgcagaattcaatttgtatactcgttcatctcctcacctgtacaacacatatttgatctgtataagtgttacttgttatagctgatgtagaacaacattaacagccatcggtagcacacagtcaatgaaatctaaccccctcacctttcctctgatgctgcaaatgtgtaactgtatcttttattggatccactgtcttctttctcctgtcatcttggttccttgttaggcatgtacatccctgaacctcttacacatagacagtacatcaagcataagacataattaaaaaaaac

SEQ ID NO: 18175 - DNA, 223 bp, Zea Mays
ggcagagcccgcgtcagccttttatctaataaatgcgcccctcccggaagtcggggtttgttgcacgtattagctctagaattactacggttatccgagtagcacgtaccatcaaacaaactataactgatttaatgagccattcgcagtttcacagttcgaattagttcatacttgcccatttcttcttaatctttgagacaagcatatgactactggcagg

SEQ ID NO: 18176 - DNA, 3604 bp, Zea Mays
ttccaggcctctccagtaccattcgggcggctaagctctgagctaaaccccgacggagtgagcgaggaaacgttctccgtttcactttcccaacacccagaatcctgcagaaatcaccctttccacccccacccagcgctgctcggatccccgggcgagcacatcctccggtcctcgcttgtcggcctctcctccccggggccggtccagcgggttgcatggtgcgcggccgctggttgtgagcccaatcgatggcctcggcggaggcgcgccgcctcgcggtcgtgccgcagctagatatcgagcagatactgaaggaagctcaacaccgatggttacgccctgctgaaatatgtgaaatactgaaaaactacaggaacttccgtattgctccagaaccaccaaacagaccaccaagtggctcactttttttatttgatcggaaagtgttgagatacttcaggaaggatggtcataattggaggaagaaaaatgatcagaagactgtcaaggaagcccatgaaaggttgaagtctggaagtattgatgtacttcactgttactatgcccatggggaagagaatataaacttccaaaggaggacttactggatgctattgtacttgtgcattatcttgagactaagggtggcaagtcgtctcgtgctagaggaaacaacatgattcaagaagctgctgtggatagtcctttaagtcaattaccttcacagactatggagggagagagctcacttagtggacaggcctccgaatatgaagaggcggaatcagatatttattcaggaggagccggacacgactctttcacttgggtgcagcagcatgaaaatggaactggacccatgatagcttcttctgttttcagctcgtacacacctgctttgtccataggtaattaccatgggctgcatgccacacaaaacacaagcttctatcctgttaaccagcttaattctcctgtcattcttaatggatcaagtgccatgcttggaacaaatggctgtgcaaatcaaactgatcttccatcgtggaattctgtgatagaactggatcatgagcctgttcaaatgcctgatctccagtttcctgttcctcctgatcaaggtacttccacagaaggcctgggagttgattacttaacatttgatgaagtatattctgatggcctcagtctccaagatattggtgccacaggaactcatggagagtcatatttgcagttctctagtggtactggtgatttggctgcaacagtgaacagcttcccacaagaaaatgatggttctctggaggcagccattggctatccatttttgaagacacagtcatccaatctatctgatatcttaaaagacagctttaagaaaactgacagttttacaagatggatgagcaaagagcttcctgaagtggaagattctcaaattcaatctagttctggggcgttctggagcagtgaagaagcaaataatatcatcgaagcatcaaaccatgaggcactggatcagttcactgtttccccgatgctctcgcaggaccagctctttagtatagttgacttttctccaaactggacatatgtaggttcaaagactaagattttagttgctggtaacatcctgaatgacagtcaaatcaccgagagatccaagtggtcatgtatgtttggagaagttgaagttccagcaaatattttagcagatggtactctcatctgttactcaccgcagcataaacctggtcgagtacctttttatatcacctgctccaacaggttggcctgcagtgaagtgcgagagtttgaatttcgaccaactgtctcccagtacatggatgctcctagtccacatggtgaaacaaacaaagtttatttccagatacgccttgacaagttgttatcccttggaccggatgagtaccaggcaactgtatctaatcctactctggagatggttgacttaagcaggaagataagttcactgatggcgagcaacgatgagtggtccaacttgctaaagttggctgttgataatgagccttctactgctgatcagcaggatcagtttgctgaaaacttgataaagggaaaattgcatatctggcttctaaataaagttggtatgggtggcaagggacccagtgtgttagatgatgaagggcagggcgtgcttcacttagcagctgcacttggatatgattgggctataaggccaacacttgctgctggcgtgaatattaatttcagagatattcatggctggactgcactccattgggctgccttttgtggccgagagagtactgtagttgcgcttattgcactgggagcagctcctggagctttgacagacccaactcccgatttccctggaagtacaccagcagatcttgcatcttctaatggtcaaaagggaatatctggtttcttggcagagtgttctctgaccagtcatcttcaggtccttaatctgaaggaagctaatatggctcaaatatctggtctacctggtattggagatgttaccgagagagattcactgcagcctccaagtggagattcattgggtcctgttcgaaatgctactcaagctgctgcgcggatatatcaagttttcagggtgcaatccttccagagaaagcaagcggctcaatatgaggataaaggtggcatgtctgatgagcgtgctctctcactcctttctgtcaagccacccaagtcagggcagcttgatcctctgcactctgctgcaactcgcatacaaaataagttcagaggatggaaggggagaaaggaatttcttcttattaggcagcgaattgtgaagatccaggctcatgtgcgaggtcaccaagtgaggaagcattatcggaaaatagtttggtctgttgggatcgtggagaaagttatattgcgttggaggcgtagaggggctgggttacgtgggtttcggtctcaagaaggatcagtggagagcagtagtggcggaacaagtagcagttcgatccaaaataagtcttctggagatgattacgattttctgcaagaaggacgaaaacagactgaagaacggctccagaaagctcttgcaagagtgaagtccatggctcagtacccggaagcaagagatcagtaccagaggattttcactgtcgtgtcaaaaatgcaggagtctcaggctatgcaagaaaagatgccggaggagtcagcagagatggacatgagtgaattcaaggaactgtgggatgacgatgcacctatcccgggttatttttagtgtggaaacctgttttgttggatttatttctctgtagattgctccgtttgtcttgagtgctactgaattgatggcacaaatggctgataacccaaagtagcgttgctggtgcatgatctgacatgtttggatttggacttaggtgtggtatttcttttgccttatgtacagtagaatattatctacatttgaaggagccttgtatttactgtgtgaaatcggtgtaaagagtttgatatcagagatcttacccagacttaacggttgcatgttactgcagtgcagcagttaggagtttgaggctttttg

SEQ ID NO: 18177 - DNA, 2009 bp, Zea Mays
aacggaacaatacttatctttttccctgcccccgcggccgccgccccgaacgcgcacgcctcctccgccgaagccaagcaaaccaccgacctcgacggagtcttctagccgtcaccctcgttgtcgccctgctcctcctctcagccggtccggccggcggcgtggcgtgaagatcaatccggacccggaacgagttccctcttttgctggttacataaactttggaataggaggatatcccatattgatctttgtgattgagattgattttttttctggaaaatggagatacaaacttcagggaagcccattgatgtgctgatggagaaggttcttagcatgaacattctgtcttctgattactttaaggagctctataggttgaaaacctatcatgaggtcatcgatgagatctacaacactgtcaaacatgtggagccttggatgactggcaattgcagaggcccctccactgcattctgtcttctatacaagttctttaccatgaagcttactgtcaaacagatgcacggtttgttgaagcatcctgactccccacacattagagctgtaagtttctgtttcctgcccttctgtttgctgatgctgaatgtcttgcttcatggccctgtatctattcattaggcatgaggttagtgtatgaatctatatgtttattgggatgattataaaacttatttcggaagtattttttgcaatgaaaaatcttacattccttgcgaatcacttgtacataattttgtgcttacattttggttatagccactaacggtccgacaacttgtttctttggatggacttgtggctgaatttcttggtcctaggacacggggatgacaaagtttgcaagaagttcatagtgtaccagtctgtgctttggagttgtgagcattttgttttttttgtctttactaagcctgttaaatactaaaatattttgtgtcgaatgactgttttgcgctatttggtgcagattggtttcttgtatcttcggtatgttgcagacccaaaggttctttggatgtggtatgagccctatttgagggatgatgaggagttctcccccggatctaatggccgcaagacaaccatgggtgtttatgtgcgtgatcttatacttggacagtactactttgatagtcttctaccaagaattcctctcccagtaactcgtcagattacagccaatcttgaaaagatgaaattgcccactaagctttctggggcaactggagactccagtcgtcagggatcagaagatactgcacgccgtcctccttcagtgaaagcttctctgtcagtttcctttggacagcgtgctccacatcgggcttccaccagggattcatctccagttcgtcgaacagtcacccgtgatggtcatcgaagttcatactcaccatctcgtcgtagtggtagccgtgagggtcctgatcatgaccgttctgaccgggaactggatcattctagtcgtgaccgtgaaagagcccgggatcgttcaaaccgggatcggtatcattcaagccgagaccttgaccgtgacaaggatgccagagattatcatcggcatgagcgtgatagcagggatcgtgagtactacaggtccaggcattcagaagaaagacgggacgacagaagagatcatgaaagtagcaggcacaggcgctctagctctcgccacaggagcaggagtaggagccgaagcaggagcaggagtaggagcaggagaagccgcagccgaagcacgagcaggaggagcctgaatgagcagcgatccagcccattcagggatgcaaataaagagaaggcagccaccgtgtcgagcaacctagcaaagctgaaggacttgtacggtgacataactgcaaagaaggaagacagtgatgctgaaaagcttcaccgtgattcatgcgctgaggaggtcatcaggctgggaggccctcgatggagggtgatacatcatttcctgtcaactcattagcaacatg

SEQ ID NO: 18178 - DNA, 1638 bp, Zea Mays
gcgttggggacgtcagccatgtccacgaggtgtcagagacggcagccgggaggtgcggccgtgcatcgttggagatggcagccgcggccgcccaacgttgaagacgacagctgggaggacgctagtggcagcagagatggaagagaggaggcgagtggagactgaaggagtctgggtctccgcgagtctgagaaggacaagatagatgtgcagctgggaaggataaggcactttatttttgcattccattcagggagcagttactggaatattatgcaaataacaaaactccaggagacgctgaggaaaatcttctgacttgtttggccgacctttttatgcagataagccaagcaaagaaaaagaccggtgttattgctccaaaacgttttgttcagagagtgaagaaacagaatgagttgtttcgcagctacatgcaccaggatgcacatgagttcttaaatttccttttgaatgaacttgttgatattctggaaaaagagtcaagtgctgctaaggactcaccccaatcgtcgtctcctgaaaaagctccaaatggcccagttcaacctttagccaatggagttaaaaaagaaccaccagttaccctggtccataaaagttttcagggcatattgaccaacgaaacaagatgcttaagatgtgaaacagtaactgcaagggatgaaacatttcttgatcttagtgttgacattgaacaaaatagttcaatcacaagctgcctgaaaaatttctgttctacagagactttaaatgcagaggataaattcttctgtgacaaatgctgcagtttgcaagaagcacagaagagaatgaagattaagaaggctccccacatattggtgatccatctaaagcgtttcaagtacattgagcagcttggccggtataagaagctttcatacagggttgtattccccatggaactgaagctcagtaattcatccgacgatgtagacactgagtactccctctttgctgtcgtggtccatgtcggaagtggcccgaaccatgggcattatgtaagccttgtcaaaagccacaaccactggttgttcttcgacgatgaaaatgtcgagatggttgaagagcagaccctacaaacattcttcggtacttcacatgaatactcaggcaacacggaccatgggtatatcttgttttacgaggggcttggtgggaagagttagattggtctattaacctttcctgttcctttttttccttctctttggagcttgcaagttccactcttgtacctacacagctactatatcattacctccatggaaaacggtcaatccaagaggttgtatgaggcgacgatgccagattttgggtggtttcagtgtacaggggataatggaatctagctcccaacgatgaaataaggtgtaattttgaagttcgcctgaccagttccttctcagggctaacatcttctgttaaagtgtgggactttactattgggcacactgtacatcaattctcgttcataactttgtacgcattttccagttctgatccatgtacgtgctgaaacttgtgagcatttggcatgtttgattttgtttttcagtttacccatgtaactgtattttctcagggcgaacagag

SEQ ID NO: 18179 - DNA, 826 bp, Zea Mays
ggacaatgtttcatgtcctaaatttgaagctccagagcatagcaattacacggttggtgacttcatgacaagaagggacaatctccatgttgtccaacctactacaccagttgaccaagccctggagctgctggtgcaacacaggatctctggcttccctgtggttgacgatgactggaacttggttggggttgtatcagattatgatctcctagctttggattcgatgtcaggaaatgaattggccgatacaagtacaaacatgtttcctgatgtggatagcacatggaagacattccacgagctacagaggatattaagcaaaactaatgggaaggtcattggtgatgtaatgacctcttcacctttagcggttgggatgattacaaggggaaatgtcgtcagtgctgccctcaaaataaagaagaaaactgaagaaggtgcttgaactagactgctcgtcactgcttgcttggggttaatcatgcagccatttggcattgaattcattgaagcattgattggtgatgttcaaagtgtagctacagaattttgttctcaatactaggtagcatactagtgtagcagtgtgtaggttcatattcactgtttttcatcgtatccatgaacatttttattgatttgcataatggaatcaagagcttgtgatacgataaaaaccttgaattgatggaaacgatgacttgccctaaactattagagggtaaactattagggggtgtttggttcgaggaatcactccgttcaaaatgagatggtgcattatagatccattcctcaaaattggtggatgacctcattcctt

SEQ ID NO: 18180 - DNA, 2323 bp, Zea Mays
tcaccccaaacggggcctaggttagcgtttgccgtttggcacagccagctcgttgacccgggccatttgggccagccagctcgttgccctgggccctggcccccgggcgccctcacgcccgctggccgctataaatagcgctcggcgttcctgtctccacccatcccaagaagagccgccctacctattccttctcccagccgtcgagctgcccaacccagagcaccagcagccctcaccttcttcctctcggccggtccttcaaacgagcccgctcgtcttggagccgccgccggtctcgttctggacgaacgttcaaggagattgcatttgtggatgctctaatggagtcgaaaggtggcaagaagtctagtagtagtagtagtaatttcatgtacgaagctccccttggctacaagatcgaggacgttcgcccagccggaggaatcaagaagttccagactgctgcttattccaactgcgtccgccagccatcctgatatcgcctcacatgcaattcgcggtagagtaggattttaattcagttttcctcttgtgtcggtagttttccgttggctctggctgccttcctctgcttctgagattccaacttgtcttgcccatctctccttttcctctctcatcctctctttcttgcaacacgtcatccagtggcgatgtcttcagcagattcttgtgtctcttctcctgcctcccctattggctttgagggctatgagaagcgcctcgagatcacgttctctgacgcgcctgtctttgaggacccttgtggtcgtggcctgcgcgccctctcccgtgagcagatcgactcgtttctggatctcgcacggtgcaccatagtgtcacagctctccaacgagagcttcgactcatatgttctgtccgagtccagcctctttgtgtatccccacaaggttgttctgaagacctgtgggacgacgaagctgctgctcgccattcctcgcatccttgagcttgctgcagggctgtcactgcctcttctttcagcgaagtactctcgtgggaccttcatcttccccggcgcgcagcccgcgccacaccgcagcttctcggaggaggtatctgtgctgaacgctttctttggtaacctcaagtccggtggcaatgcctacctgatcggtgaaccgttcaagcccaacaagaagtggcatgtctactacgccacagaggagcctgagcgtcctatggtgacgcttgagatgtgcatgacagagcttgacgttaagaaagctgctgtgttcttcaagaactccactggtggcagctgcacttcagctaaagagatgacgaagctctcggggattcatgagatcattcccgagatggagatctgtgactttgagtttgacccctgtgggtactcgatgaatggcgtcttcgggcctgcagcctccaccatccacgtgacacccgaggaaggtttcagctacgcaagctacgaagctatgaacttcgaccccagctcactggtctacagcgatgtgatcaggagggtcctggcaggcttctctccttcggacttctcggtcgcagttaccatctttggtggccgtgggttcgccaaatcatgggcgacgggtgcagacatcgattcctacatgtgcggtgatcctgtagagcaagagcttcctggtggcggtctgctgatgtaccagagctttactgctgttccctctggctctgtatcgccgaggtcgaccttgcagacggatggctggagcagcgatggaatggagatggcctcaaatgacgagatgtgtattggctgctggaatgcggtgaagaaggtggtgaagaaagatttggatgcttaaagatttggataacttaggtggtgaagaaagatttggatgcttaaagatttggataacttaggtggttcttcacctaagttatgaagaagtctgagacctctgtctctctgttcttttggtttcagttaagcagttagctgggctaccggcaatttgtttgcttaatatttttcctgttcaataagtactctggatctgcgtctgccatagtgcttgatattatttttgttgttagtcagtgggtcttcaacgactgatgttattcttgttctcaacagaagccatcaacacgacatgagattattcttgttcatcaacgtaacactagcagtgttatttaattagttacatagtctcagtatgagcaccaagttttgtcaatgttttgattcacactcttgttggacaggtttataacacagcatatatatgtttttcctgttatgccgtgtaagagttgcgagcgg

SEQ ID NO: 18181 - DNA, 316 bp, Zea Mays
caatatcagaataaacaattaaatgttactaaagacatcatggttggtagagtgttattcaagatagcattacaaagccacttacctgaacgcgactccagagcaaggggacagcaactttggcacgatttcttacaaaaacatttgtccacagtggttgatttggaaactctaaaagaagagtatctgtctgtgtactcaaattgttgttgctgacaataagactctttggtactgcttcataaagagttccagcagctcctgcattatctggacagcctgaactccttccccctgaaaaagataacaaacatta

SEQ ID NO: 18182 - DNA, 1838 bp, Zea Mays
aactgctccagtggcatcatgtggatctctggaccaactatcagcttccaaattgagtaaagagaaaggtggttgtgtagtcaagttggctccagatttacctcctgtgaaccttcccccttctgtccgtgtcttatctcaggtggcatttcatccgaacgcaacacactttcatggcacctcggacaatgcagcaaagaatatgtatcctgtgccaccactggcctttacagagaatgcttatagacagctaaatctgttccccgaagctaattctaggttgcagcagaatgggatcaccaatgataatgctacagaagatggttctgagcaagatttgcagatgcatcctttactgtttcattatcctcgagatgtggtttcgtcatatagtcatccggttcaaaatcttattaatcagtcaagaaaatatgatcttttcccctttgagaaagttcaagttgagagaagtaacaaccagactacaggttccaccaaaaatggtactgtaaatgctaacactatcgacttccatcctctcttgcaaagaacagaagttgatgtgcataatgatgtaccagaatatgatagtaaccttgattaccatcagtctgataataacatgagcaaagttccagtagatgaccagtcaacggctgggcaagcatccacaggcccttctgagagggagacaagtattgacttgaacattcatttatgttctccaacggtcataaaagattcaaatgacttcagaagtagttttagcagatcaaatgttcaagatgaagtttctaggaaggacaaatctagtgttccagggctcgagattgtaaattcctattttcatcattgcattcaagaacctaatgaagaatcaatgcaaggaattgtaatggagcaagaagaattaagtgattctgaggaagatagccagcatgttgagtttgaatgtgaggaaatggatgattctgaagaggagcaagttcagggtccagaagcctctccaattcaaaataagggtatctcagcatcagttgtttgtggggaatttcatgttagcaatgaccagagtcaaatccagcaaggatctgttcaaaaggataaacagggtgcaagctcgatgcagaaaacgcaagttccttctcggtcagtgagggctaagctgaagccagaaactgcaaagcgcacaggatctaggacgtccacttctcgcacagttgaaactagccggagcaaaaccagaagttctaaagtgccacagggacagtcgagtgctgaatggaagtccaatgattcgagaagaactagaaaaattccggccccaagatgaaggccaatttagcattttattcctgtgctgcatgtgccataggcagagtggctaagttcagtctgttgtcactgcgttgttgggttgattatcatcaacgtctattcagcgcatgctggagaaagcaaccaagcgaacgtctgtggtcatttagctcgaattgtcatgtgaaaatagcagtgggagcaatgtaccaaatatatgaatttctccagttagatagatgagacgaattcataatgttgttggtgactgagtaaagcattcccatgaatagatgagacgaattcctcgggagttttgtacgacgtcctcaaaggttatttgtaatgtgccttgtaatttcaaccaccaaccaggttagttgctgtatgcgcattcgttttgtgtactgggtagagaaatgaatccgggatacatcaactaacctggattcttaactgatcgttaatacatgtggcactagcaactcctgcaatagctgaatgaatgttgttcatgcctt

SEQ ID NO: 18183 - DNA, 2923 bp, Zea Mays
ttgagtttcttaaactccacaccacctaagtcaacacatcaccaatctcaaagcaacgggcacgctgaggagggcgtcagggcgagacaacccgctcgccgtggaccgtggtgccgccgcgcgcccgctgccctgctcccctccaccttccgcgcccttgcactgctgcctccagtatactgcgtcggcgaagcttccagaattccttgcctagggtttctccgggcagccttcgatggggcctcccttcttccttctcttcctcgtcctcacggccgctgcggtcgtgtcctcggccccccggcgggaggcgttccgccgggacccagggcacccgcactggcaccatggcgctttccacgatgtcgaggacagtgtccgcgccgacgtccgccgcatgctccacacccgagcagaggttccatttcaagtgcctcttgaggttaatgttgttcttattggtttcaatggtgatggagggtatagatactctttggatgggcacaagctcgaagaattcctaaaaatgggtttcccacttcacaggccctcttgctttgagacaggggagccaattgatatcgagcatcatattatgtacaatgttatatcggctggacaaccggagctgatatctctcgagaagtcactgaaggaggccatgcaacctgcaggaattgcaagagatagtgaatatggcagggaattgcctctatttgaagtagaagcgactgcagtggaatcgatatttcagaggctatactcattcatttttgacatggagcctggttatcctgcaaatgacatggataggcctgttcctgttgcgatatttattgttaattttgataaggttagaatggatcctcgaaacaaagaagttaatctcgatagtttaatgtatggtacaattggtggactaacagaacaagaactaaaaaaacaagaagcagaatacatttaccgttaccgttacaatggtggtggggcaactcaagtttggctaagttctggaagatttgttgtaatagatctttcagcgggcccttgtacatatgggaaaatagaaactgaagaaggcagtgtcagctataggtcaatgccacggctgtcacaaataatcttcccaagaggacttgctgccccaagtgctagttcaacgcaagatattttcattgggcagctcggaggtgcaattgcaactaccattgagcatgtgatagctcctgatataagatttgaaactgttgacatggcagtgaggttgcttgtacctattattgtgctacagaaccacaataggtacaacattcttcaagaaggccataactatagtatagatgttcaagctatagaaagggaggttaaaaagatggtccaccctggtcaggaggtaataataatttctggttcgcatgcgctgcaccagcatgaaaagttagctgttgcagtttccaaagcaacacgtagccattctcttcatgaaacaaagagtgatggccggtttcatgtccgtaccaaaacttacttggatggagcaatacttaaagaggaaatggagcggtctgctgatgtgctgtctgctggtctattagaagttgcaaatccttctctctcaagtagattcttcctaaagcagcattggactgatggagaagatgatgtaaaagactctattaagcacaggcccttgtgggaatcttacatgcccaaaaataataaaggaaggagaggaactggaaagaagaaacatggaagtctgtacagaacttatgggaccagagtgatcccagtttttgtattatcactggccggtgtcgatgctgaacttctcatggaagaggagagtcttgtttggacaagtaaagatgttgttattgtgcttgagcataacaatgaaaagattcctctaagctatgtgtcagaaacgactaggcagtttgctcttccatctatcgcacagcgccacatcttggctggtctggcatcagcagttggcggtctgagtgcaccatatgaaagagcatcacgtattcatgaaagacatgtagtgaactggctgtgggctgcaggctgtcatccgtttggaccattctcgaactcctcacagatcagtcaaattcttcaggatgtagcactgagaactacaatttatgctcaagtcgatgctgctcttcgcaaaataagagacacatcagagtttgtccaatcttttgcatcagagcatcttaagacgccattaggagaacttgtgaaagaaacttgaagggcaactcgtggacttgtcttccttattgtatgaccaccggctggtcgatgcatatcaaaacagtaccgatatcctgcaaagcactatttttacacaacagtatgtggaacgtgttctagctaacgagagagacaagatgaaatgctgtagcattgaatatagtcatccaaagcagtcatcccaggcttttgtctatggagggatccttctggctggatttcttgtgtattcactggttattttcttctcttcacctgttcgctaattttatgtccagatgcagaaagtcttggatgctttatggtaggctaggtttgtctggggctgtcaatcttcatgagggaatggcctgaactgtcttggatacagaagggctttggcacagttttagtgctctatttctcgacacacaagcaatcagacggctgatatatatgtaactgattcttgtctgcgataaactatagtcgatttcacagaagagctggtgcatgctatgaaaatatgaaatactttcatcccattttgcaacttgttactgcagaactgcacataacaccactgacagaaacccccgtttgttaataagccccccagcttcatgaggaccagccagcagacatgtggccttggactggtgcaaggacgtagtcg

SEQ ID NO: 18184 - DNA, 5386 bp, Zea Mays
aacagaggcccttgctggaaaatccatggcataactcagcatttgaaggtgttggatttctcaggctgtttcttccagcgaactcgaggaatcaggatcactttacaactgattggattagaaattgtctggacatatgggattctgtcacaaattgtaacttctgggacatccaatgggcttccatcatagcacgttgtataaaaaattcaagatctgtgaactgggatgcttttcttcccttgttattcacaagatacttgaacatgtttgaggttcctatatcaagtggcaatggttcatacccctttccagtggaggttcctgggaacacaagatttttattttccagtaagaccagaacactttccaaggcaattgcaaagtctgttgtataccttttgaagcctaaaagtttagcatttgagtattttgagaagctcattaattttttggaacagttctatcatccgtcaaatgggggtcgttggacctactcattggaacgcttcctgcgctatcttgttgtttactttgagaaacgccttcagcatgaacaatttgttatggcagttgaggaccatgatcaatcttatctgggaaaggaagaaaggtctgtttttgtcaaagctatcttgaaattattggatcgtggtcagtacagcaaggataattctcttgctgaaacagtttccgttgcaacttcgatcctgtcttatattgaaccaaccctcgtgcttcagtttgttgcaaaaaacttccaacgagccttagagacaactacagctacccatcagttaaagaacgctgtcacatctgttgcattttctggacgtgctcttcttctatgttctttatgttcatctcagaatgatgatagcagtgttgttgattcattcagtgatcttgttgtcgcttccctttcaaatgcgttacttggcatggatgccaatgatccacctaaaactattgctacaatgcagttaattgggtctatcttttcaaatctagctgcagttagtgatgatgtgcctatattgctccaatctactactctatcgaactggctagatgaattcttttcccgactgttttctgtgcttcataatctggaatcaagtagtcccattaatgagggttaccaaagctcattcatgtcagggacttttcttgttgacagtccatattacttttgtatgcttgaaattcttctagggaagttatcaaaacccttatttaatcagtccctgaagagaattgccaagttcgttaatgcaaatatcctccctggtgctacttcagaagttgggcttctttgttgtgcctgtgttcattcttatcctgaggaggcttcagtctaccttgtaaagccaatcttagagaccatcatgtcatcctttgaggggactccaaccactggttatgtaggaagagtagttgcagataaagcatctaccaaggctgcactttctcctgctctggaaacagcaatagattactatctgagggttttggccatatccatcagttatgccggtcctaccttactcaattataaggaggaactaaatcacataataacatctgcgttccagtccccttcttggaaggttaatggagctggggatcatctccttcgctctctgctaggaaatctggtttcttattacccaattgatcagtacaagccattcacttgtcagcctattggaaatattattgaaccatgggggtgttcgaaagctcatcaggatagggaggatgaaatgcttaatttccctccaaagtggcatgatccaagtcatgatgaactctcttttgcaaatgaattactacaacttcatttccagtcagctttagaagatcttttgactatttgtcagacaaaagttcattctgacacaggagatgagaaggagcacctaaaaataaccctgttacgcattcattctgcattgcatggtgtaatgtcttgtttaccagaaattcgcccgtcatataaagatgggaggtccctggaagtggagtcggctttcttcatagcaggatctgctggtagcactgttggaagctcagaaatgcgtgaaaaggctgcagaatttgtgcacatagcttgcaggtacttattaaaggaaagaactgatgacagtattcttctatcccttgttgtgcgtgtcattgatgctttggtaaactatggaagcttggaataccaagaatggtcaagccatgttcaagcttggaaactagaatctgcttccataattgagcctccatgcaacttcattgttccatttcatgctcaaggaaaaaagagacctagatgggcacttgttgacaaagcaaacttgcatagtacatggaggtgttcacaatcatcatatcacagatacagaatgaatgcagatgtttcgccatctgtccccatgattaatttgatgaatgatctcttagatctctcactacacaactatgaaactgttcgatcgtatgctggaagatcgcttacaaaattgttgaaacgttggccttctctaatttctaattgtgttctcacactcacgggaaatttgcgtgacccaaaagctcctgaacatgttgttcttggttcttgcagcattctgatctcacagactgttttaagacacttgaccactgattctgtttccctctcttcctttatcatgggaattctggaaagctctcatcatgaatcgttgaagtgtcagaaagctattactgagctctttgtaacatataatatacgtttctctggaatatcaaggagcttctttaaaactcctgaaaatcaagctgacaagccaggatttctcagtctaatttctcaaattaatgctttgggctttgagactaatggactacattggaggtacaatttgatggccaacagagtattactattactaattttggcatccagaagcgaatctggcatatattcacaaatgcttgcaaaaattgctggtcatttcttaagaaatttaaagagtcaactgccccactcaagaatgcttgctatatctgctttgaacacattattgcaaggatcacctcataagacatctgcacaaaattctaagcaaccaatagatcaccctgaagattgcaatatttcatcaacagaagagattttgaatgagataatccgggaggaaggattcatgaatgagacactgaacagtttatctcatgttcatattatttccgacaatgatggttcgtcaaaagcgagttatggggcatcatcttttcaaagcggatctgacaaagcaataacttacttctattttgatttctctgcctcatggccacgtactcctagttggatttctttactgcgtggtcacacattctattccagttttgctaggatattcaaaaggcttatacagcaatgtggaatgccagtaatctcttctcttcagagtacactagaagagtttttaatttcaaaagagagaccaaggcaatgtgtcgctgctgaagcgatggctgggatgctgcactctgatatcattgggaatctggaatgtgagaacaactggttgatggcccagttgcataagattatgttagcaccatctgtggagtcagctcctgaatgggcagcttgtattcgatatgctgttacaggaaaagaaagagctggaactcgtgctcctgttctcaggcaaaaagtattagaatgcttatgtactcctcttcctcattccatggcaactagcgtacttgcgaagagatattcttttctgtccgttgctctaatagaaatttctccacccaaaatgtccccagcagagaagcaataccatgttaaaattcttgatgaactacttgacagcatgaaccattcatctgctcaggtaagagaagcaattggtattgccatgtgtgttacaacctcaaatatgagactttctgggttatttggcactggatgttcaccgcaaggccttcatggggatgtaagcatgattgaacaaacaggaaataaatattggtctgaacgtttgacagatggagctaatgaattagccgtaagtatacaaaatagtactcaatctaagcaactagaatcaacatcagattcggctgaagatagcatggatgatagagagcaggctgatgctaaaaggatggaaacgatatttcattttatgatcgcatctttgaagtctgggcgatcttctgttctactggacactattattaggcttgtgtacccaattctctcactacaggaaacatcaaataaagatttatcattgcttgctaagtcagctttcgagttgctgaaatggaggattctacatcggccttttcttgaaactgctattacgtctattcttcctttagtcagtgatcctaactggcgtaccagatctgcactgttatcgtatctcaggacctttacctacaggcacacattcatactttctggctcagagaaatcacaaatctggcaaacaatagaaaaattacttgtggacaaccaagttgaggttagggagcatgctgctggtgttcttgcaagcttaatgaagggtatagatgaagatctatcaaaggatttccgtgaacggtcatatgcacaagcccagcatatttttgttgcacggagaagaaatttgaagttttctgttggtaccatccatggtgcagtccttgctttgacagcttcggtcctttctgttccatacgacatgcctagctggcttccttctaatgtctcgctacttgctcgcttcatccgggagcctccccctataagatcaacagtcacgaaagctgttgcagaatttaagcgcacccatgctgacacatggagcatccagaaggacgcattcactgaagacgaactggaggttctccgtgatacatcttcctcctcgtcgtacttcgcttagattaaaatttcaaaggccataggatattctctggtactggtgttgtgtatatgaatttataactgttgaagtgtcggtgtttttcataaagtatatccttgtacgtacctagttttatttcatcaacagatgccttcgtacaactgagatgaagttatgcagtctactgtataccgtctggacatagcggaagcattatggcatgtgggatccttgcgtgggctgagaaattgttaacatccaaatcttttgcccagtcaacgacgtgaataagatgctgcctagtttaaccgcataatgcatctctggcaactctaatagcagagtcaacgggctagatataaacttgcccatgttcattagaagcaagaaagaatcagccattgacattaagaagtacatgagcacccccgatgcaaacgtctatagccctaatcatacttgtttcttgcttcctc

SEQ ID NO: 18185 - DNA, 2069 bp, Zea Mays
caatttgaagttggcggaaatttgatgagttagagcttattactggtctgatactcctatacgatgtcactgaaacttccaattccgcaagggctttccttcttaagaagtgttggatggtttgaggaccggaaggttgattcagcagccaaacagcagttatccccaacgttgaaactccagacagataaggagacgtacagacctggtgattcagtcactgtgactatcgaaatctgtagcccagctagtttgaaggatgatgttgggcaggcagtgtcaggcgaggatgccccctcgctgttgttagatgtgctatcatttgaacttaaagggattgagaagctggatactcaatggttctctgttcctaagcccttaccagggtctaaacaaaggcgaggtgaacatatgtttctggattgttcggcaccatcactggtctctaaagtaataattggtgcagggcgaacaaaaacgtacattgcacgtgtggagctcccaaagactttgccgccatcttataggggcatcagtatccgctatttttattatgttaggaccacattatttggaaggccagttatgttgggtaatggagaccaatataaaggtcttgtgaataatgcaattcatctggaagctagagtcccattgcagatacgtgtttcccagaaaagcagcagcctactaaatgaagaagatgttttagggaatctgcctttttcggtggatcaaccgagcatattttggaagggaaaagatgaagattcagaatggagcaaagcaaatgataatgttgatctagaagaaggatatgatagttctaaagatgaagtttcatctgtttcctcatacaatccttcaaaagcacatcctgaattctccctaaggagctcgttgtcaatgcattctctgtcatcacggctctccacgagtgagctattttacaatcaagtggaacgacctaatttcccatcatacaatccaattcctcgattgtcagtgtcagagatttcagatgatcatgacggaggtttagtggcatctcaaaggaaactaaacattttgctaccagaccatacatcgaatgggcaaagggtttctccagattctgatcactcaaaagatgatgctggactcccccttacgccaaaaaatgttgatccagctggatctgaaggctttacgacaggaagatcttataatataagaattgatgaccaagttttgcttcggttttcaccaaagaattctgactcaacctattactttggtgatatgattggtggagcacttaccttctttcacggaactggaaaacggaggtgcctcgaggtatctatagccctggaaacatctgaaacaattaatcctcgcgcattacatccttcaagaaggggctcaccaacaataaccaagctacacagtgaacatcatgaggttgttgcggatcttcaccagacaagctttctgttttccattcccattgatggccctatgtctttttgtacctcaaaggtcactgtacagtggtctcttcgatttgagttcttcacaactccggaaggaacagacccagctaggtacgagcacccactccttgttgataaaagagagaagggtgaatgggtgctcccggtaactgtttacacacctccattgcgcagacgagctactcatgagaggaatggtagatctgtctcacctggaaatatcttcaactcttgaagtgcactgttgccgaagtatagttactttcagctggaaaggatttacagactattctgactggtacaattgcatcaaaaggattttctcgctgtaaattgttataggatttgcaatgcgatgtctatttttttaatagagaacaaatggagtgaaatacttgacttgcaccaaatggatttattggaccatttgtttcatcgatttgtatcccatgagagatgcatcctggccaaaatttggtgttcagtgcattcattatttagcttatagttgaccttgaccaaagtatgagagcttaccacgacgcaaccatttggttctctcgaatagtacac

SEQ ID NO: 18186 - DNA, 5476 bp, Zea Mays
gtggtgcacggttctgcctttgttccgcgcccctgcgtccggaaatctcgccgcgcccctgcgtccggaaatctcgccgcgcccctacgcaatcacctcctcctctcccctcactacgccgccacctcctcctctccccctcactgcgtcgccctcctctcccactcactgcgtcgtcccctggatcctcgccccagcctctccaaccgcctccgcgctgtcccctggatctcgcgtcgcgcgtctgcagcacgcccgccacacacgccgcgattggagattggtggaaagcggtccgcggcttcaactccgacatctccggcgagctcgagcgcctcgctgcaacgacgggggcgacgctcagatccgacgtgccggacgcggccgccgtggatctgaacgacctcgagtccatggatctgtcggcggacgctgctccgctggagcacatggagccgttcgtgctggcatgcgcgcgggtgctgggcccgacgccgggccggacgcgtggcgtcgccgacggccgggtcgtcttctgggacggcaagcggtgggtcccattcgcgacggcctctccgcgctggacgcaggagctctgcggcgggcccaaggcctcgccgctggagtatctccccacgcccggcgatggcgccctgcacctcacgcccgtgctccgcccccacacccagcaggcaggcatggatctcgcagggcagggatctcgcggatcacgccgtgcggggatctcgcggatcacgccgggcggggatctcggccaagcctgatcagaagtttggggccctatcaaagcgattcgcagaagtggaggctgggggatcgaagcggaggtggtggagatgacggaggcgctgaagtccgtctggaatccggtgacacagaaaaagatcagagtttctccttctacttcgtcgggtgaagtcccggtggtggacaacacctcgacgctgatccctctggaagctgcggcaggcattgctggtgccgatgcaacccacatttggcattcccactccaatcgaagggtttttggtgtcgctgaacaggacactaggcttctgctctgcttactaatccattggtttcaagatgacagaagccgtcatcaaactgaatacttcttctaactgaatacttcttcccagctgacagatcagatcaaacttgacgtgtgttaggtatcagagaaaaaaaccaaggcatggtgcacttctaaagagcacatctgcagctgcccgctcgggctccgtttcgataagactagggacctgtacatcgccgacgcctacttcagcttgctcaaagttggccccgagggcaggctggagagttgctgtgaaaactctcaagtgagggaacatgatcatgtgcacgcaagatcctgatgactgttggcagaatcaagtcatagttaaataaacaggcccccacccgacggcgcgagcgaggcacgcggccctcccggcggggtggacgcggcccctggctgtgaggcgacgatggggctggaggctgcgatggcgctgggcgacccgccggcggactacgcatccatcgcgacggtggggctgttcgtggcattcatgtgcgtctgcatcgtcgtcgggcacctcctcgaggagaaccgctggatgaacgagtccatcaccatgctcttcatcggctttgggaccttgatgttgcaatgctgtatgttggggattgcaggggctgggaactagagcagtcatcctgttcgcgtcgagcgagaagcattcacgtgtgctggtgttcagtgaggacctcttatttatttacctgctgccgctgatcatattcaatgcagggaggcaggagcatccttaattgaacggcagtgatcctgcagtttatgttggaaagaaattaacataggagcattgcacgtatttggttattgttttagaacctatttctataggttttctctttggagctttctgagctaaagtccaaaaaggattccatcttctgaacacttcagtagcaaagcaactatgttgtgctattaaatataaatctgcaattattccaccaagtctttggcgttaggagtgtagctgatatgttgtcatgtatgattatgctgaatatctggcactaagaacctttgtgtataacccactcacaattcttttttttttcttccccaataagccaggttccaagtgaagaagaaacagttctttcgaaacttcattactattacactgtttggtgcagttggcaccttgatctcttttactgtaatatcccttggcgctctaggactaatatcaaggcttaatatcggcgcacttgaactgggagactatcttgcacttggggcaatattctcggccacagactcggtttgtaccttgcaggtgttaagccaagatgagacaccattcttgtacagcctcgtgtttggtgaaggtgttgtcaatgacacaacttctgttgtgttgttcaatgcaatccagaactttgatcatggaaatatcagcggtgccaaattactgaacttcattggcagtttcctttatctgttcggctccagcaccattcttggagtagcttctggacttcttagtgcttataccattaagaagttgtactttggcaggcattcaaccgatcatgaagtttccattatgatgctaatggcttatttatcttacatgctagctgaattgctcgatttgagtggcattctcactgtgtttttctgtggtatcgtaatgtcacactatacttggcaaaatgtaacagaaagttcgagggtcacaaccaagcatgcctttgcaacattgtcgtttatcttcgagacttttctgtttctttatgttggtatggatgcattggatatagagaagtggaagattgtcggtcaaacttataggcatactctctccctctttctctctcttcattgctcaactagaagatctttcttctggatctgtattttctatcatgtgcagcccggtaaagtctatcgctttgagcagcaccattttagccttggtgctggtttcaagagctgcttttgttttcccactatcctttctatcaaatttgaccaaaaaactccaaatggaaagatatcttttaggcagcaggtaagtctttaacttagcaacatcttaacttcttatgttctcttgaaacagttgttatattccttacatgatattggtcatttaggttattgtttggtgggcgggtctcatgagaggtgttgtgtctattgtgttggcttacaataaggttaatcttgtgtttggtctatctggtttgagctttggtctggaattatgttactgcttttgtttcctctatccattccaaaacataggacattttttgttgtcgtaagtcaaaaattctctaactttgacagagtttatagaaaaacaaaccaacatcaacagccttcatttcttaatcttatatagaagttgcagtattttagtctaatagatggacatgttttaaattttgaggcattgaaacaatttgcatcatgaaggcgttcgacttaatgtttccaaggttctgtggcagtgcgaggcattttgggaggtggtgagcgcctcgcttggcaccttcattttcgtgatgatgctgtccttcaggctgcagtgccacacaagttcgtttggtgtaggtgctgcttgatttttggcggtgcatgccgggtgttcgacaatgtttctgaggttttgtggcagtgcgaggcattttgggagggacatcatcatgcccaacttgaagtcgtccgtgaccacaacagcgagcgcggtggagtacatggatgaagtattgaaggcgttgtcgccaggtagtaccttcttcccactcatgacactacctcgtagacaacacaagtctagatgttgctggtgcagctgttcaacacgggcaaggtgctgttttccaatgtggtcgtcgacggcggcatgttcgtcttggccctcctcacctaccgcagcttcttcgcggcgccatcattctccctgtccgtctgattttctatcaggttgctcgatcgtcgtcaatataatccgtgtcaacaaattttaatcttggttcataagtaaagaacagaaaaggaaaacctagatgtctataattatacgtacatcaaatctaatgattttaggtacatattttctgtttgccattgcaaaatctaatcacgtgaattttatagttccaatcggggctatgtctatgtactcttatttttgtccagaacccttatgtaaggggaagtggaaagaaatggattggcacactgctggatggatcttcctcaatacgtttatcgagtaaataagcttgcattgttttggataattacatcatgtaaccgattttgacatttttttattaatcaccggcaacttacccaatttgctgtaataataaaataaaaggctacactatactacacactttcttgccatacattaaatctgacggtcattttttttattcctgacgacgcccgcagccgccgccgccgacgacggaggagcagcacctctcgtctgtccaccgctgaccgctcgtttgtcagcctagcaccggggtgcatgaacgcccagtatatgctacagcaccgccgcccctggccctgccgcctgcgccggtcgttgccctgtgcactccgcgggcctcgggaatggccaaccaggacatttatcgtcttattccttgccgaggggagtcctgctccagtagtggtctcagaaggggcaaataccatggatgttggcaggcctgtgcttgtgcagaatgcaccaaggacaagactggatgcagggacatgggggacgatggggattggattggggtactgtattgcagctgcagtagctgaacctgaatgactcgtggttgctgtggagggcgattctggatttggcttcggtgcaatggaggttgaggggcttcaacagtgatgctgttttagcaatggagacgatccattccctgtcagcttcaaaatcaagttacccaatggctgatctcacccaactcttcatgacagctactcaagaagggaaaagatcagaatcgcaaggccagattcttagggtggaatgctatagcttaatgccctaatctttatatgcctcttcttatatctgcacttccatgggcaccgggcgacactaaattcacaagataccccctccacctcaaggtgtaagaccatagcttccatcgctctttacgttatgtaatatatttgtagtatgctaatttgattcaccataatccttaccattcatactattatgcttgtttttctctcttcagtaatcgtcgaaaatggttcattgttcatagctcaagccaacttaattttaacgcaaaaatgtagcagtacttaaagtttcatctgtaatttatcaatggataagtgagttagaaatagtatttatca

SEQ ID NO: 18187 - DNA, 1005 bp, Zea Mays
taggcctggagataaaatatgcttatgacatattaatgtatgcctatccgagatttcatgggagggtctcatgacagcatggttacattggagaacagagtacgtggtcttgagagagttgttgaggaaatggctagagaaatatcactctcctcaggcaggagaggtggtggtccagcgttgggctttgattcatctcctggcagatcatctaaacacaatggtttccatgaatattctaattcgaaatatggaaggagtggtgatggacggatgggatttgcagaaaggtatttctctgcagatgctatggcttctggtacgaaaaaccaatcttggagaccagattctgaaccatgggactcatatgcttattctggatcaagaagtggtatgaatgtgaggagaggattagattctgtttcatcagacaatagaatggcaagaaatgaacggagtaatgatcaagtgggtccccggagaggttgggacaaaggtcagggaccctttaggttcggtgagggtccttctgcccgaagtgcatggcgggcctcaaaagatgaagcaacactggaagctattagagtagctggtgaagataatggaaattcaagggccgctgcaagagttgctattcctgaactggatggagaagctttgaatgatgacaaccaaggggatgaaagaggcccactttgggaggcctggactcgtgcgatggatgctgttcatcttgaggatatggactctgcttatgctgaacttctttcgactggtgatgctgaattacttgtaaagttgatggagcaaactggaccggtcgttgatcaactttcaaatgaggttgcaaatgaagtcctacatgcagtggggcagtttctcatggaagaaagcttatatgacgtagcattaaactggcttcagcagatatgccggtttggactgcaccttttatgtctgaaggattaaagaggattctttgccaggctctccctcatctgagag

SEQ ID NO: 18188 - DNA, 3292 bp, Zea Mays
caagacaaccccatatctctagtggcaatccagtagcgcgccgcctctggccgtccgccgtcgtcgccctctccctcgtcctcgcccgtcgcacgtgttgtgtgatccagcggccaaaggcagatccatggaggttatgactggggcactaccgagcctcatccccaagcttgctaatctagtcgctggtgagtacaatctgcaaaagggtgtcaaaggggatatcatgttcctccaagaagagcttgagagcatgagggatgcactcgaggagatctccaaggttccagcagaccagcttcccaacagagataagatttgggctaggaacgtgagagagctctcctacgacatagagcccaagattcgccataaaatggctactgaaattaggacgatcaaaaggcgcatcgttgaggtgcacgaacgacatatcagtgtctcaaactcctgacttgaagaaattattcaagagtttgctctatgatcttggcaagtacatcaatgaagaatcgttggatgagagacagctcatcaatgtactcagagaattccttcaagagagaaggtatttaattgttattgatgacatatgggacatctcagtctggaaaatgattagatgtgctttaccagacaatgatatcgggtacattattgttacaaccacacgcatttccgatgttgctgaaaaagttggtggtgcttataagctaaaacctctttcattgaacaactctcgagaattaatgtataagataatatttgggaacgaaaatagagaaaacactaaagacaaagaaatatgtttagatgaggagcttgcagaagtatcaaataaaatactaaagaaatgtgccggtgtgcccctagctattattacgatggctagtgtactagcttgtaaagcaagaaatgaaatggagtggtatgaggtgtacaactctattggtgttggcattgagaacaatctagatgtggggaatatgagaaagattttgtcattcagctattacgatatggcatcccatctcaagacatgtttattatacttaagtatgtttccagaagattataaaattgagaaagatcgtttgatatggatgtggatagctgaaggctttgtccaatatgtgaaacaagggaagagcctatttgagcatggagagagttacttcaatgaactcataaacagaggtatgatccaacccatatataaccaagctggcatgatatatgaatgtcgtgtgcatgatatggtgcttggtcttatatgttccttgtcaaatggagaaaattttgttacaacattaaatggtttgggtcacggatctccatcaaatatgattaggagattatcagttcaaaatggcaatgagagtcaagctatgactctgcaaaccagaaacttgcagcaagtaaggtcggttgttgcctttccggatgccaccgctagtgtagttacggtcttgaggagcttccgagttctacgtgtactagatttacaagattgtgacctttcacaatgttgcagcctgaagtaccttgggaatctatttcacttgaggtatctaggactatgtaacacaagtattacacagctccctgaagaaattgtaaacttgcaacttctacaaatactggatgtatggaacaataaaatgtattgcctaccctcaactattgtgcagctgagatatttgatgtgcctttacattgatggttttactagagtgccaaacgggattgggagcctaacaagccttgaagaactcacatttctaggcatttatgactccactgtggacattatagaagagctgggccagctaacggagctacgggtactgcatatcgttctttttggtgaatggaacgacaagctggtggagtgcctgcacaagctgaaaaagttgaaatatctatatatcaaggaccgcagtggtcaacttaacattggtggtttggatgcctgggtagcccctccaaatctccaaatattgaatacgcgatcgggttgctggttcaccacactgtcagcatcagcatggatgaatccatctcttcttcaggacctctccttatctaccaccgtgagggagttgcagcaggatgacattataattcttgggagtttgccagctctccgctatctaaatctgatgattgttggtgaggatttgggagttcacaatgaaatccatggggaatgcattgttggtgctggtttgttcccatccctagtatactgccagctctggggaaatgtggcgcctatagtgtttcagcgaggagccatgccacggctcagaacccttgactttcggttatctgttcaagaggtgagaggaatcaacggcagggatggtggtatcgacttgggcctcaggaacctgccatcactccagaaggtttgggttcatttggaccctgagggcgctaacaaggcagaggtgaaggaactggaggctgagttgacgcgtgccatcaaaattcatccaaatcatcctcagctgtatggaattcaggatgaagatgcagatgatgaatgatgcactggagaaaagattaccaattatgcagaagctagtgcactttcaactttcatggcactggtctcaaggattgtctgattcagatggattacttctgtttctgtctcagattcagaatgtgatgtccaccccaatcatccaacccttaaggaacatggtgtcatggtgatgaagatgtaaggagccaacttgtgatcatccgctggaaaatggaagagcaatctggtggcctgatggactagcaaacctggaagtaagtacaaacaaaacacgagacagagacacagagtcgggcctaagatttagcaaaactgatgctgggttgggtatgtatgccctgtttggtgtgctctgatcagaggatgacatttacagaattaaagcgtagtgtggcaatgtggcagcctggggaaacctgcaactggcgatctggaggtctggagagaacaaaacgccagtgacagttggggcttaggcttggcaagcctaatattgcaatagcacatatgaataacggttgtttgttgcgactggaagtcctgtttggtttttttacatagtgtttgctgttttcactcatgcctttttcttttgtgttttgtgtactgtcttgggtgttcctagggttgccaaaccgtttttgtgacaccccagtgtcacctagggtttctctcaaaatgccaaaccaagaaccatcattttatgtgaatcaaattaagcatgagcatcaaattgac

SEQ ID NO: 18189 - DNA, 1707 bp, Zea Mays
cactcccccacttcgacccgggggcgccctctctctgtctccggaacccttccagccttctcgctcctggaacccagacctcaacccttccgtccccgaccatcgacccccgaaggacctggcggtgtccagatttccagaagcatcccccatccagcccccggcgatcgtgcggaacctggcggctggggacgcgggagaagcggcgagggctagctggagatggacacggcggagaagatgcggtggcccttttcggacggcagcgtcaccgatctcctggacgcccgcagcctccacggctcccccgacattaagaaaaaagcacagtttcattcttctctagtgcaaaagcttgctttggaaaaggagatggagggtcatgttggttgcgtgaatgctatcgcgtggaactcaagtggttcgcttcttgtatcaggatcagatgacactagaattaacctctggaattataataatcgagagctggtgcatgatattgacactggccattctgcaaatatcttttgcaccaagtttgtccctgaaacatgtgatgaagtagtagtttctggagcaggagatgcagaggttcgtgttttcaatatgtctcgattaagtggcagaaggcctagagaaatttctatggaaccaacaatggtttaccagtgtcactcaaaaagggtcaagaaactagctgttgaacttggcaatcctaacgtagtgtggagtgcaagcgaggatggtactctgagacaacatgattttcgggagtgtagttcctgtcctcgtgcaggatccgctaatcaggaatgtcacaatgtgcttcttgatctacggtgcggagcaaagaagtctttagccgatttacccaaacatccattggcactgaagtcttgtgacattagctctgtttgtccccatcaaatcattgtcggtgggagtgatgcatttgctaggctgtatgataggagaatgcttccaccattgagctcgtgccaaaccaaaacgaagccgccaccgtgcgttaaaatgttctgcccattgcatcttgctaacagtaagaagacatatttgcaccttacacatgttgcattcagcccaaatgggaaggaggttcttttaagttacagtggtgaacatgtttatctgtttgatgttgacccagataatctgagttcagttagatacacagcagactatgtacgggaacaattatttgtacccccttttcacaaagtaccagcaaaagaacatgcaaaagaaaagaagacttcagtaaatacagctccaagaaatttgtctagggtagatatgtgcaagaaatttatgcaagttgcaacaagatctctggagataggcaagaacttaatgcacgggattgaagcatgcagtgaagttcttgaatcaacggaaccagatattgatgatgacatgaggcatgggtttttgtgtactcgagcagcattgtacctaaagaggaagtggaaaaatgatgtttacatggcgattcgggattgtaatagagcgcggaagattgatgccacatcatatcaagcgcacctacatatggctgaggcactattgcagttaggaagactgaaggaggcatctgagtatgcagaggcagcaaataggcttcttccccctcattgtcaattgagccagcaggtggatgatttcaagcaacgcgttgcttcaggtgag

SEQ ID NO: 18190 - DNA, 3143 bp, Zea Mays
gctcacttctcatgacttcactccgcactaatgttgagctcgagggtgaagcaggggagccttcttaccgtcgtttagttctccgtctggtttctcatgtcatcaggctatacagctcttcacttgttactgaaagtgaggttttccttaatatgcttgtaaaagttacccgtcaggacttaccattatggcatcagatacttgtccttgaaattttaaggggtttttgtgttgaagcctgcactctgcgcttgctgtttcagacatttgacttgaatcctgtgaataccaatgtcgtggagaacatagttagagcacttgctttggttgtagcttcaattcaggcttcagattcaagcgaagaaactctagccgctgttggtgggatgttcagtagtaaagctaaagggatcgagtggagtatggaccatgatgcatcaaatgctgctgttttggttgctagtgaagcacatactatcactctggcccttgaaggtctcttaggcgtagttttcactattgccactttgactgatgaagctctagatgttggtgagcttgaatcacctaaatgtgaatcaaatagtatggaatgtagtggacagttggcccttctttgtatggctttggtcaattcaacatggttaaccatccttgactctttgtcatttattttgacgaggtcacagggggaagctataatattagagatattgaaaggataccaagcattcactcaggcttgtggagttctccgtgccatagagcccttaaactctttcctagcatcactttgcaagtttacaatcaataatccaaatgaaggagagaagaaaagcatcttgcagtctcctggatcaaagaggtcagaaacttcaatggatcagcgtgatagtattattctcacactaaaaaatgttcaggcactaagaacactttttaatgttgcacatcgattacacaatgtccttggtccttcttgggttctggtattggagacactttcagcacttgatagagctattcattctccacatgcttcaactcaggaagtatcagcttctgtttcaaaactttcaagagatacatcgggacagtacagtgatttccatattctctcttctttaaattctcagttgtttgaaagttcagccttgatgaacatagctgcggtgaagtcacttctgtctgcattgcaccaattgtcaagtcagcacatatctggaagctctcaattgtctgtccagcagattgggagcatttcattttcagtggagcgcatgacaacgattcttgccaataatctgcatcgagttgaaccgatatgggatcaaattgctgctcatcatcttgagcttgcaaattgctctaacccacaattatgtaatatggcactgaactcattggatcaatcaatttgtttggtagcgggttctgaaaaatttcagggcatcagcgcagcacctcatcagtttccagaaagccatttggtcaaagaaagtgaaactgtatcatttgagtatgcagttttatctccattgatgatcctctattcctccaacaagaacgttgatgtacaaatgggtgcattaaagattcttttgcatgttcttgagagacatggagaaaagttatcatatagctggcccagcattcttcatatgttaaggatggttactgatgcatcagaaaaagacctcatctccttaggctttcagagcattcgtgtaataatgaatgaaggactggcaacaatccctgtacaatgccttgatgaatgcattttggtaactggagcatatggtactcagaaaactgatataaacataagtttaacatcagttggacttttgtggactgctactgattttattgtgaagggattagtcagcaagcctattgagcaagctagtcacatgaatgatgatgttcaatcatgtgaaatgactgaagaggcaaacagcaagcaagttcctccaaaactagttgattatagtatacttttcttttcagttttctctgtcctccagaaattgggttcagatgatcgtcctgaggttcgaaattcagctgttaggactctcttccagactctcagcatccatggccaaaagctttctaaaagtatgtgggaggattgtctttggttatatgttttccctatgttagagcatgtttcccacttggcatctacctcatctcgagatgagtggcaagggaaggaacttggaactcgggctggcaaagctgttcatatgcttatccatcacagtcgaaatacagcacaaaagcaatgggatgaaaccattgttcttgtacttggtggtattgcacggcttttgcgttcttttttctcttacctccaacaactgagaaaattttcttctggttgggtgcttttactcagttttataaaaaatagcatcttaaacggtagcaaggaggttgctattgctgccatcaattgcttgcagacgtttgtcggcgcaaactgtccaaagggcaatttggaatcctcgtatgttaaatctgttcttgatatttatgaacttgttcttcaaacttcatctaattttaagaatgactccactgataaagtgaagcaagaggttctccgtggtcttggtgatctttatgtccaagcacaatctctgtttactggtgacatgtatctaaggcttatggcaattatgcatctgatgatcaagactaccttgaatcctactgattatgatagtgaactgggtagtattcctgctgtacaacgaggtatattggaaatcattcctatgctacgcccaacagttgtattgtctcccatgtggacacatctgcttcttgagctgctatgctatcttaatgggcacgaaggccccctccagaaaaataatgaacaaacgcccgatcataattctcaagcactggtagacggtgcaaagcatgctcttgttgaaagaagcaatctcaatggcgggggtacaaaactggatatggtgggatctggttggggcattctatttgtagaaaaacttgtaccaatcattgccaaccttttcttggaggctccaccaaatgaaaggtttagtgtctctcctgaagtcattcaaggtcttggaaggtatttgctttttatgatttatatc

SEQ ID NO: 18191 - DNA, 3317 bp, Zea Mays
atggagctcgtcggggaccacctccatgggagcacactggatttggcctggcctccaatgacccacaatgatgacacgaccgaaacacagcttgcaccatacaggagaaatatgcaagaccttttgtgcgacgctggtatgataccatatccagagcccttccagagtatgtaccagaaacgccggttgggtacccttggtctcgagtggcggcctccctctgtaaattttgctgttggccccacttacaatgcaacaactggtgaataccaaactatcccaattattgatccggatagtgaaggagaacaggatattatgagtggtgattcttcaggtacttcatattcgagtggagaaattgatgcagataaccctgatagtgctcatctccgccgatcaagaagaaagaagaaaaaatctgaggctgatcttgttacttcatctggtcggcgagtcattaggaaaagatttttggatgatcctggtgtagccacagtgtcaaggccacatagaggaaggaaatctaggaatggatgttctagtaaaaagaaaagatcccctaaatccaggggtttgcgacctcggagacgtgctgctgaaaccgcattaattactttcccaaagaaaggagtttcaacagaagaggatgaagatgactccgagagtttctcagatagtgaattgaacacggatagcactgaagctgaacagttagaatggagtggtcagttaagaactagaagagagattaactccccatttgacatcgatgatgttacagatccttctcagtttactgataataaggaaaattctggaactggtaagaaactagttctcagaataccacgacgtgatttaagaactcaatttcctttaggaagcggaaaagcagaatgctccatacaggataaagcagtgaagtctctttctctagctaatcatgaaccagttgagcacgaactgactattgaaccaggacattcccctgcctccaaggctgaattaacaattgatggtgatctgcatgatagttctgctgtttgcagtaataactcaattaggtggggtgaggttaagatgcgatcctcaaagcgttgcaagtacagtgagccagctggaggtttgtggtcctcttcaaataacgttgctttgcaggatatcgagggatcgagcagtcagcagatacctcatgaatatggcgatggcatccagccaagtgttgtgcaaaacgtacaagaagtgcaacatggaacaattctagataacattccggaaaacaacagtactgatgaacacactagagaaaattttggggatttagaaaagatagctaacaatattaatgctcatgcagacggagtgaatgacactgtacaagttcccaatacttctcagcctcaactaaaagttaagtttaagtcaagaggctctgcagatgcagtaggaaatatcatgaactccaagcatgtcaaagattcagtgcagtgtggcgatgattcttccatcaatcaaccaagaaatgctgacttctatattgtgcccaaaagttctcaggaatgcctagataaaagcactagtttgcatgattcaaaaaaaccgtacttggatgcttcaaagaagtacactgcagtgtacaaaaggtcaaagcgaaagaacaagaaaaaaatggattcagatgaatgtccgaacgaggatagcacttctatctccaatgacgatggtggataccaacctgcagaatacagtcctgttgcagctgcaagcagtagattgagaagaagtgctaggaagtcatttgcatacaatatcaatggtacaacacaggatgatatctcggaagtgaaagtttcttacggttcccatgaagcatcaactagtggaagacgagttgtcacagatgtgcgtgaagggatgtggcgacaaaactcaagaagtgttggtttaaggtctgctaggaacaaaagagaaagtaacagcttccttgatacacatccattgggtagaaggcaccaggtttcttttaagtattcatggttaatgttgcttgagcatgaagatagctaccgttatattcctcaactcgatgatgaggttatgtacttggggcagggccatgaggaatatcttaaacaagtgcaatcatctgaattttgcccttggaaccggataaaaggacttaaagctgtagaactttgcaaaatacagggtcttgattatgccacctacagaggatctggtgaaagctgctattttcttgtggagagaacaaggtacgaagctgctatggagcggaactggacccacagagacaagtgcaaagtctggtggagggacgaagaaggacaggtaggaggaacttggtgggagggacgggtgatggcagtaacacctaaatcacctgattttcctgagagtccatgggaaaaatatgtcatacagtataaggaggatggttctgatcacgctcatagcccctgggaacttcatgagacaggcagtttatgggatccatggaaacatccacatatggatctcacggttcgagataaattgttatcagaaatggaaaatttacaggaaatgtcacacagggatcaggatcattatggtgtttttaaactggacaaggttgcagaaaagtcagatttcatcaacaggtttcctgttcaattttctattgaggtgatcaaggcaagattagcgaacaaatattacagaactctgggggctgtcagacatgataccactgtgatgctttcaaatgcagaatcttacttttcaaagagcagtgaaatgaccaaaaagatccgcaagctctctgagttgctcgaccagatcttttcatcactgtagggaacattgcttgatgcctgattgacaatttcccttttcgtttctgcaaaaaaaatttggccttaggcatcgagatgatttttactggtcctactgaggcattagagaattagccaaagtagttctcaggacagaaagggtttccggtgtagctccaaccagttaaactagttgctgatacaaagtgctcgttgctaacacatttgaccgtttgatctgttgtcaagatacaatggttcatcctattggacatgaaatattggggttttgttagagaagatgccaaggtgtaaatctggtggaggaaatgcattaactgataatttcattttgtacagacaccctcagcaataaaaggaaaaaaagaaatgtgcaacgttgtctattacattttggggtgacacatggtaactataatataggaaattagtggcacttttttcagcgtgcccaggcac

SEQ ID NO: 18192 - DNA, 2636 bp, Zea Mays
atgcacgttatccatggcgcctcgaggagaccccggcgaatgctggcccttggatccaaccgagctagcatgcatgcgcattcgctgccttccaaacggaggaaggggaaattaacaacgcgattacgcgaagccttcaaaaagccagccccctcctctcccttccaggcaacccaaccacaggccacagcgcagcggtgtgtgtgggtgtgtgtctgcgccagagaccaaacaccaacctccccccaccctcgacccatccccacctcgccgccgccgccgccgccgcacggtctccttccccgaggagctggtgttggtgcccgcgctgcaggtggggcgcagcccattgaagacattgctaataaggtattgaagatggatggtgggagtgctgagaagattgctggaggtgaagatgaagggactacatctccagtcccagagaaggttcaagtaggccattctccacagtacaaggttgaacgcaagttggggaaaggtggttttgggcaagtatatgttggcagaaggatttctgggggaacagagcgcactggacctgatgcttacgaggttgctttgaaatttgagcaccgaaacagcaagggctgcaattatggccctccatatgagtggcaagtttatagtgctctgaacgggtgttatggtgtaccatgggttcattacaaaggtcgacaaggagattattatgttctggtgatggatattctagggcccagcctttgggatgtctggaattcatttgggcagttgatgacacctaatatggttgcttgcattgctgtagaggcaatttctatacttgagaaacttcatgcaaaagggtttgttcatggagacgttaaacccgagaattttctacttggccagcctggatcccctgacgagaaaaaactttttctgattgatcttgggttagcatctagatggaaggaatcagggtcatctggacaacatgttgaatatgatcagaaaccagatattttcagaggtacaataagatacgctagtgtccatgcacatttaggacgtactggtagcagaagggatgatctggaatcattagcatatacattgatatttcttcttagaggaaggttgccgtggcaaggttatcagggcgagaacaagagttttcttgtttgcaagaagaaaatggctacctctccagatctattatgctgtttttgcccaactccattcaaacttttcctggagactgtgacaaacatgaaatttgatgaagaaccaaattactcaaagcttatttcccttttcgatgaattgattgagccccagcatttgaggcctattagaattgatggtgcattgaaggctggacaaaaacgtggaagattacatgtaaatccagaagaagatgagcaaccgaagaagaaagttcgacttggaagcccagcaaatcagtggatttcagtttataatgctagaaggcccatgaagcagagataccattacaatgtagcagatgccaggcttcatcaacacatagagaagggtaatgaagatggattgttcattagttcagtagcatcttcagccaatctttgggctctcattatggatgcagggactggtttcacatcccaagtatatgaactgtcacccatattccttcataaggattggattatggagcagtgggaaaataactactacatcagtgccatagctggtgcaatgaatgggagttccttggtggtcatgtcaaaaggaactccttacactcagcagtcttacaaagttagtgaatcattcccctacaagtggatcaacaagaaatggaaagaaggttttcatgttacatcaatgacaactgcaggaagccgctggggtgtagttatgtcaaggaactctggatactctgaacaggtagtggagttggattttctttatcctagtgaaggtattcaccgacgatgggagaacggatatagaataacttctacagcagctactggcgatcaagctgctttcatattgagtatacctaaaagaaagttaatggatgagacacaagaaactcttagaacatctgcttttccaagcaaccatgtgaaggagaaatgggccaagaacctttacattgcttcaatatgctatggccggacagtgtcatgaggcttgctcggctgcatccctagttgggaagagcatgttctgatgagtaacccgttcaagatgaagcaccttacagtggccagagtaggagctcaagaaagaaccgagaggaaggtggaaagcaatcggccaataagcagacgaggagtatgtgatctggctagtagcgggtacaggcgctaatggcgtcaaatgttttgtatcagcatgttttgcttttgcttcgctcctgaccgctgtgcaaagagtagacagcttgtttctttcggaggcaagtcatctgagaaccatcgtgtatagcgtatgatgtcattgtattttctttagtggaggccaagttccatctttccggaactcccaaaatgctaagttattatgcgaggaaacaagtgtactgataaaatcggtgtatcaattccattattcgacaattctcacctgcattaattaatgcaatgctgcattacttatca

SEQ ID NO: 18193 - DNA, 3653 bp, Zea Mays
aaaaagagaacgcgcgcgtgtgtgtatacagtatacacacacacgcttagtagctccgtggaaaaaaaagcatcgcattattgtctaacactaggatgaaaacaacaacacttgtcgatttagcgtgtggtcccgtctgtttgtttccttctgatgctgattgagatttcagagagagagagcagagaacggctacgggacagcagtggataatggtacaatgatgcagctcatcgtgcggtgggggggagagaaaaatcatcatcagcgctggcactttggctgcgcaactgaaaaagctgttttgctgaaccccatgtcagctgcagtctgggggaatctgagcctgctgctcacctgagagagcctgtgggtggggaggcaaagcgctgcagaggctgcagcagagaggagcgagcgagggagggagacgacgagccctgtcgagctgttccgattttgcccccccgaatacgtcgctgcccctgctttggagggatctgaagctgctgctgcctgccaaagcccggagcctttttcttcagcggtaggctctgatcatgatggtggtggtgatggcggctgtccagcggaaaggcttcttctcgtgctagtggaggaggcgtgaaatttcatccataaaggctgtcgcggtgggtggagatcttgcccaattccgctgaaatcgcctccggctacgggttgggtcgggtcgggtagcgtggccgtgggcggtgggagatgattactttcgtggactcggcggccatggagcgggagcgggagagtgacaggtgcctggacccgcagctgtggcacgcctgcgccggcgggatggtccagatgccggcggtgcactccaaggtgtactacttcccgcagggccacgcggagcacgcgcagggccccgtggacctccccgccggccgggtccccgcgctcgtcctctgccgcgtcgccgccgtccgcttcatggccgatccggacaccgacgaggtcttcgccaagatccgcctggccccggtccgtcccaacgagccgggctacgccgacgacgccattggcgccgcggcggcgtcgggcgcgcaggaggacaagcccgcgtccttcgccaagacgctcacgcagtccgacgccaacaacggcgggggcttctccgtgccgcgctactgcgccgagaccatcttcccgcggctcgactactcggccgacccccccgtgcagaccgtgctcgccaaggacgtgcacggcgtggtctggaagttccgccacatctaccgcggcacgccccggcgccacctgctcaccaccggctggagcaccttcgtgaaccagaagaagctcgtcgcgggggactccatcgtgttcatgcggacggagaacggggacctctgcgtcggcatccggcgcgccaagaagggcggcatcggagggccggagttcatgcaccaccaccaccagcagccgcccccgccgcagggcggcgggtacgccgggttctccatgttcctgcgaggggaagaggacggcggcaagatgatggccgcggccgccacgagggggaaggccgccagggtgcgggtgcggccagaggaggtcgtcgaggccgctaacctggccgtgagcgggcagccgttcgaggtggtgtactacccgagggcgagcacgccagagttctgcgtcaaggcgggggcggtgcgcgccgccatgcgcacccagtggtgccccgggatgaggttcaagatggccttcgagacggaggactcgtcccggatcagctggttcatgggcactgtctccgccgtgcacgtcgctgaccccatccgatggcccaattcaccctggaggcttctccaggtcgcctgggatgagccggacctgttacagaacgtgaagagggtgagcccatggctggttgagctggtgtcgaacatgccggtcatccatcacctcacagccacgcccttctcgccgcccaggaagaagctgtgcgtcccactgtacccggagcttccgctggagggccagttcccggcgccgatgttccacggaagccccctcctcggccgtggcggcgccggtggcccgatgtgctacttcccggacggcactcctgcaggcatacagggagccaggcatgctcaattcggcatatccttatcagatctccacctgaacaagctgcagccgggcctgtcaccgcacgggctccaccgccagctcgaccacggcgtgcaggtgcaggtgcagcagccgaggatcgccgccgggctcatcgtcggcggccacccggcggcccgagacgacgtctcgtgtctgctcaccatcggcaccccaaagagcaagaagccaccgtcagacgtcaagaaggcgtccacggcggcggcaccgcagctgatgctcttcgggaaagcgatcctcaccgagcagcagatatcgctaggcggcggcaatgtcgtgccggcgctggcgaagaagagcccctccgacgacgacgacgacgtggccgagaggacggtgagcaactcggacgtgtcgagccctgggaggagcaaccaggacggcacgtccagtggcggaggcccggcggcgcgggcgtgctggcaggaggaggagtgcaacaacagggcggcaggttctgaggacgacctcctcgggcactgcaaggtgttcatgcagtcggaggacgtcgggcgcacgctggacctctccgccgtcgcgtcgtacgaggagctctaccagaggctcgccgacatgttcggcgtcgacaaggccgagctgaccagccacgtgttctaccgcgacgacgcttccggagcgctcaagcaccctggcgacgagcctttcagtgagttcaccaagaccgcccggaggctgaccatactgacggacgagagcagcgacagcttagcgaggtagagtccagtctcaaggagacggcggttcggcagtttcggttgggagtgggaggcgccccggaacgggagcgcgtgcgtgcgtctgatccaggaccaaagatttgtcggactagtagctctacagtagtggagtacgtacgtacaccttgatgctgctgcttctgctgtcagttcaagtggccataaccataatgcagctgcctttggtcacagtgactgatcggatgtgttgtgtacatcggaccgttgatttgcgaacgcgattactgaaagattattattatttttttgtatttttgatataactaaggtgctttggttaaaaaaaagaagaataggagatgccaattgtgtggtatagcagatggacataacagcagaacgtgtctatctgtggaagagaacagggcaagactagcaaaactggctcatcgaaagagaggacgaccagccggatcaagactaaacaataaaacaactgctccacagtggaacgaaacatcgactgctaaaaaacaccgtattgatgaagaagaggaaaatgaagaagccgatgagcatatggaattgggtgaataatttgaagtgtgactaaagagtggtcgatgtagtagaaacttgtaatagcataatgacctatgttttagtttttttggaaattaatagtttgcatgactgggttatataatgcgttgatataaaactataaaatgttgcgtaaaactagaccattac

SEQ ID NO: 18194 - DNA, 3080 bp, Zea Mays
tcaacacaagcgcccccctcgtcgcagtcccgccgttacatggcccgctctgttcccctttccggcgcccgcgacggactgcgacgagcggatagatagatctgtgccccgtccctgtctcgccatcctcctttctcctcctccactccctatcgactatcgagcagagcgaatccttagcggggaagtctttccgagctcagggagtggggtttaaaacgcggctcgacgaaaggaaggccgcactcgctgctgctgctggtcgcttgctttcggtggcgagcgtctcggtaaagcggcgtcggcgtcggaggcggcggcagagactggacttgcttgctccttgctgcgcagtgtagtgctgtgctaccttggagacaggatcctgccgcagggactcataattgatcagtgtgccccaacataagagcgaaacgtgactgagtttgccagctcccccttcatccactgtggtcgctcgtctgctaatgcccgcatcggaggattgctcacggatatgcttctggtgatgggcaacccggggcgctcgcggcagttgtcagcgctggttgcttccgccgccatcttgctgtcactgtccgcgttgccaatttgtcggccctacacctacgagcaagatgtgtttgcgataaacggcttgtacacggcacttggagcaccacagctgcctaattggacttcaaatggtggtgacccctgcaatgaaggctggcaaggtgtttcatgtgtagcgtcaaatataacctccataattctcagcggtgcaaatttaggtggacagctgggcaacactttggggaattttacatcattaatcaccttggatctcagcaacaacaatattggagggaccataccagatggtctaccactcacaatgcagagatttttcctttcagctaaccaactaagtggtagccttccaagtacattgtcatcccttacacttttgacaagcatgtcactcaatagcaatcatttgactggagcgataccagatgtattttcagcactcactggacttgcaaatttagatttttctgataacaatttgaccggtccgttgccaccttcaatgggaaatttgacatcattgactagcctacatattcagaacaatcaaatatctggaactcttaatgtgttgcaagatctccctttccaagatttgaacgttgaaaacaaccttttctctggtcccgtgcctgtgaaattactgaacttgccaaacttcaagaaggatgggaacccattcaatacaagcatagctccatctgcgcagcctcccatcgcgccaacaccattaccgtctatcccaccttcgtcagggcatgtcccctcaaaagaacctgcacattcttctagtgttccagaaaaaaggtcgagagatgatatttatatgaaaaacaagataggaagggtacctcagaagcttggagagcctaaaatcaaggagccaccattaaaactcaagaatgatgctgagaaagctccgaatgttgtttctgatggaagagaggagcataagttaaaagtgccaacatcagaaacttcaaatgtggtttatgatccaagtccaagggatggggcagaacttagattcatcaccgacagctgtacctttggctgttacaatgaataaaaaagagcatgtgattgatatggaaaaggctgataattttgttgaggaccaactgcatcctccgcagccgatggcactgcggactgaaaaagtcactgtcaatcccagtgtacgtacaagaaggggaagagtaccttcagttgaaaaggtggaatcgacgactactgtcaagtccttttccattgcatcccttcaacaatataccaatagtttcagtgaggaaaatatcataagagacagcaggtttggtaaggtgtatctggcaaagcttcctgatggagagctactggaaattttgaagattgactcttctaactcaaaagtgccagtagatgcctttcttgagctagttgtgaggatttctgaactgaggcatcctaacatacttggtcttgttggatactgtgcggagtttgagcagcgattacttgtctatgagtactgtagcaagatgaccctacatgatgaacttcgtcatgtggatgactcaagcaagccattatcgtggaatgctcgcctccaagttgcttcagaggcagcaaaagcattgcaacatcttcatgacggttgccaaccaccagttgtacaccagaattttgaaccctctgttgttctgctcaacagcaccttagttgtgcatatttctgaatgtggccttgcatcactagcatcaaaatcagtttctcagttgtctggacacaccttattccattatgaagcacctgaagtgcatgaatctggatcagtaagcgatcgaagtgatgtttacagcttcggtgtagttatgttggagcttctaacaggacgtaaaccttatgacagttcgtatccacgagctgaacaacatctagtacgatgggccacttctcaactctatgatattgatgccataacgaagatggttgatccttccattcgaggacaatgttctgataaggcattatcccgttttgctgacattattagccgctgcattcagcatgaaccagaattcaggccaccaatgtctgaagttgtccaagacttaactcgcatgatgcctttgacgaccattgatgcggtagtaggatattttggccaatgcaaaatgggtggaacacagtggcaggatgcagagactgcaccacgttttgtccactgccagtaatgctcctctgaatctctggtcaatttatagttcaaagctattgttgtaattctgtagtctgcactctgcacaatatatttcttagtgcccagttccagatcacgtggtgtgattatgcgtggttatctagaccatatgtaaataccaagaagttaaacaaatgtattatagcgtgcttgtttgaggaatgagaaagtacatcttcttactcctcactttattatttgatttgttaaatgaaatgagttggtccatcatatttcattcttt

SEQ ID NO: 18195 - DNA, 3382 bp, Zea Mays
cgctcgccctttctctgtccacacttctctcattctctgagttctctctcctctccccaccttctctctcctctccccacgaaccgcgccaccttttctgacgccgcatcatcggcgacttcatcgccgtcgacaagacgcatcaaggcagtgcctgctactcccgcctccgcattcttgccccacggagcgtgctcctgctctcggccgccgtcctggtgctgaacagctgacacagccggagagatccgcccggcctcggatccgtttcttctcctgctggtgccttggtggtcaacatcatgatggctactttggggaggaagaagcggcaagccgcaacaaccttcatcgtgctttgcatcttgtcatccttctacatctgcaaagcgcagttcacgcctgcggacagctaccttgttgactgtgggtcctccaagagcacaatggttggccagaggaccttcacagcggatggcgcatctccggtgaaggtgtccacctcccaggatatacttgcgggcacctcagcaaacggggtggcctcttttgataactcggcgctgtaccagactgcccggatcttcaccgggccatcatcctacactttccctatccagaagcagggccggcatttcgtccggttttacttcttccccttcacctaccagagctatgatctttcacttgccaaatttactgtgtccacccaagatgttctcctgcttagtgacttccagcaaccagacaagaccgcacccttgttcaaggaatactcactgaatatcacccgcgacacgctcgtgatttccttcaagccgtcaaatggaattgcatttgtcaacgcaattgaggtggtctctgtcccagatgatctcatcaccgatgatgcacaaatggtcaaccctgtccagcagtacagtggtttgtctacacagccactggagacagtatatcgggttaacatgggtggtccgaaggtcactcctgacaatgataccctctcgaggacctgggtgactgatctaaagtacttgttgaacccatctgtgaccaaacaggttaattatggcaagcgtgtcaactataagaagggtggaggtggagctactcagctgtcagcccctgatattgtctatggcacagctacagagttggcagcgacaaatacatccaatgctcttttcaacatgacatggcagtttgatgtggatgctggcttcagctatttggtaaggtttcacttctgtgatattgtcagcaaggcacttaaccagctctacttcaatgcatatgttggaggcttttatgcacagaataatcttgatctgtcagcaatgtctgatagtcagttagctacacctatatatatagatgtggttctttcatctaatgatgcatccagcaaacttagcatcagcattggcccatcggtcttgaacaatgtattgcccgacgggattctgaatgggcttgaggttatgaagataagtaccggaggttctgctttcactgtcgggtctggcagtggaaacaaaaaatggggtgtgattcttggcgcagccctcggaggtgttggactgtttataattgttgttgttcttgtacttctttgccggaggaaaaagaccctggaaaagcagcattcaaagacctggatgcctttctctatcaatgggctcacctctctcagcacaggaagcagaacgtcttatggtactactctcacatcagggctgaatggaagctatggataccgttttgccttcagtgtgctccaagaagcaacaaacaatttcgacgagaactgggtcattggagttggaggctttggaaaggtctacaagggggtgatgagggatgagagcaaggttgcagtgaagcgtggaaacccaaagtctcagcaaggtctcaacgagttccgtacagagattgagctcctctcacgtctgcgccaccgccatttggtgtctctgattgggtactgtgatgaaaggaacgaaatgatcctggtctacgagtacatggagaaaggcactctcaagagccatctctatggctccgataacccctcgctcaattggaagcagaggctggaggtttgcatcggagcagcaagggggttgcactaccttcacactggatctgcgaaggccatcatccatcgtgatgtcaagtccgcaaacatcttgctcgacgagaacctcctcgccaaggtcgctgactttgggctatccaagactgggcctgagctcgaccaaactcatgtcagcactgcagtgaagggcagcttcgggtacctcgatcctgaatatttccggaggcagcagctgaccgagaagtcggatgtctactctttcggtgttgttttgcttgaggttctttgtgcaaggccagtgatcgaccccacgctgccgagggagatggtgaacctggccgagtgggggatgaagtggcagaagagaggagagctgcaccagatcatcgatcagaggatctcgggcacaatcaggccggactctctgaggaagtttggcgagaccgtggagaagtgcctggcagactacggcgtggagcggccgtcgatgggagacgtcctctggaacctggagtacgttctgcagcttcaggacgccgattcgacggtctcggatgtgaacagcatgaaccgtatcgtggaactcccgtcacaggtccagaacgtcggggccctcgagagcatcagcgtgacgatggcagaagccggagcgtcaaacgagcctgaccacgacctctccgatgtgtccatgagccgcgtcttctctcagctgatcaaggccgaggggaggtaaatgtgcgtgacgcagcctgtagggtgtgggtggtggggaggaagccttcaaagtcatctcttgctgaagtttacgtgagagagatcatgtgtgattttttttcttcttttcgtctacaaatgtactactgaagtgaactatggtttcgagttacagttttagccattgtgagcctgtgcggctacaaatttcgtagatagcacatttcgagtttgaatttgttactgggcgttgaataatattcccctaaccgtagaagcctctcactatcctcgaaacaggaggagcacacactcacaatcgtagttgctactgttgtatccacagggaacaactactatgcaaacagccattagcattataagatccgcccttccctttctcgtctcattcatttgtctagaccgacatcacatgtgcagcgatgagaaatttacaattttggctttatggttattatattatctcgtgtgtatgactgatgatgaggcggctgcatgctggtgatgcctcctagctggatctggacgcttcgtcgggttatctgggga

SEQ ID NO: 18196 - DNA, 870 bp, Zea Mays
atcctagcaacatcctcttcaagcagacaaagatcatgatgggaggctgactttggaagagatggttgagaacccctatgcattttatggcagtgtttatctcagcagcagcgacaacgacgacgaagactacttccacgacgaatttcgctgagaccaatattgttactatcctgacacacgcaaggaacacagctgacgagcatcaaggtgcgcacagaggttcggaacgtctagcatactatgtgtgatgcccgggctgggctgctgacagaatgggagagcttagagttacggccatggagtgaggaactagtttttagccgcttggttcttcaagttgtttgtgttaaatggaacgacgacagcatcctagtaccggccaggcccagcagtgatggatgttacgcggcaagttgagccacctttatctaggctgagctgcattggtctccatcctgatgttcctgcagcaggggaaatgtagttcaggagaacaatgagtggaggagcgtcatctctgtggcgagcggcttcagaaatctaacgggaacgtgttgtttggtgtccgaaatgtatgtgtgtgtgtgtatgctatgaattcaattatttctggcagaatgtcgcagtctagcgagctggcccatcccattgagaaacattccatcggctgcatgagtgcgccatggacgggagatggatgtgccgaattattggagggaaagggttcactttattcgtgcctagtcatcagtgtcatcagtacggaggttacagcgtatccacgtggtctgccacgtcatgtgaatcccagccgtggcgcaggtacattctcgctgggtcttgaactggtaataaaagatatttggc

SEQ ID NO: 18197 - DNA, 1532 bp, Zea Mays
tggactttcagtagttctatttgatgcttatagtatactgaaggggatccacaagagaggaagcattgggctctcttaccgatgcttttgaaagttttgtgcttcttggtttagtggaaaacaaatatgtcacactattgagccagttcatcaattcaattaaaaggggatctgtaaaagaggtgtgtctggcttgtcgctgcattggcacttgattgcttagcagttgtcacatttgttggtgcaactgatcttgctgaaactcagctgtctctgaaagccatctgggatgtgatccatccaaaatcaggatcaaatgtcggcgtagtcagaaaaccgaagcctcctttgttagcagctgccgtatctgcatgggcatttcttttaacaactattggttcatctagaagaaatactgattcttggaaagagtaggccaattacatttctctgtagccttctagaagcagaggaccgtgctgtgcggattgctgctggtgaagcattagctctgtgttttgagctaagaatgtttgatgtttcctctagtgacgaagctgatgttgacagttacactggagaggctggtggttctaagcatcaacttttcttgaatatgcaagcattgaaggccaaactatctggtctagtctatagtctatctatggaggcggggggcaggggtgctgacaagaaaaatcttaatgatcagagagacctgttccaacgaatctcagattttattaagagtggtgagtgccctgaagaatcacttaggatttcaggcaagaatggcattttaagagttacatcatggcgtgaatcaatacagttgaactatatgaggcggtttcttgggcggggattcctgaagcattcacaggacaacgatttgctgcatgaggtctttgacatcaaaattgatcgtactgaaaacatgtcagccaccgaaaagaaaatgttcagatctggagaagagaaaggaagagctctgaagttgaataaagagcgtcgtctagctcaggagaggaagcagcagaatatcttgaacgagcaatatggatagaacctacccggaagactggagttttgtacagtggaactgttaccagatggtgagtgctgtgtgtgtatgtgacggtattgatgcatttgaggtgtattgctccggtggcggtactacagcgacatgtttgaaattgctccgaaatactattgagttttgtagaaagtgccatgttccctgcactccctagtgtttcctctgcatgcgcaaaggagatcttgagttcagttaatcacaattgtacagttccatagggtagagatatgaggtgattgtgaataacacagaggtcgtctagcctaagggcaataattggcgaactcttcctctagccgcaataattggtctgcaagagatttcgaaatgcgttcgctctctttcgtcctgaactttttatcttgtccattctccctccgtttctttggaaacaacaatattgattaaattagatgaactgtgcatggat

SEQ ID NO: 18198 - DNA, 2808 bp, Zea Mays
catctggcttgttgctcaaaagcatgctggacagctgatagattagcaaaaataggttgttaggacatttagggagaaagacattccttgtgatgttgtctggatggatattgactatatggatggttttaggtgcttcacgtttgatagtatccgattccctgatccaatatcaatggtagatgatctccattccattggttgcaaagcaatctggatgcttgacccagggatcaagaaggaggagggttactttgtttatgatagtggctcaaaaagcgatgtttggattcaaaaggcagatggcagtccattcgttggagaatatgcctcacatagtctacattcaggggaggtgtggcctggtgattgtgttttccctgactatacatctgaaaaaacacgagcttggtgggctagtttggtaaaggacttcatctctattggtgttgatggaatatggaatgatatgaatgaacctgctgttttcaaaactaccacgaagacaatgcctgaaagcaatattcataggggagatgctgatattggtggtgttcaaaatcattcatactatcacaatgtctacggaatgctaatggcaagatctacttataaaggaatggaaatgggcaatgcagctaaacgaccatttgttcttacacgagctggttttattggaagtcagcgttatgctgcaacatggactggtgataatctttcaaattgggagcatctgcacatgagtctaccaatggttcttcagttgggtctcagtggtcaaccattgtcaggtcctgatattggtggttttgctggaaatgctactccaaaactttttggaagatggatgggtgtgggtgcattgtttccattttcacgtggccatacagaaactggaagcattgaccacgaaccatggtcctttggtaaagagtgtgaggaagtctgtcgccttgcgctactaagacggtaccggctactgccacatatctacactcttttttaccactcacatacaaagggtattccagttgctactccagttttctttgctgatacacaagaccctgaactgaggaaagttgagacttcctttctccttggaccactcttagtttgtgcaagcactttacctaataaaggagctcatgaatatgcacataagttaccgaagggcatatggttgtcttttgattttgcggattcacaccctgatctgccggtgctgtatctacaaggtggagcaattcttcctgtaggtcttcctattaagcatgttagtgaagcaagtttggaggatgacctgtcactaattatcgcattgaatgaaaatggtaaagctgaaggtgttctctttgaagatgcaggagatggatatgcattcacacagggagactatcttttgacatattatattgctgaactccactcatcagtggttactgtcaaaatcttaaaatctgaagggtcatggaagagaccaaaacgaaatctgaaaataaatatattgcttggtggaggtgctatgataagtacagatggtgttgatggtgaagtaatacaccttacaatgccttctgaatctgtagtgtcaagcttagttgcaaccagcgaatttgagcacaagaaacgaatggagatgattcagcctatacctgatatagaagagccatcggggcaggaaggtgctgagctatcaaaaatacctgttgatttgaaaagtggagactggttccttaagattgtaccatggattggaggccgtattatatcgatggcccatattccttctgattcccagtggcttcacagcagaattgagataaatggttatgaagaatacagtggggctgaatataggtctgctggttgcacagaagagtacaaagtcatcaggaggcaccttgaacaatctggagaggaggaatctatttgtatggaaggagacattggtggtggtctggttctccagcgccagatatccattttgaaggacaacccaaagattgttcagatcgactccagcattcaggcaagaagtgtaggagctggttctggtgggttttcaaggttggtctgtttacgagttcatcctacattcaccctgctgcacccaactgaggtagtagttgctttcacggccatcaatggttcaaagcaagagatctccccggaggcaggagaaataacattcgagggagacctcaaacccaacggagaatggatgctagtggacaagtgtgtcgggctgagcttggtgaaccggtttaatcccagggaggttagcaaatgctttgtgcactggggaactggtgatgtgaacatggagctctggtcagaggaaagaccggtgtctaatgagacgccgttgaggatttgccaccagtatgaggtgcagcaaacaacctaaacacctgcccgaagagcagaaataaaaataccaatttggaggatacttcagttgcttgcacttgttttacggtctctgtattgacggtcgcgcaccataacttccatggtattttggagtcgtgtcgttagtcattaccctcttggaggactttgggtctgctgaaaacatggttactcagcaatatctgctactgttcacgactgacattcaaagggttactcagcaatatatggataaaatttgtgttaaagataagttgtgtcgtgtgggttgagttatgtgtgttgtgttgtgctgtaccttcttctatctattaatggaaagatacgtagatctcctgcgtattcgagaaaaaaaactatatggataaaattttatgaaacatcgtaagtgtg

SEQ ID NO: 18199 - DNA, 909 bp, Zea Mays
tcaaggcaaaatgatagcttcacggtttaatatggaactgagcatgccggtgtgatctgtttacctgtaccgctgacctcagtactgatctagaagcaaagcgttccaaaacaaataagtccagtaataataaaggcagtctaagaacagaggttgaaactgactcaagaagtgctggcaaggctgttagtaaaaacattccagcagcagagccaccaaaacaagattatatccatgtcagggcaaggaggggtcaagcaactgatagtcatagtcttgcagagagggcacgtcgtgagaaaataagtgaacgaatgaaagttctccaagatcttgtgcctggatgcaacaaggttattggcaaagcatcagtacttgatgagataattaattacatccagtcgttgcaatgtcaagttgagttcctgtccatgaaactagaggcagtgaatgcccaggcaaaccagggagttgaagtatttccagccaaagatacatacaacacagctcctgggctgacatttgatacgcaaaccagtagagaatacgcccagggcacgtcgacctcggaatggcttcacatgcagattggcagtggctatgaaagggtttcatgaacgagatgaatccaggcagccgctaaataaagtgaaccatgatcaatcatggccgtgcttgtagatcattctttttcattttttttgaaaccatcatgttccagacgcattttttattcatgcttggagctgtaattccagccggaacatgtatttttgatgaggcgctcatttgtttccccatctgaatctcaagactgtttctgctgttcatgtattccatggaatttctgtagatcgcgttcgtctgtcagaaggatgaataaatcagttgatgctttgattttgaatc

SEQ ID NO: 18200 - DNA, 1353 bp, Zea Mays
tcattgaccaacctgatgatatagacgaaaagtgcccggtgttgtgccttgtcattgatgaagccgatcgcatacttgagcaaaactttgaggaagacatgaaacaaatatttaaacgccttccccagaataggcagactgttcttttttctgctacacaaactccagaggttgaaaaatttgctaaactgtcatttgagaaaaatgaagaaagtaaaaaaaaacctgtttatgttggagttgatgatgataagtcaaaggctactgttgaaggcctgcagcagggttattgtgtcatttctagcgataaaaggttcttggttctgtatgctttcctaagaaagaagcggaataagaagataatggtgttcttctcatcatgtaattcagtaaagttccacgctgaacttctgaatttccttgggatagagtgttctgatatccatggaaaacagaagcaacagaagcgaactactacattctttagcttttgcaaggcagaaaagggcatcttattgtgcactaatgtggctgcccgtggacttgatattcctgacgtggattatatcttgcaatatgaccctccagatgaaccaaaggattacattcacagagttggtcgtaccgcacgtggtgagaaaggcaaaggaagtgcattgctgttcttactaccagaagaactgaagtttctaatttacctgaaggcggccaaggttaccctgacggaatatgagttcaatcagaagaatgtgccaaatttgcaatcgcagcttgagaatattgttggtgagaattactttctgaaccagtctgccaaagaagcctacagatcctacgttttggcatatgactctcactctatgaaagacatttttaatgtccatcaacttgatctgcagaaagtagctgcgtcattcggtttcaagaatcccccgaaagtgaacctggacctggatagcagtgcggcgaagcatcggaagaagatgaggagagtagacggtgggaagaggcatggcatcagcgcttcgaacccgtacgggaggaaggacaaaggcggtgccggcgataaacgacagttggcgagattctagaaaggaaggaagagcaggagcgtttcactattgttgtgttcgtaccagggctttgattgatgttacctggcttgggaaaaatcttgacaggccactaagattggctataaattttgggttgtcttgatatatttggtgtgtaacgcaatcagcctgctcgatgcgaaaattggattattgctttatagtacttgtggtttccaacccgaggaaagttggtgctgtggtttctggttttgcgtctcaacacgaccatggcggg

SEQ ID NO: 18201 - DNA, 1835 bp, Zea Mays
tataagaaaggtccctctccgtttcttcaaactttagttctagagcccaccaaagaaaaaacaaataccggatagatattaaagcattttcctcgtcgacttaaaaaatagaacaaaaaggttcttccttttcgcagctccatcgtccaccaacctcctccgattcggccgtcgtagcgtatagccgaattgccccactccaggactctcgccagcttctccggccgactagaggctgtttccggcgagtgctcggctgatctcctccgcgcggctgaggagatcacgcggtctcgctcgggggggctggggcgtgcatgatgggactttggttgattccgacgatggagactccggcgaggcttctgtggagcaccagcttcttccgccacaaaatcgccgacatgcttgcatcctcctcctgcttcttatagatcccacccctcgacgtcgtcgccggcagctagctcgctagcttctgtacatacgtcgacgccatatctagctagtctcttcatccagtcccgataagtgataactaataattaggagcttgcttcgacgaccttgcattggtccatggagtccggacggctcatcttcaacgcgcccggctccggcgccgggcagatgctcttcctggactgcggcgcaggcggtggtcccggcggcggcttgttgcatcgaggtattagtcccatccaaatctattcctagggctcatcgatcgagcttggaactgttttgtgtactgctgattgcgtcgggggttgccatgtgggagtcatgaaggcgggagaccgatgcttggccttgaagaagggcgcggcgtaaaacggcccttctacacctcgcccgacgagctcctcgaggaggagtactacgacgagcagctgccggagaagaagcgccgcctgacgccggagcaggtgcacctgctggagaggagcttcgaggaggagaacaagctggagccggagcgcaagacggagctggcgcgcaagctgggcctgcagccccggcaggtggccgtgtggttccagaaccggcgcgcccggtggaagaccaagcagcagaggcggcggcgttcgaggagcggcaggtgaagtccgaggacaggctgagcacgggcagcggcgggagcgcggtggtggacgcggcggacgcgctgttgtacaacggcaggatcggcggcgcggccgtcgatagcagcgtcgagtcgtacttccccggcgccgaggtccaggaccagtaccacggctgcgggacgatgggtccagtaacccacggcgctggaggcatccagtcggacgacgacgacggcgccggcagcgacgagggatgcagctactacgccgacgaagaagccgccgccgcgttcctctccgaacacacccaccacgcggacggcgacgacgaggacgccggccaggtcagctggtggtggatgtggaactagcagagcaatcttcccgcggggaccgaccgccaaatctcgtgccaaaaaaaaattactgtatgcattttcgcatgtgtaatagctgtgagtgaaagtgaaaccgatagcgcgttctgtccgaattttttgtttttttagctccttttgcgataaaaatttacgtttagaccccagaaattttatttgcgagtttagacctgatgctcggcgtcataggctgtggcgccgaggtgtgacgtggcagtaacagctaccttcgcctagggctgacctgacaccgacgtggtggcgacgcggcctcgtagctcggcgccacagatcttggcgccgagctacggatgcctataaaaccggccgcgcggctggccgagagcag

SEQ ID NO: 18202 - DNA, 2529 bp, Zea Mays
ggtagatacctagatggagagattggaaggagctcggaaggctgggacgctgacccgaattttatggggagaggatgccagagctgcgaagcaatactcgtcaagcacgcttaaggtctaagaagcttgacgatctgcagccaggagagccgcttgcgaaaccggtgtcacctgctctgccgagcgcacggaagcgtgctcctacacgtgctgctaggggcagaaagggtgctgctgggagaggagtgcctcccgcaccaaagcctagaagaaagggggttgatattgtcgtcttagaagctgatcctgcttgtgaaaccccacttaaagctttcaagggactggaagttgctgctgctgcgcccaagaaccttcctttgaagcaggtagccgaagttggtgttccgaaaatgaatggtgaaagtggggagaagattgttggggctgaagatgaatcgacagctacacctgtcccagaaagggttcaagtaggtaattctccagagtacataactgacaggaagttaggtaaaggtggttttggtcaggtgtatgttggtcgaagggtttctggtggtgctgctcgcactggtcctgatgcatatgaggttgcattgaaattcgagcatcgtaacagtaaaggatgcaattatggccccccatatgagtggcaagtttataacactctcaatggttgctatggcataccatcggtccactacaagggtcgtcagggcgaatactatatacttgtaatggatatgcttggtcccagcctttgggatgtgtggaattcgatggggcaggcgatgactccaaatatggctgcttgcattgctgtagagagcatatcaattcttgagaagctccattctaaagggtttgtgcatggtgatgtgaaaccagagaattttctgcttggtcagcctggatcgcctgaagataagaagctttaccttatagatcttggtttagcatccaagtggagagagaataatggtcatcatgttgattatgatcaacggcctgatatctttaggggaacaattagatatgcgagtgtccatgctcatttggggcgcactggtagtaggagggatgatttagagtcactggcatacacccttattttcctgataagaggaagattaccttggcaaggctaccagggagataccaagagtttccttgtttgcaagaagaaaatggctacttctccggagatgctttgttgttattgtccagctccattcaaacagtttcttgagattgtcacaaatatgaaatttgacgaagagccaaattatgccaagcttatctctctttttgatggtttgattgaagcgcctgcttcgagacaaatcagaattgatggggctctcaaggttggacagaaacgtggaagattggttgcagatctagaagaagatgaacaacctaaaaagaaggttagattagggagcccagcggctcaatggatttcagtttataatgctaggcggcccatgaagcagaggtaccattacaatgtggctgactcgaggctaagccaacatatagaaaagggcaacgatgatgggctttacattagcagcgtggcttcctcggcaaacctttgggcactcatcatggacgcaggaactggtttctgttctcaggtttatgagctctcaccagttttcctccacaaggactggataatggagcagtgggagaaaagctactacataacagcaattgctggatcatccaacgggagctcattggttgtcatgtccaaaggaactccttacacccaacaatcatacaaggttagcgagtcgttcccttacaagtggatcaataagaagtggaaagaagggttccatgtgacatccatggccaccgctgggaatcgctggggcgtagtcatgtcaaggaattcagggttctctactcaggttgtagagttggatttcctgtaccccagcgagggcatccaccggcgctgggagagcggctacaggataacttccacggcagccaccaacgaccaagccgctttcatcctgagcatgccgaaacggaagccgatggacgagacacaggaaacgctgcggacctccgccttccccagctcacacgtcaaggagaaatgggccaagaacctctacatcgcttcgatttgcttcgggcggaccgtgtgctgatcgcgcgcgcctgggaaatggaagtcgaagcgagggccaccgatccggtacggtggcgcctcgcatcaagagatgcgagatggggcgtcaagtcgaaaccagttctaatgataggatcagtgtatctctgaagatacggtatgggttaccctaccgtatttgtaaagtaatgatgccggccgaacgacctttcctaacataaattgaattgattgaatatttagagctcagtcagtcaaggcccgattaagtaacatatgaacgtatgtctatattcattcattattattttaataaatatggatagaaaaaaaaagttggctaaaaagataaacaataa

SEQ ID NO: 18203 - DNA, 632 bp, Zea Mays
ctcccctctagtgctagtatcacaagaaggatatatgtcttttacacgagatagaagatgttgtggaaaagcagttggaggcctatgagtgcagtgataaagaagttactaaagatattacaaaggtgttcaaagcaatacgtctctcgaaaatgaggaggagggacgagggacatgatgagaaagtagaagcaagaaaagaacagaagagaagagatcgggcaagaaagaggaaacatgaagactaaaacccatagaaggacgaatgttgaaggccgctgtgcccgatctaaaacgttaaacatgagaggcagttgcttgttcagtctagcgagtagctttaacctggaggagtcgatgatgactcgctccagtgagcccattcagtcgactgctctcagttttgccggcgttgtgctgtggatgtataaatttagggggtggctcggcagatgtgccactgaattcgtggcgcagcagtaatggacgaaacttcaccattgcttgtcagtacttactttgttctaaaggaattataattctcgctctttgacgagttaatctatctctgattaggtgaaacaaatatataatcaatatttacaatataaaatagatatgttataaaagat

SEQ ID NO: 18204 - DNA, 1211 bp, Zea Mays
ctggcgtaacccccctacaatgcttaatagaatctctcggatatccattaagaagcacttgagtcgaagaagaatcaagcaggtctgcctatgtagagttcttacacaaagaatcagctgaacgagcattgtcgttgaatggcacatcatttatgacccgtattctcaaggttgtccggcgaagttctcatgaagcagctcacttttatggttggcctggtagtggacggtcatcaatatatgggaggcatggtaggatggcatacccaagagctgttatccctggtggttcctttagagggcgtgctccgatgaaagctggtgctagaagtttacagtggaaacgggagccttcaggcactgattcaagtgcaggtgcgaaaactgacatgagtgtggcattttcctctgaacaggtgcttccacgtgcaacataggggagtatgttaccgctgagctgatataatgagaaccaagtggtatcccactcgtcgctcctggccctaatggctgaatatggacagcaagctgagaagattgttccttcctgctgcactgtaaaagaaaagtacaaaaaaaatgaaaaatataaaaatctaaaacaagagattctgggggagtttggcatcagattatggctatcattctggtgactggatttggtcctcttggccatatgcgagtaggctgacagcctgagcaattttctatggactccagcaatctgaaagaggattcacattcaaaataatcagagcttggatgtattggatggaagatgcttttcaagtagaacaagatgtgcagattttggaccaggtatttagtgacaatccgggcgtcatcgatgtaagcctcaactgtatagaagtaacctatctatctgtacccttgtgtgaatcaatctccttcccaacaaaaaggggggaaaaggcagcacaaaaaaatatgttctcttttgttttttcctctccatgaactgttttatttattgtactaatatagctgattattcagttggacattcatttttttgtcaaacagtttaacaatactttttttcctgtgtggtctacaattagattgaccgtgctacctgacttgcatttccaccatttcatgttttaagtttcaaaatccagtttactgtctgatcaatgcagtttaatctcgggatgtatttccatggttcgtgtacatctatggctggg

SEQ ID NO: 18205 - DNA, 823 bp, Zea Mays
ggaatcttcttcacctatctacagtcgatgtgatctctgtaaaattatggtttgataaaaagatcataattccaaaggttgccaatgtgtgttctggttttgatgattcatctggctgggcattctttgaccttacctcagtatatgatgattattgtgaagaatcaataaccattgtggaggctgaatttgctcgtataagtacacactgagaggatcaacttcctttccaaatttgtttattgctggtgattggattgtcaaccgacatgggtccttttctaaagaaaaagcatatgtgactggacttgaagctggtaatagggtagtagactattttgacattggggactttgccaaaataattgcagttgaaggagatgagccccatatagagacattgcgaagtctcaatagaagagccaatgaactgaagtcacaaattccattctcagaattctttctccaataattttgttgggatttttctgtgtttgttgagcattgccattgttgtaggcattgttattaagtcggtaaggtaaagcgtggcgacctagccctttgagtcgactagacgcttaaggcgcgcagcgaggtgtcgccatacagatgtcctaacctacaggagagcaatagaaacataccttgttgatgccaattttggagctccagtttcgcttgttccatgtagcgtgtatcccccttacagattgcaacatgaacatgttgtgaattataattaatgtaagaaacaatttataatgcaatgattgaatgaatcatctgtgtaaaatatagattggcttgaaggggatttaac

SEQ ID NO: 18206 - DNA, 1075 bp, Zea Mays
ccttgttgggctgcgactatcctgtgttttactgctgcttctgttgggagtgcataccattcagatatagggatattaatgatggagcttctgatgatgaacaaaagaaacttgttgaagttctcatgatcagctcccaaagtggaccgggtcttctatttccaaagggaggctgggagaatgatgaaactgttgaagaggcagctgcaagggaagctatcgaagaagctggagtgcgaggagatttagtgcaactgctggggttctacgatttcaagagcaagcagcccgaagcaacgtgcagagccgcaatcttcgccctgcacgtgaaggaagagctagcctcctggccagaacagagcacccggcagaggagctggctcaccgttcccgaggcggcggagcggagccgctacccgtggatgcaggaggccctcgtgacaggcttctccgcctggctcgagaactggagaaacggtggtggcggcggcggcggctgcgtggaccgaactgagagatgacaccaccttaaagcatcaggggggcccccggcggagaagccatctgctagctatttcttggcgttgtatcttgcttggactagaattttcttccagaggctgactgcctggcatacatgcatgagggctctctgatgctcggtagcttttgtttactttgtcgctttattacaccgtcgtcttcaggatgacagtctcctcagctgatgatggcccgaggtttgttaaattgtaagcttgctgattctcgcggtcgccagctatatttaactgtcttgtattgagccttgagacaaagcaagctttgtgtatatcatgtgtcgtcgtcgtcgtggtgtactggtgtttgcctttttttgaagagttactggtgtttgccttgctatggaagtgcaacgggagtcctcttgttgtcacagtcgcaacttctctgcctttttaccctcggaaagatgctcttgcgaccatgtcatttgcaagtacacaagtcacaggagatggaaatgttaaaatttcaaacatgagatttctttgttgaaaaggtctgtttgagg

SEQ ID NO: 18207 - DNA, 3624 bp, Zea Mays
ctaaaatatcaccatggagccacatgttgttttgtgacatcatctttctctcacagacagtgtgttgcagcaaatttgcgccgttcaacgagaaagcgaaggatttctgtaaatctggagggctatgatacagatagttccagtatggaagatgacgatcttatgagacctagatatcgatcttcaaagagtaaggggggaaacaatgctgcacataatgaagtgtcagctagaccaaagcgccagaagttgtctaactccatacctcgtcgtgaaggtttacggcctagaagatctttgcgaggacaaagactgcatccataccatgaatctgaggatgaccaggaaagctctgatgaacaaggtgcagaagatcaaagagaaaatggcaatgagattgaagaggatgttggtgatgaggaggaggttgatggaggtgatgaagctgaaggagatggagatgacgaagatggtgaggaagagcaagaaggaaggaggagatatgatttaagggaacgttcagaggttcgtagaccatcccctcgtaaggaaggaaagcacagaccacaatctcctcgtagagtactagttcacggaattggtccaaagaacagcaagtatttaaaaaaaggtgggtcgcgcatgcataagcgccctcgtttctctttgccagatgattcagatgattcccttcttgtggatgagccggacgagggcccatccatgccatggatgcgcagtgggaggggaagtatgccatggttgatgggtgggttggacatgcatagtccagcagcatggggcctgagtgttggagcatctggttggggtcatcagggtgacacttctacttcactcatgcctggggtgcaaactgctggaccaagttctaagggaggagccgacattcaacctctgcaggttgacgagaatgtgagctttaaagatataggtggactttcggagtacattgatgctctaaaggaaatggttttctttccattattgtatccagatttttttgcaaactatcacatcactcctcccagaggtgttctgctttgtggcccaccaggcacaggaaaaacattgattgcccgtgccttagcctgtgctgcctctaaagctggccagaaggtcagtttttatatgcgcaaaggagctgatgttcttagtaaatgggtgggtgaggctgaaaggcagctaaagttactttttgaggaagctcaaaagaatcagccgtcaattatattttttgatgaaatagatggcctggcacctgtgaggtctagcaagcaagagcagattcacaattcaattgtttcgacattgcttgctttgatggatggccttgattcacgtgggcaagttgttttgattggagcaactaacagaattgatgccattgatggagcattgcgtagacctggccgatttgatcgtgagttttattttcctttacctggctatgaggctcgagcagaaatactggatattcatacaaggaaatggaaggatcctccaccgaaggaactaaagatggaacttgctgctagctgtgtgggctattgtggagctgatttgaaggcattatgtacagaagcagctattagagcatttagagagaagtatcctcaggtctacactagtgatgacaagtttgtcattgatgttgattcggtcagtgtcgagaagtaccactttttggaagctatgtctacaataactcctgctgctcacaggggatctattgtgcattcaaggccactttcaacagttatcgctccatgtctgaagagtcatcttgagaaaataatggaacatatttctgatattttccctttcctttcatccatagattttagcaagttctctgctctctcctatggatcttccatccctcttgtttatagacctcgccttttgatatgtggtggtgaaagtgtcggactggatcatgtgggaccagctgttttgcatgagcttgagaagttctctgttcactctttgggactgccgtctcttctctctgatccaagtgcgaagacacctgaagaagctcttgtgcatatctttggggaagccaagagaacaaccccgtccattctatacatacctcagttccatctttggtgggatacggcacacgaacaactaagggctgtgttgttgactctgttgaacgagttgccctccaaccttccagttttattgcttggaacatcatcagtggtttttactgaccttgaagaagagtgtgcttccatattctcttctcgcaatgtgtatcaagtggatcaaccaagttttgacgatagattgaggtacttcagtatattgtttgagtcattgctctctttccaaatggaagaatcaagaaacaagtcaaagaaacagaagtctgctattgaccttcccaaagccccgaaagaagtggagggccctaaggtttctgagctaaaggctagggcagaagctgagcagcatgctgttcgtcgaatgaggatgtgcctccgagatatctgtaatcgcattttgtacaacaaaaggttcaatgtatttcacttcccagtattagaagatgaggtgcctgactatcgatcaataatccacaagcctatggatatggctactgtcttgcagcgggtggactctggacagtaccttaccagggcagcatttataaaggatattgatcttattgtctcaaacgcaaaggtccaaggcatgttgtcacaaatggacccatctttggtgtccttctgtgataaaattgcttcacaaggggggccactgcaggctgtggatgatgaagatagagctattcttcaagcagcacctgttgctcagctggtttctggtactagaataagtgcaaggcttcgaaatgtacagcctgaagtaaacctgtcacaaagttatgaagtgctaaggcggcaaaagaaaagtgcagaaaatgaacaaagcatgactagagatgaaaagtctcctgaagatgtagatttgtcgaagccaactgacgcagaagaagctgcaaaagaaccagagtcaaatggcactacgaaagaagccaacgattcaccagccaaagaaccagaagtatctacttcccctgaacccatggagagtgacaacggcaaaattgccgcggctactggcgacgacttgttagaacagctagaagccctgaagcaacgcttcatggaactcactgcaagctatggcgtgccgcagctcgagaggctgtattccaagataatgaaaggagcaatagagttgacaagtaaagaaagcaacgaggatcataggcggttagtagttaggtatttgtggacattcgttgagaacagcaacaatttttaacctggcgccaataagattcttgttttccttgtacatcctctttggaacgaaacaatagtagccgttcatcttgggagttgtccccgttccatgccttgtaacaaatcttccaaatgctctagtgtcagtgacacagttttgccatgaaatgatgtagcaagtgaacccttcctagatttgtacctcagtttgatgaatttatgaggtggaattccctcttaatgcataacatgtgttaccatgcttgttatcttaggccat

SEQ ID NO: 18208 - DNA, 2634 bp, Zea Mays
ccacttgcccacttccaggcttccagctccagctgcggaattactgccttccctttccctttgcccgcactcaagggagcgaggtaccatcaacgccgggccggcgcatgcccgtctctccgcgccgccacctccgccgtattgcccgtcgtgtccgagccatgcttcccttcgccgcggagccggaggtgtccgacggagacgctgccgcgggcgccgaccgccgcgcgtgggagccgcccttcgacgcgtcctcgcccgcgccgcccatgtcctacccgatcacgggcctcgccgcgctcgcctctcgcgcttacctgtccgccgaagccaacttccacctccccttcaacagggcttccgttcccgcgccagcctcgccgctcccgcagcgccgccgcgtcctcgtctgccacgacatggaaggcggataccgcaacgacgcggcaccgcagggcggggacaagccggacgcctacgcgctctggcactggcacctcgtcgacgtcttcgtctacttctcgcactacctcgtcacgctcccgccaccctgctggatcaacgccgcccaccttcacggcgtcaaggttttagggacgttcatcgcggagtgggatgagggcgtgaagatttgcaaggagatgctcgcgaccgaggcttctgcacagatgtatgcggaaaggctcacagagctggctcataccttgggatttgatggttggctgattaacattgaggtcaatcttgacgttcacttcatcgataacctgaaagagttcgtcaagcatctaaccatgacaatgcacgatgcagttcctggctctttagtcatatggtatgacgcaatcactgtgaatggtgaccttgattggcaggataagctcaacaagtacaataagccattctttgatgtatgtgatgggctattttctaactatacatggaaggaaaatgacccacaagattcagctacagttgctggcgacagaaaatatgatgtatacatgggtattgatgtttttggacgaaatacatttggtggtggtcaatggactacaaatgttgcccttgatctacttaagaaagttgatatctcagctgccatatttgctcctggatgggtatatgaaactaagcaaccacctgactttcagagagcgcagaatcattggtggggccttgttgaaaaatcatggggtattcttcggagctatccagaacagttaccattctactcggattttaatcagggtcatggttatcaggtatccgttgaagggctgcaaatctccaatgattcatggaacaatatttcttgccaaagttttcagcctatgcttaaatacaccagagatcaagttcatctgcaagcctatacggatttcaaggctgaaccttacagtggagggaattgtttgacagtcaaaggatctcttcagcagaacattattttctcagaacagctttttaatggaggacttgccatggaagatggacctgttcatctattttattcgataagagccaatgcaagttctgctttagggttgtccctggatctgtcttctagaaacaagcagggtacttcaaaaattctggttgcagaggacatagcaacattcaccagaaagaaacaaaatcacaagtatggatcatatgttaaagccgataaggtggagctacacgctccagataaccacggttgggtcctttacaaagcaactgtttcttccagtgctgggcacacattaactggtatcaacattgtctgcacattgaaatttactggcgaaatcagtccagaatcagaagatggtagcatcttggtagaagatgtcgatggaacttcactgtatcaggcatcactaggccacctcagtattcgaaatactgacaaaaacacagagttccctccagcagaatcttggataactgaaggagattacatctcgtggtcaaaatgctctaacggatctgaactcgtgaatctgaaaatcagctggaagctgaagaaccctgatcaaccacaaccaccattcagcaagtacaatatctatgtggagaagttaacggcagattcagacttgaaagttcccagtcccaaaagctatcttggagttgctagtgtcgatgccttctatgtgtcgggcttagaggtctccaacgaagtcaccggtctgaaattctttatccaagcgtttgcacacgatggaagctggcaagaacttgaggaatgtccaaagttctttttattccctgttcactctgaatgagtgacattcatttactctggtgcgcttcattctgttacctttgacatatgttaaaggctcccacagaataatctaatgttatcattacagaaataagaagggaaaaacaaataatattgcattttttctctgctcatgttgtttatgtacacccattatttttttttctttcatctgagtacaaaagatctgtaaatttggtggtactagttggagaggtttcttctttcttgtcaacacatgcaaccgcagattctccggaaacaatgaatttgttggtggttgaaagcatccttgtgggctttatgaggacaccataggtgttcagcactgtgtttccgcctgtgatcgatcccctctg

SEQ ID NO: 18209 - DNA, 1915 bp, Zea Mays
cagttttctgcaggcacagcagagcacgactcctccacgtggccatgtaaacatgggccccaccaaaccggtgcggactgtggagggactcggccacggaccacccgtctcgccctcatctaattacgccccgctcgctgtccctctcagatctcttccttgttctcgcctcgtcgtccccaatcgtcgccgggagtctcccgatccttcttccaccacctcaccggtggtgtcagggccggctcgcggacggtgcttggactgcccccgtcccgtcatggatcgcgccgagctcaccaccgaacaggttctgaagcgagatattccatgggagcattacatgtcaactaagcttatctccggaacgtgccttcagcttttacggcgatatgaccacaaaccggagagccagcgagctcctttgcttgaggaggatgggccagcatatatccgagttttcctgaatatcctgcggagcatctccaaggaagagactgtggaatacgtgcttgcactcattgatgaaatgcttgcaacaaatcctaagcgtgcagcactgttttatgatcaatctttgtcgggtgaagatatttatgaaccgttcttaagttgttatggaaaggcaactggtttgtacaagaaaaaagttgtaagatattgactgttataattagtgcacgaccaaagcttcagaatggcacacttccaaatggagatgcttcgaattcgaagagcaagcttacttcaacacacgatgtattgagaggtttggttgattggctctgttcacagctgaggaatcctacacacccgagctgctctattcctacttctatccattgcctctccactttgctaagagaaccatatgttaggacattatttgttcaagctgatggcatcaagctgctcattcccttaatttccccagcttccacacaacagtcaattcagctcctttatgaaacttgcctctgcatctggcttttatccttttatgatgctgcagttgattatttgtccaccacaagggttatgccaagacttgtagaggttgtcaagggctctactaaagagaaggtggtcagagttgttgtgttgtccttccgcaatttgctggcaaagggtgcatttgctgcccagatgatcgatcttggattgccacaaatggtacaaaacttgaaagctcaagcatggactgatgaggatctgttagatgctctgaatcaactagaggtgggactcaaagaaaacctcaagaagttgagttcctttgataagtacaaacagcaagttcttcttggtcatctggactggtctccaatgcacaaagatccaagtttctggcgtgagaacattaacaattttgaagaaaatgatttccagattctgcgagttctcatgacaatcattgacacatcaagtgacaccaccgctcttgccgtggcctgctacgacctctcacaattccttcagtaccatccatctggccgaatcgtggtggcagacctcaaggctaaggaccgagtcatgaaactcatgaatcatgagaacactgaagtgaggaaaaatgcattgatctgtgtgcagaggctcttccttggcgcaaagtatgccagtttcctgcaggcttgagaaaagctgagtcttgtatttagatccagagaacccctggtcatttttcagaatggctgttgagaaagaaaaaccttgaaaattcttgttcagtgtatcctattgttatttgatttctgaagccgatgtataataaataatcagagtcatagaatgctcgatgtaataaagtgtccatgggcttgttgattcatttatgtaaattttgacttgtaacattagcaaacctcttttttgttattcttctgcctgacaacattgcctgattcgtgtgcattac

SEQ ID NO: 18210 - DNA, 933 bp, Zea Mays
ctttctatttagagtcctaggcaccacatagtatatagcagcagtgctttgctcagtccactttgttgaggctgggttgagagtgtaggagtaaagcctcaagtctctttggaccgtcgaggatcgatcaggcgggcagaagcggtcgtcgccggacaagacgcataggtccaccatggatggcgtctaccaccatcaccaccaccaagagtcgccgttgacgggcaacggcgtcgccaccgccggtgagaagctaggcgtggagcggttcgagctgccgctgatctacatctcgctgtcgcggaaggagaaggaagacgatttccttgcgatgaagggcaccaagctgccccagcggcccaagaaaagggctaagaacgtggacaagaccctccaatttgtcttcccgggtatgtggttgtccgatttgacgaggggacggtacgaggtgcgggagaagaaatgcgtgaagaagaagcgaagagggctgaaagggatggagagcatggacagcgactcggagtaataaggtggaggcgcggcgcagccatcttccatgggggtgggagtcgaggaagaaggggccctagagaaggaggaaaggaggagacgttgagggcaagagtgagcggtcgcgcctgctcaccttgagccgccgccgcgctggaagcgtcggaggacggcggtgcttgccacacacagggctgtgtttctggcggtcgtgaggtttttttgttccttgatgctgagctgcgtctccgcggccgctgtttgcagcatgtaaccctgaaactctgcgatccgtctatctctgccttcttcattttttctcatgcgctttcgagccacctgaaacgagacggttggattcattcgattgcaccggtgacggtaaggtgaaaacgacacaccaccggtggctagttgttggac

SEQ ID NO: 18211 - DNA, 1871 bp, Zea Mays
cctgcctggccttggattggaatctctgggcgactcgacctgaacaaccccgcccgccgtcctgcccttgtgctctagtcctcccgcgaccgttccaaattcttcctcgcatcgccggcgatgggatccaaggaccaggacggaggggctgcatcctcgggaggcggcttcttctcgtcgttcgccgccggcatgcgcagctggggcaccgccgtgcataaatccgtcaacgggctgcttggttatgaaggccttgaagttattaaccccgatggaggcacagatgatgctgaagaagaagctttgaaggggagatggaagcaggaggaccgtgatagctactggaagatgatgcacaaatacataggatcagatgttacatcacttgtgacacttccagtcataatttttgagccaatgacaatgcttcagaaaatggccgagttgatggaatactgtgaattgttagacaaagcagatgaatgtgaggatccatacatgtgtatggtttatgcttctacatgggctgtttctgtgtactttgcatatcaacgcacatggaagccttttaatccgatccttggagagacttatgagatggttaaccaccagggcattacatttcttgctgagcaggtaagccatcatcccccaatgggtgttgctcactgcgagaatgaacattttacttacgatatcacgtctaagttgaagaccaagtttttgggaaattcagtggaaatttacccagttggaaggactcgagtgacactaaaaaaatctggtgtcgtgttggatttggtgccaccactaacaaaggttaacaacctgatatttgggcgcacttgggttgattctcctggagagatggtcatgacgaacctgacaactggagacaaagttgtgctatatttccagccatgcggctggtttggggctggccgttacgaggtggatgggtatgtgtacagtgcagcggaagaacccaaaatcatgattacagggaagtggaacaagtccctgagttgccaaccatgtgaccaagaaggcgatcctcttccaggcacggagctgaaggagatctggagagttgctcctgccccacagggcgacaagtatcagtacacacacttcgcacacaaaataaacagcttcgacacggcacctaagaagctgttggcatctgattcacggctgaggcctgatagatatgccctcgagaagggtgacatgtctaagtccggggcagagaagagcaggctcgaggaacaacagagagctgagaaacgaactcgagaggccaagggcgagcaatttactcctagatggttcaacctgacagatgtggtctcccctacaccgtggggtgacctggaaatttatgaatacaacggcaaatacacagagcaccgggctgccatagaccgctccgatgtcaccgacgagacagatgtcacttcagtcaagttcagcccatggcaatatggtagctcatcttcccaatgattctccgtggccagaagccgccatgcctacgcgcattgtgtaaaacacttccaggcctggctttgctggtttgttgtgccatcagcggtttccttgcccttgtagtattgtggccttcccccttttttcccttaaatgctacagttattcaggaagtggtgtagtccgtgtactgtcgcaagtctagcgagattgcagagttttgttgaaccgttgtgctgttgtatttatgcgagataactgataaccgaaggtaacgaacgacacagatacggatggaatcatggagctggagcagaacatatgtgcaatgtgctgcctgcctactgcagtgtgtccgtgcaacagcagagatcccatcacag

SEQ ID NO: 18212 - DNA, 527 bp, Zea Mays
acaaattgaccgccattgtgcaaaccagaaccccttcgccattttcaccaactccctccgatcccggccatggcgggggaggactgccgctccggcgcggaaatggacgcgctcgtacgacgcttgaagctccaccggccgtccccatccccctacgaccccgatccggccgcggcccccgtccccgccaccgccggcgacggcgagctgttccggccgcggagagctgccgtgcttgtctgcctcttccggggagacggcggcgagctccgcgtcatcctcactaagcgctcgtcctccctctccacccactccggagagctgctggtgggtgtgtgagaaggaatgaagaccttgaggaagaggagactaatttagcaaatgaagatgacgaggatgaggaatatattcttgatgatcttgatgtggaagatgaaattgaaggaagcaatagtggaaacgatggtgatgatcaaggcgtggatgctcatggtcttaatattgatgagttcggtgatggttactaa

SEQ ID NO: 18213 - DNA, 1858 bp, Zea Mays
ccgccgccgcctcaaaaccctagctcgatggagacattgagggaggccacagcctgcaggtaggttcgttcgactagtcatgggccgcgaaccatctactgcaatttgcagcccatgagagacgatcgggctctccaagtgggcatggtgcagggtagctgggctccctgggctccaacaaggaacgaggcccatctataatgacggttagacaaagaagtggcgcagcggcactaggccatccgttgaagcgttatcccgcagcgggcaaccacggtcacgtacgcgaaatctctctctctcgtggtcgtgcgcttccttcccgagactccaatgcccctgcctcccctgctcccgcgcctttaccccacgccgcctccacttcgcgccggggacaggggtaacgccgtccctctctctcctggaagaagaaggccggcgcttctcgctgtcgtccgcgcaaagagaaaggacgaggcaagcttcaccgaccgcatccttgactacatcgagggagggccaaagttaaggagatggtatggagcacccgatttgcttcccaaggatggggctgcggaggatgaggaggacgagtctcaagatattgaggagtctcgggacgctgtgctagtcaccaatggcgacagtgagattggacagatggtgatattagcactaattctgaaaagggctagaacaaaagcacttgttaaggataaacgaaccactgaagaagcttttggaacttatgtggagtgcatggttggtgatatcggagataagtccttcacaaagagagcactaaggggcgttcgtgctataatttgtccagctgatgatggttttttctctgaaccgatcgacctcaagggtgttcaacacattgttctgctatcacagaaatagtggtggtttgcaagctattatgaacagcaagctgaagacgctagcagagaaggatgaagaagtggttcttgcatctggcatcccatgtacaataatcagaacaggttctctgcaaagcactcctggtcgcgagagaggttttgattttactgagggcatagcaagcaagggaagaataagcaaagaggatgctgctaccatatgtgtggaagctctgaatagcattcccctaaagacacacatttttgaggttgcaaatggtaaggagaaggtgatagactggaaagcatggtttgaagagcagaccaaaagagaagaagaaatacagtaaaaaacaaattggaagtgtttttcgcttgttggtccatgagaaaggaaaatagaaaagagcaaaaaaaggagaggatttataaaaacttgatggctagtttggaaactcaaatgctcttcggaattgaaggggatgggagaggaaattagttcatttctacctcaatcctctccaattccgaacgagatttgaggttcccaaatagcctaaaggaaatgagctgaaggttacgtttgatcctctagccttgctggcaattgaatcatactagtatatccgatgaagaaacaaaagtgcgtggagaagtggaggcacgtctatgaactctacactctgcagttgggctgaagcccctgatccctcattgtttatcaactcattcattatcttatataaaatgcagttcaaattatttgattaaagactttaaccatccacgagtatttctgtacacatgtatctagcgtttctgccagtattgtttgttgttcaatttgaagattaggccatcaagttattacttcagggcaacagaagcctcaagtcaatgtcacatggtactggatttctgcagcaaacatgttaacatgctgccgtctttaagggtttgttcgctttcct

SEQ ID NO: 18214 - DNA, 3221 bp, Zea Mays
cgccagcccgagccacgatatttgcgctgcgcctcgcctccgcgaagcaacgcggacgccgtgccttgcatttccctttcacaaaaccaaaatccaaaacaaagaggagagcgtcctcctatcctccccttcccctcccccgcggccatctcaccccgatggcctcggcccccttcccgccagtcgcggcgtcggcggcctccgcgccgccgcgcctggccccgcgccaccccttcgctgctgccgcagccgcgcgccgctcctcgctctcgttccgccccgccgcgcgccggcccgttctcccgctccgctcctccgcggtcgcggctaacaccctccgctgcacgcaccgccgcgccgtctcatccaggtcgaggagacgcgcgcaagaactcggcgcggcgcccgcgttggctgcgtcgacctggggcgtcggcgaggagaagggcggttgcctctcgtgcttccccaagagtaggcggggcaggtcggggctcgcgaggttcgcgccgtgcgcgctcccgcacgcgtcgggactatcgtttcgcagccggttgagcgggtccaaggtcaagcctagccatatattgcacgccgctggacctgatgaaccacatgttgcaagtccaacatggtctgatacttcccttgatacacgtgacatggatcatgctattagtaaggaggagcttgaagatgttctcaacactccgcttcctgagcatccgaagctaattcgtggtcaattgaagaatggacttcggtatcttatcttaccaaataaagttccagcaaacaggtttgaggctcacatggaagttcatgttggatcaattgatgaggaggaggatgagcaaggaattgcccatatgattgaacatgtcgcgtttcttggcagtaaaaaacgtgaaaaacttttggggacaggtgcgaggtctaatgcgtatacagacttccaccatacggtgttccatatccactctccaactaaaacaaaggaattgatcactcaatcaaagctcgatgaactgaaattgcaacacaatccatcatttgttcctttaaccaaagaggagaatgcggtgaaagtgtttgacagtgaaactggtatatcacaacgccgtctttctaacggaatttccatcaactacaagattacacaaaatgaagctagggttggtgtcatgcggctcatagtagggggagggagagcgacagaagattctgaatcaaagggatctgtcattgttggtgttcgttccctgagtgaaggtggctgtgttggtaacttttctagggaacaggttgaacttttctgcgtcaataaccttatcaactgctcactggaatcaaatgaggaattcatatttatggaatttagatttgctttaagagacaatggcatgcgtgctgctttccaactccttcatatggtccttgaggtttgtagagccatcgccacattcactgcagaagttgactcttcagtcagttaaagatgctgtcatgaaccagtttgtgggtagcaacatggaggtcagcattgttggtgatttcactgaagaagaagtagaatcttgtgttcttgattatcttgggactgtgagggcttcaagttctccaaccatagaggagcgtattgaaaagatttcctttcgaccatttccatcagatgttcatttccagcaagtatacataaaggacacagacgagagagcctgtgcatatattgcaggccctgctcctaaccgttgggggttcgctactgaaggaaatgacctatttaatgtcattcagagatctgacgctgatgcagaaatatctgaaccagtaagcttggatctaacagggaagagacacatcaatgttcgcagccaccctcttttctttggcatcactttgagtctgcttgctgaaattatcaattctaggctatttacaacagttcgagattccatgggattaacatatgatgtttcttttgaattgaacctttttgacaaattggatcttggttggtatgtgatcgcagtcacttcaactccaagcaaggtccataaagctgttgatgcctgcaaaggtgttctgagaggattgcatagtagccgaattgtggaaagggagctcgatcgggcaaagaggacactgttgatgaaacatgaagctgagacgaagacaaacgcctactggcttggtttgcttgcccatctacaatcttcatctgtaccaagaaaggatgtatcatgcatcaaggaattgacgacattatatgaaaatgcaacgattgaggatctgtatattgcatatgagcacctgaaagttgacgattcttctttgtttgcttgcattgggattgctggcgctgaatctggtgaagatacaaacgatgacgagcctgatgtggatcttcatggcatgggtcccatgggaggccggggtctttcaacaatgaccagaccaaccacatgatcaccattgggatggccaacccttccaagggattaaccttgctccccaagacagggagtcacatggccctaggagactgcatgttgactgtcgtttcccagcaaaactgtttaaagataattcaagcatttgatctggatctggaagactattatatcctgagccacaaccaaaagcttggtggctgcattttttccccgaggagcgttgagttaatgactcagcaaggtcgtgaaaaagaatttattgtttgaggtcatgtagcttcacatgtacagtaaaagcaggttggttcttgcatacagttgttgtaactagtgcgttcagggcattgaagataggatgacagtagatcacagacgttgctgggctgcgaatagcgtaaggcatctgctgtaactgtaacgaaataatgaagcgcagtgtcaggaccctggatagatggcaagtgggtggcatgtgtgcctataaaaagggagaacgtatagaccaagggatatgaaagaaccatttgaacaaactaaatcctctctacctttccattactgttatctcttcataatctctcctctcatgtatcctgtttctctaccttctagaacaatttggctatcagatatcaaattagatcgtcttcctcgctgctatctccttcttcaacccttcttctacctgaacatctctcttctctccgatattcccttctgtggcgctaacacgcaggcatgtaacatttttgtgttattcttttg

SEQ ID NO: 18215 - DNA, 1270 bp, Zea Mays
tcgccatttcgttgaactgctggaagacacgtcggtgcacactagatttggattggggagaggagaagcgacagctttcggatgtgcaaatgtgcctagtaaataaaggttgataagctgtgaggttgaagctagagacgccgctgttttaagtttcttcaaggacaagggaacattaatgtcacctaaagtactttcctcgatggaggttgaagctggttttgctggcgatggcgtcggttcaaataatggaccacaagacatgtggtcacttggcgagatagatccaaaaagagcaaggttcccgtgctgcattgtctggactcctcttcctgtagtttcatggcttgctccttacatagggcatgtcggaatctgtcaggaggacggggctgtcttggattttgctggttcgaatttggtgagcgtggataattttgcttatggttcagttgccagatacctccagcttgacagaaagaagtgctgccttcccgttaatcttgcagaacacgtatgcaagcagtcttacaaccattcagaattaggagcagcgatatcatgggacgatgctctgcgatcgagcatgagacgcttccagcacaagtactacaacctgttcacctgcaactgccactcgtttgtggcgagctgcctgaaccggcttgcctacaatggctccctggagtggaatgtcttgaacgtggctgcccttgtctggtttcatggccgatgggtggacagaatgtcttccgttcggtcgttcttacctgtcctacccgtgacatgcatcggcatcttaatggctggctggtctttcctgctagggatggcagcgttctctgctctttctgattggatggtttgttttcacagtgtactgcgttaagggtttggtatgttgactggaaaaagaattactgaaagcactccattagtgcattgcagtctaggaattatggatgtaatcgctgtgctggagtcaggtaaatcactcgtgtcctcagcctcagtgattcagacctgtgcaagttcgtcaaacaaaaaaattgacctatggaggtggtctggagataatttggttcatggcaagttcgtcaatttatttagtgctgttccaaggaaaaaagaaattcttttgattcaagcatctctttctgaacttaacaacttgatgtattagttttatatttaatattccaagaaatcacatcatagtatatcaatgctctctaatatatatatatatatatcaacattccccatctag

SEQ ID NO: 18216 - DNA, 977 bp, Zea Mays
cgagaacagccatcgacgccgcaagaggagacgcacccaagagagaggaggcgaccatgagggccaaggtatactccacccatctcccttcctacttctcgcgcctactacctcatctcttagatccatgtggcatatcgccctgctggtgctcccggcgttggcccaggtcccgaagcgggagggttggtgggggaggaggaactaacgatagccatcgccatggccaccgacgacgactgataggactgcctcttcttcatcgatgtggtaacgacagaaatcaagtaatggggacggggctctccaggccatgcgggtcaaacgactggaacacgtccccttagcctccgaacgggaaccccgggctggagctctacagcgagaagaccaagcttgctgaagggccgcaggcttggaacatctagattttgttttgctaaggggagcgctatgtgttgctcaggtcaagtgggttcacggctgcgagcttcatggagagactattgatagcaggtttctttattttcatgggaaaagtacatgtttctattgtgccttcgtacattcatagttgaggtttaatgtacatgccttctctattatattttagttaagatactcaagcaacaatgcctaaaagctcttactgaattactcgttgttgtgtttgtagttgtgtcctgcatcattctttgatcaagattgatgagggaaagatcagtatgccgaggatgggaccgggttgtagcttgcgatgctagatctgctcatcatgaaacccatcatgactaatgcatttatctgccatttaagtgtacaccagattatttgtatgtttgctgcttactatgcaaaatggcagctaaaagaagccctaaagcatgcgagctgcacctctaccggtttagtggccaaactggctgttactacgtttcagagctctctgaagaagtggacatcgaagagaaatttgc

SEQ ID NO: 18217 - DNA, 2282 bp, Zea Mays
gggccggggcccgaatcaagtttagtcctcgggagccctcgcgtgcgctctcttttcctgtgtctgctgccgacgaaagggcggccgccgccagacctccatcttcgtgaccttcgtaggcggcgagcacccaccaggagaaggcatggcttcacgcatgacaccttccaagaggccttttcagagaagatcttcagactacgatggccggggcaagtggcagaagacgaagcacccttctccacataaatctcagttcaaaatcgagcctggtgttcccattttccgtattctctgcccggcttcaaaatctggtaatgtgattggcaaaggaggtgccattattgcaaagatacgtcaagaaaccaggatgagaatcagggttgatagggcagcccccggctgtgacgagagagtcatcttcataactgctgccaacaaggatgaagaagctggcagcgagcaaggcggagagaatgacggaggtgctgctgcttctactggtggtgaccatgagaaggataaagataacaacagcaaggagcaaaacgttgatccagaggagaacaactgcaacgagcagaatgatgattcagagaaaggaagtggtaaggaagaaatagatggtttcgagaaagaccatggtacggaagaaaagaatgattcagagaaagaacacaataagggagaaaaggatgatcccttggttgcgaaagttacaaagttagaaccagagagggtaataccgttggcactgaaggccgtttcacttgtattcgataggatttttgcaactgaaggtaataatgaaactgggaacgcatctgctgcaagcgctcctgtttcgttgcgaatgttggtgctatacagccaagcaggttggctcctggggaagggcggtagtgtggttaagcaaatggcagcagataacggctgtgaaatccgtgttttgaaagacaaccttccgtcatgtgctctgttgaatgacaaactttgccagatcactggagagattgactcagtaaggaaaggtctcaatgctgtatctgaagtgctcttagctcatccacccaaggaaactgatgcagttgctgatgttcattcttctggatcatcgtcacgttctttgttcagccagcctgatggtcttccctctggaatgcaatctaacttccatatacctttgcaaggcccgccatcccaagccaatggaccttttgatatagttgatcttcaacctccaatacatggtcatgcctcagtggctatagaatccctctcctttaggatgctgtgtccacaagacaaggttggcagtataataggcaagggtggaaatattgttaaaaccattcaaaatgatacaggctgtgaaattaaagttcttgacactgttccaaaaacagatgatcgcatcataagtatatctggacctgcgcatccgagtgatggaatctcccctgcacagaatgccattctgcatgtgcagcgtaaaattatgttacctagctctgataagaaggaaggtcctgcaacgtgtaggctgatcgtttctggaaaccaagttggttgtgttctcggcaagggtggtagtatcatagctgaaatgaggaagctgtcaggagcatttatagtagtgttgagcaaagacaagattccaaggggtgtcccagagcatgatgaagttatccagataaacggaagttgtgaagctattcaagaagctctaatgcaggttacagctaggcttcgtaaccatcttttccgggacagaatgcctgcagtggggcctaatatgcggccaccttttggtttgttagatccccagtttggtccattttcgggaaaccatgaatcatcatccctgtttcataaagatttcatgggacgaccattggatgggattgctgctccttggacagtgaagggcatgcgggatctcagcgatccagtgtcaatatccgatatccctggagcagggcatagagaagctggtggatttccaggtcctggtcagccatctatgatgccaaacttgactgcagaggtcttggttccaagattagttatccctgttctctgcggtgaggatggaggttgtttggacaggatccgtgagttttctgaagctaagataactgtcgctgagcctacagccgatgcgatggacactgctgttttgatatctggcacaccagagcagatgcatgcagcccgaagtctcgttgaagcattcgttatgagcgaatcttttggcccatgacatgtccagagtgaaggtg

SEQ ID NO: 18218 - DNA, 1711 bp, Zea Mays
aataaactaccgcagattaacttgtggtcgctaagcgctcgcgagtcgggtaaatctcagcgtgcggccaggaactaacatgacggaagcttcgttctgcacgcagagacggaagcttgtttatttgatctgcattagtgcaacagcgagacgctggccgctcagaaggccgcggcgtgcgcacgcatcccaccaaaccggatcgccggatttcctttcgcgcaatacaacggtgcaagaatctccgggcggacgccggaagccgctagcttttgtgcaaaagctagtcggggtcaggtacgacgacgacgacgacgagtgagtggcgaacatctctagtgggctgcgaggctagtgtgtggccgtgtgggtggcctccaggtaggcgtagtgtgtcatcgaacaattggcgtttctgaatgtcttctgtgttcttctcctcgctgtggactgtggttgcatcatcgccgccgtagtgccggtctctgcgagactgcgtggaatggaatccgtcgccgtctggccaggcgatcaactgaatcgatctgttccctgacggcagagagaatttcggagtgcgccccatttgtgctcggccagtcagacgacgtgtgtactgggttcagaatcagatgatgcatttttttaataggaaaactttattaatttcaaacacatcgtatcaaattaatacaagtttttaaaaaattcttccagcctctgctcatcaagacgcacacagcctaaaattaaagaaccacaaataatctagtggcaatcaatccgatgactagatcgccacccatagacctacgaataaaagtccttgaccacatgcaccaacaatcgcgtagcctccacaactatatcctgctgctccggcttctgtagcaccgcccatgtacggagccaatgggaaattgcataaatcacctgcaaaggagagtaaattgatttttctcaaaaacaatatcatttctgcttagccaaagagcccaataagtgcttgccgcccctagcaaaatgatgttcctgagatttaactcaaacccctctagccagcttccaaacatattagaagcactagaaggtggaggtatcccaaaggctaaaaaaataacaccccagaccctaagagcgaatcgacattcaaagaacaagtgcttaaattgtctttggcttatgacaaaagcaacaagatttgtttccatgccaattgcatttggcaagattatccttagttaggattactccctgttggggggcttcgtcttccgaaggtcctcaaaaacataattaacaatgtttcccaagtgtaatatatgtacaggaatcttcggacattggataaagccgtacacaatataaaaagcggggtcaggacgaaggtcgaaccagttccgaagctatgcgcaaggaagcttcggctcaacgacagaaaggagaaccggcttaaaggggaaaaggctatctagtccttgttggattgtcattaagtcaatagtaaacataaagggcatgaatgtaattttacacaggctgcgccttgtgcctataaatagatgaacagtacccccgtactgttcactctgatttgtactcgctcgtgcgtcacacttgtacttttgccttctgtcaagccgaaggtacaaatgtaattcaatattgttcttattcatcaatgattatataataaggacatataaatgat

SEQ ID NO: 18219 - DNA, 2246 bp, Zea Mays
ggcaagcggcgcctgtagctcgcgggctcagatcggcgccggcgccggcgggtggaagcgacccagggccatgaagcacccgctgcaccgcgacggggagtcgtacccgtcacctccgccgcagcggcggccgcgcgggttcgcctccgctcccgctcccgcggcgggggcttcgccgcggaggcgaggtgtgcaggagcgggagcgggagcgggagaaggagcggacgaagctgcgggagcggcaccggcgcgccatcactggccgcatgctggccgggctccggcagcacggcaacttcccgctccccgcgcgcgccgacatgaacgacgtcctcgccgccctcgcccgcgccgccggctggaccgtgcaacccgatggcaccaccttccgctcctccaaccaaccactcctgcctcctcctccccagctgcacggagcattccaggttgcttctgtggaaaccccagctttgatcaacactctgagcagttatgccatcgggacaccattagattctcaggcatcagccctacaaacagatgacagtctgtcaccatcatcactggactcagttgtggcagaccgacgcataaagactgagaaccacgggaattccagttcagtcagctctctcaactgtatggacaatgatcagcagttaacgagatcagtattattccccgatgattacacgaaaactccatatataccagtttatgcttctttgcctatgggtattattaatagtcactgtcaattagtggacccagagagtgtacgcgctgagctaaggcaactgaagtctctgaacgtggacggggttgttgttgactgttggtgggggattgtagaagcctggactcctcggaaatatgaatggtctggttacagggacctttttggtataattaaagagttcaagctgaaagttcaggttgtattgtcatttcatgggtctggagagactggatctggtgatgtgttaatctctctcccaaagtggatcatggaaattgcaaaagagaaccaggatatattttttacagaccgcgaaggtagaagaaacacagaatgcctttcctgggggattgacaaagaacgagtccttcgtgggagaactggcattgaggtctgttttgatttcatgaggagtttccatatggaattcagaaacttatctgaagagggccttgtttcttctatcgaaattggattgggtgcttcaggggagctaagatatccttcatgtccagaaacaatgggctggaaatatcctggtattggtgagtttcagtgttatgacaggtacatgcaaaagaatctacggcaatcagcattgtcccggggtcatttgttttgggcacgagggcctgataacgctggctattataattcaagaccacatgaaactggctttttttgtgatggaggcgactatgacagctactatggacgttttttccttaactggtactctggagtcctcatggatcatgtcgatcaggtgctgtcgcttgctactcttgcatttgatggtgcagaaatagttgtgaaggttccatctatctactggtggtacaggactgcgagccacgccgcagagctcacagcggggttctacaacactacgaacagagacggatactctccagttttcagaatgctcaagaagcactctgtgatccttaagctcgtctgctacggacccgagtacacagttcacgagaaggacgacgacgaagcgtttgcggatccggaaggtctaacctggcaggtcatcaacgcggcgtgggatcagggactaccgctctgtatcgagagcgctcttccgtgccgtaatggtgaggcgtattcccgcatcctcgacacggcgaagcctagggacgatcctgatcgtcaccatgccgcgtcctttgcgtaccgtcagcagcagcagcccccgctccgagaagcttgcctttcggagctctgcaccttcgtaaagtgcatgcacggggaggctccccagaatggggaaggttgaatctggttagcaactgatgcgctggctcgacaatacggaagaaaccaagtaggtgggtttcggatttgagccgcttttgaaggcgtccggcgagcgaacattctgatactgctaggtcctattcagttggttccatctcgtcgtcagccgtctgccctgttactcgtcggctggactgagcagtcataagaatttggtaggcacggagtagacagcttca

SEQ ID NO: 18220 - DNA, 1313 bp, Zea Mays
atcatctctgagcacatttcaccactatgtaaaggaatcccactcagatttgttttagggaagagcaagatgatcctaggctttgctgaaggcttcccaacaatgctgaagggtgaaattgctatgttcaaaatgcagcctaaaattcactacgctgaggacgattgtccagttgcaactccagatggctttccgaaggatgatgaacttcaatttgagattgaaatgttggatttctttaaagccaaggttgtggcagatgatttaggggttgtaaagaagatagttgaagaagggaagggatgggaaacacctagagagccatatgaaataacagcacggataactgcaagaacagcagatggaaaagaaattattccgagtaaagaagaggcatatttcttcactattggtaaatctgaggtacctaaagggcttgagatgggcatcggaacaatgtcacacaaggaaaaggcaattatttttgtcagtagtacttatttgacgaagtcctcactaatgccacagcttgaaggccttgaagaagttcatttttacattgaactggttcagtttatccaggtgagagacatgcttggtgatggtcgactaataaaacgacgtgtatttgatggaaaaggtgaatttccaatggactgccctcttcatgatagcctattaagagtgcattataagggcatgctccttgatgaaccaaagtcagttttttatgatacacgtgccgataatgatggtgaaccgttggaattctgttctggagaaggcttggtaccagagggttttgaaatgtgtgttcggctaatgcttcctggtgaaaaatctattgtcacctgcccaccagattttgcatatgataagttcccaaggccagcaaatgttcctgaaggagctcatgttcagtgggaaattgaactacttggattcgaaatgcccaaggattggactggcttaacttttgaagaaatcatggatgaggcggacaaaataaagaacacgggtaacagactgtttaaagaaggaaaattcgaacttgcaaaggcgaaatatgataaggtgcttagggaatataaccacgtgcatcctcatgatgatgaagagggaaaaatctttgctaattcaagaagttccctacatctaaatgtagccttttgctaccagaagatgggcgaatacagaaaatccattgaaacatgcaataaggattgtggtgttggggagatggaacctggtgtccaatattgatgtttatttgcacttaatcctcccttggagtgaaatcacatgcctggaat

SEQ ID NO: 18221 - DNA, 1080 bp, Zea Mays
agttagtctccacgcccctttccctccgccctagtcctccgtagctctccgccgcgtcgtccgtcgaggtaaggtcagcatggtgagggtcagtgtgctcaacgatgcgctcaagtccatgtacaacgctgagaagatcggcaagaggcaggtcatgatcaggccgtcgtccaaggtcatcatcaagttcctgacggtcatgcagcgccacggctacattggagagttcgagtacgttgatgaccaccgatcgggcaagatcgtggtcgaactcaacgggaggctgaacaagtgcggcgtcatcagccctcgctttgatatcggcgtgaaagacattgagggatggactgcaaggctgctcccgtccaggcagttcggatacatcgtcctcacaacttcggcaggcatcatggaccacgaggaggcccgccggaagagcgtaggaggcaaggttctaggtttcttctattgaagaagctgagaatctttgttatggcctgcctgcctgtcttactctctcagactagagtacctgttattttactttaatatgtctctctcagactagagcgccttcttttacttgaatattggtgactgcattggtctttcactttaaaatcggtgactgcattgatcgaattatctgagccggttcttcagatactagttggcacaacccttagttgcccatggtaatttgagcagttcggattactaaaaagattagtcacggacatcttattttcccaaggtgctcaaacagtcaaactaactgcaccttggggtcctacatttcgtgcgtgcaaggcaaatgcgctgcaattcgcaagtaaacagcaaagcgaaatcttgaggccaacgtaggtataagcgtggtaatgggttggtaaagtgtttcataataataaggtgctgtttggttttttatatttgtaacatggggtgctgtttggcagatttgtaatgtgatggtaaccgataatgttgcattggatagcaaattagaaagtgatattggcctatttaaacttattaactaagttagagcctttatgggtgcttaaatgtagactgtgt

SEQ ID NO: 18222 - DNA, 746 bp, Zea Mays
gaactgattcaagggggcttatcataagggttatgttgaaagccaagaagtatgactttgtccagaagttctatgagaagatgcagaaaaatggcgtaccaccaagagcaataacttacaaagtgcttgtaagatctttttgggagcaggataaaattaatgaagctgttgaagcagtcaatgacatggaacaaagaggagttgttggagcagcaagtgtttactatgaattagcttgctgtctctgcaataatggaaggtggagagatgctatgttacaggttgagaagctgaaacagcttcccctcacgaaaccactggagtacgcatttactggaatgatcttagcctcatttaatggtggatatatctatgattgcatctcaatatttgaattaatgaaggaccactgcatgccaaatattgggactgtgaatgtcatgttaaaagtttatggacattgtgatatgtttgggaaggcaaaggacttgtttgaaaccaccaaggcttgtttcttaaattctcagacatatatccacgagcattcgtcattcaaagcagacacatatacatacaactctatgcttgaagcatctgcctctgcccaacagtgggaatacttcgaatatgtgtatagagagatggctctgtctcatcactgtctagatcaaagcaaatattcatggttgctcatcaaggcatgcagagctggaaaggttcgtgtccgtgctttgccacagaaataa

SEQ ID NO: 18223 - DNA, 2701 bp, Zea Mays
ccttttacatcatacgacacttatagagaatagaggttgaggaaacacttgttagtggctctttcagcatgatgtttctgcgtcatagagtaacactaggctacaggaatcataaaaatattgtcatgagggtttcatcaaatgtttcagaagatgatgatccatccttgttggtaaatggtcattttgacagcccgcttggatctcctggtgcagcagactgtggttcttgtgttgcatctatgcttgagctatcacgactcctcattgactctgggtgggtccctcctcgaccggtgattttccttttcaatggtgcagaggaactttttcttttgggctcacatggttttattaagacacatagatggaacaggacaatccgtgctttcatcaatattgaagcttctgggagtgggggtacagatttagtttgtcaatctggacctggatcatggccttctcgtgtttatgctcagactgcaaagtatcccatggcaaacagtgttgctcaggatatgtttggaataattccaggtgatacagattatagaatatttgctgaagacattacaaacattccaggacttgatataatttttgttctcggtggttatttctatcatacttcatatgatacattggagaatctacttcctggaagtattcaagcacgtggtgaaaatttattcaaccttgtgaaggcattcacaaatcctatgttgttaaaagagaacgagatatctaataaagctgctaaggatggaattgaagatgtgggggcggtcttttttgattatttgacttggttcatggtattttattctcgtgatatatctctgattcttcacagtctaccgatagccatttttcttcttgtaccgctgttcctgaagttcccaaacattaccttgatgtcatggtttgtaactctcctaggtttcatgagaggaatggtactccatacgtttggtgtaatccttgcaatatttattcctgctctggctgcagcattaagattattattcacaaagaatgcaatgaattggtttgctcacccttatttggcgttcctaatgtttgtccctacttcattgattggtctattgctgccaaggcttacatgggggctatcggagcaagcacacttttggggtgcttttgggttgtattctttaataactatggtctacacactagctgggctgagtggaggttttctaacatttttcatttccatgtccatgcttcttggacgatttgtctctagaatcattaggaagcagtggagccaacaatcacctaggtcgttggttgcgtatgtgctgcctatgaccccatgtctcctttacggtctttactatggtggattccttatccagttcctgattgaaaagatgggcatgatgggatctcttccaaaaccatatggatattttgtgcctgatgttattgttggagctgtagttggattagtggttggttggtgttttggtcctctatcacctgttgctagtcgttggttgtcgaagacttcaattatccatggcttcctgcaaattacagtggttgctttggctatctcatcccaactgtttccttacagcactggagcaccaaaaagagttgttcttcaacatacttttgttacagatgctaataatatcgtggattcaagctatggtttctctgtggttgattctaactcattggagttccttttcaacaatgcacctgaggccgccaaatggctgaaggataactctgagttgtcctttgaagaaaaatatcggtctgatagaagctcatggttggctttgtatcctgtcccattcttgttctctggaagtttaaaattccaggcacaaactgaagagattaaaaagtactaccagcatttccctcagttagctgttcaggagatctgggataacaatggacagcgaagggtgcatctcaaacttgcacttggttccttatcagaaatttggacctctgtgctcaatattactgggccactatcaaattggtccttcgctgataacatgctcccagctcctcaaactgtaagtggtgggccaccatcatatatttgtcgactcagtggaaagagcgatgtggattggtctttctggttggaggcaaactcttctgaaagtctgagagtcgatgtcgcagtacttgatcagtaccttgttgatagtacaaagaaactcaagagcctcttcccaagttgggcagacttgacagccttcacaacatttttctcaacgtatcatttatgaggaggtcaagtatttgatgttcaacaagtgtaaatcattttctctttgtagccctacgtttcggggctatatgtggttttgtcaccatgatcagctggacctgagccccgaggctggtgtttgtaaaatctttgtaagcgtgccttgatgtattcatgaatcacacaagattgtaagaatctcaagtcagtcataaattttttaccacttagtcattcacgattgacggtatggcatcactgatcattcgtgttctaagtttaaaaattctaaaaagaaatgttgcatcgacatagaagtactgcgtttcattttgtaatcgataccacctgaggtgaaaggttagattttttatctacagttcgcaatcccacttgaaaaaggaacacattatgcaggttcaaggttttggagtg

SEQ ID NO: 18224 - DNA, 1764 bp, Zea Mays
gtggagcgtacgggcgccggccggcggccagagaggaaacggatctaggaggctcagctgagtcgaggagatggaccgcaaagatgtcgggatcctcgccatggacatctacttcccgccctcctgcgtgcagcaggaggcacttgaggcccatgatggggcgagcaaagggaagtacaccattgggcttgggcaagattgcatggccttttgcagcgaggtggaggatgtcatctcaatgagttgacggttgtcaattctctgctgaaaaaatacaagattgatcccaagttaatcggtcgcttggaggttggaagtgaaacagttatagacaaaagtaaatccatcaaaacttggctgatgcagatctttgaggaaagtggtaacagtgacattgaaggtgttgactccagcaatgcatgttatggcgggacagcagccctactgaattgtgtgaattgggtcgaaagtaattcctgggatggccgttatggtcttgtcgtttgcacggatagcgcggtttatgccgaagggccagctcgtccaacaggaggtgctgctgctatagcaatgctcattggtcctaatgctccaatttccttcgagagcaaatatagagcttctcacatggctcatgtctatgatttctacaaacctgatcttgcaagtgaatatccggttgttgatggtaaactatcccaaacatgctacctaatggctctagactcatgctacagacagttctgcaacaagtatgagaagattgcgggtaaacaattctcaatttgtgatgcagaatattttgtgttccattctccatacaacaagctcgtgcagaagagtttcgctcgactttattacaatgactttttgcgcaactgcagctctgttgatgatgatgctaaagagaagctccagtctttttcaaatttgactggtgaagagagctaccagagtcgcgacttggaaaaggcctcacaacaggtcgcgaagcacctccatgacatcaaagttcagccatcgactctgcttccgaaacaaattggtaacatgtatactgcatccctttatgctgcattagcatctgtgctatataacaagcatgatagtctgaatgggcaaagaattgtgatgttctcttacggcagtggtttgacatccactatgttttcattgaggctaaacaatggccagcatcccttcagcctatcaaacattgcttcagttcttgatgtcaccgagaagcttcagtcaagacatgagactttgcctgagaaattcgttgagacactgaagctgatggaacaccgatacggcgcaaaggacttcgagacgagcagagacacgagcctactgcagccgggcacattctacctcaccaaggtcgactccatgtaccggaggttctattcccagaagctgtccgaggaaacaggcggcgggaaaaccaagtgctgcaacggcctcgcaaatggccactagtggtcgcccagcactgttgctcatcattctcagtattttgataatgctcatggttagcgtttagtctagcgtgtttctgaaataatataattgttctttgaagctgtcccaccccacctagatcagctagttttttattttaatattttattcttctgaacattgaaattcatcagtctctacattgtttctctttgtttcttcttttagtactctcttcgttccaaattctaaattacgtacataatgtttgctatgtctaatagtaaaaaaaaagtcaac

SEQ ID NO: 18225 - DNA, 461 bp, Zea Mays
gtcacggcaatgatccttccgcaggttcacctacggaaaccttgttacgacttctccttcctctaaatgataaggttcaatggacttctcgcgacgtcgggggcggcgaaccgcccccgtcgccgcgatccgaacacttcaccggaccattcaatcggtaggagcgacgggcggtgtgtacaaagggcagggacgtagtcaacgcgagctgatgactcgcgcttactaggcattcctcgttgaagaccaacaattgcaatgatctatccccatcacgatgaaatttcccaagattacccgggcctgtcggccaaggctatatactcgttggatacatcagtgtagcgcgcgtgcggcccagaacatctaagggcatcacaggcctgttattgcctcaaacttccgtggcctaaacggccatagtccctctaagaagctaactacggaaggatggctccgca

SEQ ID NO: 18226 - DNA, 122 bp, Zea Mays
ggtgaacttgtctgccacaccatccacaagcacaagtgcaggaaaatgaactatcttctctattgcattggctggagtatttatactaattgccacagttatcacttcattctgtcagagaa

SEQ ID NO: 18227 - DNA, 775 bp, Zea Mays
gaccttttcctgatatgaagttggttcactcgaagtacttgtatctgtggaagaggggagagaaatatctcttgtactaaccatcctttgaatagtctgtgacttgaataattttgcatcatttgcactgatctcatttgcattctcactgatgggcagtagctttgtgttatcctggagtgcactttcacgaaatgaaagcatatctcttttaagtttcccaaacaaagcagcagaagatgaaaacactgatgttgttctagataatgtccttcggagatcaatcttccttgtctgtgaagtgtctgcaaatgaaaacggagcaacggaagagggaacaagaacaacagagaaaatccgatgtgctcctaaatgtgtctcacaatctggatagagcattgctaaaagaagttgatgaaacaacgcctcaggaaatgcctacagtgtgtagtatatcacttaaagagctggtatagttagcagaggatgcagaataatattgttaatcaacctactttgctctgatgtgacaagtttggcaatgatgcaactatttgagcagtgcgatatgctgcagagatagtagaccgtgcaacaatcatagaactcgaaatattttccagtactacagctaacgtatcaaggataggtccagcatcaccgacctgaagaggataaaaaaagttgaacaaattatccatagagtgcagctgtagagctatagatgaaaaaaacatacacctttaaaatttatttagaaaaattgacctttcta

SEQ ID NO: 18228 - DNA, 1198 bp, Zea Mays
aggattaagcgaagagggttgaagaggcccagcccagctgacaacaccggcctccgagaagcagcgcaggcgcagggcattccagaacgttcggcggcggcgaggcgacacgcccaccaccagtcagccgccccgccacagccatgcgcctccacgccggcgcacgcctcgcgctcctgctcgcccgccgctccctctcctcctccccccgtatcccgcgggtgcacacagggatacggagcgaggcgccctcccggagctctcccttctatccgccgagcagcgcccgcaggtccttccacgggaccaggccggtggcggcaagggactactacgatgtgctcggcgtcagcaagagcgccagccaggcggagatcaaaaaggcctattatgggcttgcaaagaagctccatccagacacaaataaaggtgatgcggatgcagaacgcaagtttcaagaggttcaacgagcttatgagactctaaaggatgaacaaaaaagatcattatatgatcaggttggccctgatcagtatgagaaaactgcttctggcggaggcggaactggcttcgagggtggttttggaaatccatttgaggatatttttggtggtggcggtggcggtggtggaatgaatgatttctttaggaacatttttggggatagggactttagaggacgagatgttaaggttgcactcgaactatcatttatggaagcagttcaagggtgcagcaaaacggtcaccttccaaacgtctgtaacatgtgaaatctgtggtggagccggtgtgcctcctggaaccacacctgaaacatgtctatcttgcaggggttcaggatttatattcatgcaaaccgggcccttcaggatgcaatcaacctgcacaaaatgtggtggttctgggaaaactgtgaaggaattctgcaaggcatgcagaggaaacaaagttgtgcctggaaggaaatcagtccgccttgacatactgcctggtttggataatgaggataccataaaggtggttcgatcaggtggagaagacccagatggccgtccaggtgatctttatgtgaccctcgaggttcgtgaggatcctgttttccgaagagagaaaggtgatattcatgttgatgctgtcctgaatgtgactcagcgctatacatcaacttacaaaagaaagataacgtgtcactgcta

SEQ ID NO: 18229 - DNA, 1829 bp, Zea Mays
ctttgattctataagagcatggcagcttgtaacatggatgacagaaatctggaaaatctatgactgagatgactactgctgagagggaacttgatgctaacacaaattatgactggaatagaatacaagaaagtggaaaagacgctgagcttctgtttggacccggctatactggtcttgcgaatcttgggaatagttgctatatggcttcaataatgcaagtcatgttttcaatccatcctttcatatcaaggtacttcgagaaacagagtttgaaagctgcatttgcaactgcacccgctgatccaacagtagacctaaacatgcaactgacaaaactagcgcatggtttgctctctggtaaatattctgctccagcaaaggaggggcaagaagggatacgttctcgcatgtttaagtcagttatcactgcgaaccatcctgaattttcaagcatgagacaacaggatgtccttgaattcttccttcaccttattgacagagttgagaaggcaaaccctggagaccgtgagctaaatcctttttccggtttcaagtttgttgttgaagagagggttcagtgcccttctgggaaggtttcttacaacaaacgatctgacaacgttctttctttgagcataccactgcatgaggcaactaataaagagcagctagaagcttttaatgagaagaaagctgcaatgaacttggatggaaaagaagtgtctaatgaggatattgtcaggcctagagtcccattggaggcatgcttgtcaagtttttcagggccagaggagattccagatttttatagcactgcattaaattcaaagactaccgtcactaactggtttcactacctttcctgattaccttgtgctgcacatgcgtaagtttgtaatggaaacaggatgggtgccaaagaaactcgatgtttatatagatgtgccagatacaattgatatcacacatatgcgcagcaaaggattacagcctggggaagagctgctacctgaaggaggttctggtgacgacagtgccgagcctgctaatcctgttgccagtgaggatattgtaacccagcttgcaagcatgggcttcaactaccttcattgtcagaaagctgctattaacacatcaaacacaggagttgaggaagcgatgaattggctcctctcgcacatggatgatccagatataaacgacccaatatcaaaagattcacgtgcttatgagccatctgttgacgaagcaagtgttcaaactctcatctcctttggattccaggaagacattgccataaaggccctgaaagcttctggtggtaatatcgagaaagctacagactggattttcagccaccccgaagcatctacctcagcatctgctgattcttccactagcaatgtaaatgctgatgacacatatattccagatggaagtggcagatacaagctgatggcgttcgtgagccatatgggcacctctacccactgcgggcactacgtagctcatgtcctcaaagacgggaggtggacaatctttaacgacagcaaggtcgcagtatctgttgacctgcccaaggaaatgggctacctctatttctttcagaggattagcaactaggcacgtcacacacaatggaaagaatggtgggctgttaggatactgtcttgctgattttaaagcgaacgtttactcacatcctgccatgctggttactgaatggtcaaccgggatatttgcttttttgttccttgagacctcgattggcatcttccggttacataagaacaaaatcgcaatgaaagaaagtagacaataagaca

SEQ ID NO: 18230 - DNA, 742 bp, Zea Mays
atttttcagaaacgattttcaacaaacatggcttcccattttcatttccagccccacctgccgtacagggtatgtttgcagcacatatcttggttcagcacccagctccatcgacattataagaatgtacaatttgagcagtgatatggtcagcaggcgccaattagtgccctatgttcaatgcaaagttctgggaataccccttctgttgtcaatagtagcgctgaaggggagatgatagaacctgctgtagatgaggatgcacaatcatctttggcacagcaagtggacacagcagtgccagatgagaaggcacagttatcaacagatcagccaagtgatatggaggtctcggagccttctttggatgagcatcttgttcaagatgagaattcttcattaggtggcaaagacagcgacggtaccttaaatgcttcaaaacctcctaaacctggaaaagcaccgtcaccagaaaagatgaaatattggaaggaacatggctttagtagtttgattgttgctgcccctggccacgaagtagagcgtcttgttgctgatatgcttccacttttgtcttattcagccccatttgctatatatcaccagcatctcgagcctcttgcaaagtgcatgcacagcttgcagttatcaaagatggctattggattgcagctttctgaaccctggctgcgtgaataccagatatagcaacttgaaggactattgtcttcgagccttggag

SEQ ID NO: 18231 - DNA, 2783 bp, Zea Mays
cgggaagctgctgcagccggtagactattgattggaacttttaggattgggctgacatgttactaaggatgtatgtaagatggggagagaagcagcgttataagacacgagtagttgagaaatcacctggtgaacaggccggtataaaatcagcaactgttgaactagaggggagatatgcttatggctatctctctggcgagaaagggacacacaggattgttcgtcaatcaccatttaatgctaaagggcttcggcagacaagctttgctggtgttgaggttatgcctcttctaccagaggaatccatggctgtggacatacctgaagaggacctggagataagcttcacaagagctggaggtaaaggaggccagaacgtgaacaaggtggaaacggctgttcgcatggttcatattccaactggaattgcagttcgctgctcagaggagaggagccagctggccaacaaaataaaggccctcagccggctcaaagcgaagctgctggtgatcgccctggagcagcgtgcatcagaaatcaagcagatccgtggagacattgtgaaggcagagtgggggcagcagatacgcaactacgtcttccacccctacaagctcgtcaaggatgtcaggacagggagtaacttgttggttgctgaggatgatgcttttaaccgtaaccgcagggaatgcgctaggcggcttatcagcttccataccctggctctggaaagcaagcagaaggcggtgtacaggaagtactccaagcccaagctcggcttcgtcgcgcttcaatcccctgacaagaagctattgtcaggaggaatgttctattggtacaaggatcctattgttggaccaggattttccaagatgcattttatcttcagatgcatttttagaagtccggttccacaagttaaccgaaaatcttcatgggtgatagctgtgtcagattcttccgcgcatagggcaagtaatgcaagtgatagctgtgtcaatttacccccatttttttgggcatcacttgtctcaaatgaagtccattggaggttcgcaatttatgttccgtggcatcgcacgggcacctacctattatatgatgcagctgcaccaccggagaaggcaaccaaacgccccctacgtgactcttgcccgtatccgcgcatgcatgcaaaaagctaccgcaaatacgtgcttaggagtttggacctgggacctccatctcagcatcggtggagtggagctgaattctgggaagcctcctcaccagcgaagaaggttactgggaaggggtcctcagagtgtatagctgcaatcatgggagccgcaagccgcctggtgacatacgtgcctttgggctttggcctacgatcttgcaatataaaagctactgagctgaggccccgcttcactcaacactcaagcagtcaagtagaacctccagctccccagcccccaggtggtcaagactcaagagacagagagagcatggccgctgctcccatggtggtgccgcgcgtgaagctgggctcccaggggctggaggtctcggcgcagggcctcggctgcatgggcatgtccgcctactacggccctcccaagccggagccggacatgatcgcgctcatccaccacgccgtcgccgccggcgtcaccctcctcgacacctccgacgtgtacggcccccacaccaacgagctcctcctcggcagggcgctccgggcggcaggcggggtgcgggagaaggtgcagctggcgaccaagttcggcatacgcgcggacgccgacgacggcgcctgggagatccgcggcgatcccgcgtacgtgcgcgcggcgtgcgagggcagcctccagcgcctcggcgtcggctgcatcgacctctactaccagcaccgcatcgacaacagggtgcccatcgaggtcacggtaggtgaactgaagaaattagttgcggagggcaagatcaaatacatcggcctgtccgaggcgtcggcgtcgacgatcaggagagcgcacgcagttcacccaatctccgctgtccagctggagtggtcgctctggtcaagggatgttgaagctgacataatcccgacctgcagggagcttggcattgggatagtagcctacagtccactgggcagagggttcttgtcgagtggtcctacgatggtcgacaagttgtccgatcaagatttccgcaaggagctgcccagattccagccggagaacctggagaagaacgccgtgatattcgagagagtcaacgcgatggcggcgaggaaggggtgcacgccgtcgcagctggcgttggcctgggtacaccaccagggagccgacgtgtgccccatacccgggacgacgaaggtcgagaacttcaacagcaacgtggcggcgctttcggtggagctcacgcctcaggacatggctgagctcgagtcttacgcgtcggcgggcgtccagggcgatcgctaccatgacttcctcaacacttggaaggattcagagacacctcccctgtcgtcctggaaggctgatgaataacctgcggcttaattcacacgcggtgttgtcccattgaaagatggatgaggtgaccagatggaatgaataagagccaataaaatttcttcgcacaatgtaattttagcttgcttgctaaatcattctccaatcttttaaaactatataactctcaaatgagatgttcatcagccagcaaatgcctgaatattcttggtggtgaccgacgacaacggctaagcactcaaatcgatcaaa

SEQ ID NO: 18232 - DNA, 2322 bp, Zea Mays
agcgcggtggggcctggcctgcttttgccccagatggatgtgaggaggggttagacttgcatggtatgtgaatcggtcgatggtgggctcagcattcagtgatgagaggagattgaaaattaacctaataaataggtgttgtttccttgacaaggggggaagaaagctttagtagcattccagctttaattggtgctggtcaactgacaaaggatggagctcttggcactgcaaatgcacctattcacatggtcacagcagagacaggtcaatttaaggatcagctttggcgtaccttccgaagcattgcactaactttccttcttatttcgggcatcggtgctctcatcgaggatagaggaatcagcaaaggtcttggtctgaatgaagaggttcaaccaagcatagagtctactacaaaattcagtgatgtaaagggtgttgatgaagcaaaatctgaacttgaagaaatagttcattatcttcgagatcccaagcgcttcacacgtcttggtggaaaacttccgaaaggagtcttgcttgttggtcctcctggcactgggaaaaccatgctagctagggctattgctggtgaagctggtgttcctttcttctcttgcagtggaagcgagtttgaggaaatgtttgtgggtgttggagctcggagagtgcgagacctttttgctgcagcaaaaaaacgatctccttgcataatatttattgatgaaatagatgcaattggtgggagccggaatcctaaggatcaacagtatatgaagatgaccttgaaccagctgcttgtcgagttggatggttttaagcagaaccaggggataattgtcattgctgcaaccaactttcctgagtcactagataaagccctaatcagacctgggcgttttgaccgccatattgttgttcccaacccagatgttgaaggtcgacgtcaaatcctagaatcccatatgtcaaagatcttgaaaggtgatgatgtggacttaatgatcattgccagaggaacacccggattctccggtgcagaccttgctaacttggtaaatgttgctgcacttaaggctgccatggatggcgcaaaatctgtcacaatgaatgatcttgagtatgcaaaggaccgaatcatgatgggtagtgagcggaagtcggcagttatctctgatgaatgcaggaagctgacagcataccatgagggtgggcatgcccttgttgccatccacacagaaggagctcaccctgtccacaaggctaccatcgtacccaggggggtggccctaggaatggtggcccaactccctgacaaagaccagactagtgtgtcaaggaaacagatgctagcgaaactggatgtctgcatgggaggccgcgtggcagaagagcttatatttggggatactgaggtgacctccggtgcgtcgtcagacttccagcaagcaactgcaatggcaagagcgatggttaccaagtatggcatgagcaagcatgttggccttgtctcttataactacgaggacgatggaaagagcgtgagctcagaaaccaggcttgtgattgagcaggaggtgaagaatttcctagagaacgcgtataataatgcgaagaccatccttacgaaacacaataaagagctacatgctctggccaacgcacttcttgagcacgagaccctcacaggagcccagataacgaacatattggcccaggtacgtaacaaacagcaacaagaacatactgtcgaagcaccacagagggccccagcttccccggcatcaccagctgcggcggcagcagctgcagccgccgcggcagcacagcaggcggcagccaaagctaagggagtggctggtatgggatcttagcacatggagcgccccaccggatgtatatttaaccaaacaagcaaagctgttccagcgattgacagttgatgaaggtcatcggatgtattgtatgctaaactgctgcagcaatagaacacactgattgcgtggaagttactcttccatgtgcctcgagtgcaaagcagagacaaaaaaactgtacgtgttgtagacttgtagctggtgcttgaatcagttttgtacccacatcgaaaacaattcctgttgtttacaccccgaaaaattgttagatttcgatctggctgccttgtgtaccctaacagagcgtaaattgtaacacatcctgaataagatgtgtcccgtgtgcttaataccatgtggggttagctgccgaggcgattcatcaacccctctgctcttttgttgtatgtcatgtgtcgacaagctaataagatctatcttttct

SEQ ID NO: 18233 - DNA, 2811 bp, Zea Mays
attttgcgacatggtatggttattctactcatggaagatctacagggaagaaattgaggtagcatataactgccgcaagggaaaatatggtgtagcagatgaggatataatcttatatggtcaatgtgtttgaattggtccaaccattgatatttcttcgcggttgctagacttgagagtcgcagttttgcatagtcctatattctatctgcactaagagtaatatatacagccaagcggacgtttggtttaacatttacaaggtatgtttggtccttttgttttttggaattaatggttgtccgatgcttgtcattcatatgagttctaatatcatgcccccttaaagtactcatcatcaaaagtttccatgtgaatgttttaaatgtagatttaaagggttgaaagacatcaaacagttattcaaacatgatcttaagtgtcgtgaaagactacaagtgaggttcaacttggcaaattgtttttctagtaactaaggagcaacaatgctatgtattttagcttgacttatatatctaagtacttacatttttggaatcgggcaaacagtgatagtttgaatcacatgttttgccaaaaggaattattagaactgttcaaaagttaggaaaaaatacatatttatgctttcttatgcacgggtaaattgctctgttcatatataaaaaaaataattgtagtattattgcttatattgattttaaatgatgaccttattagatgtgccatcgagaccacatatattagcattttgtaactaaatacaatgcatgaatatatatagatagcctttacatcgtgctacatgcttcctagaaataaggaaccattacaacatatatatttttgatgatgtacaacttcgtcatcggatataccgttccttcttttttacatacattttgataagaatgtcaaaatgttaaaaaaatagcgcgcgcatggcgcgcgttagacactagtagatttcagaactatcatgaagcgcgtgctcgctggttgttagttgttacagagcaacagcccagggaggccaagatgctacttagctactaaaaccaactgacaacaagtgcacagcccagtgggccgctaagctgcaagaaaaccctcgcccctcgttctggattgagattctctgcagaggctgcgatgttgggccgtcctgccctgcccggtgggtatatgtaagctcagaccgccaccggaaccttctcgagcccgcggccgcacacctccgcccgaagccgccagtcggactacgaacggcggcggcgcctcggctcccctgatctccctcaccggaatggacggccaggctccgccgcttctcgacgccgtcgtgctcgagccccttgcagttggcgacgagctccatccgcggcgtcctgtcgaggtggaggacgctccggccgccgctccgccctccggtatggacggccaggttccacctctctacaacgtcacgcgggatcctctgaccgtatccgacgagctgcagcccacgggcgaggtggtggatgacgccctactcgtcgcgcccgatatcgtcaagggcgaggtgatggaggacgacatcctacccgtcgcaaccgacatcatcaacgacgccgcctcggagtgccccgaggctggcagtgatggcgtcgtgctcaccgacgagctccgcaatcgcatcgtcaagcaggtggagtactatttcagcgatgagaaccttcctacggacgagttcctgctgaattatgtgaagaagaacaataagggctttgttcctattgagatcatcgcatcatttaggagaatgaagaaactcgttcaagacctctcagtaattgaagctgcactcaggacatcatcaaagctggttgtaagttcaaatgggaaacgggtcaggaggttacatccattgccacacaaagaattgaaagattcaaagaaaagcactgttttggtcgaaaatctacctccagatttctcaatggagagtattcaggaaaaattcgcaacagtgggcaaagttgtgaacataacaattaatgatccagaatcagtgaaagaattttcaactgctaagaagcctgacttcaatttaagttttaaggctcatgtacttgttgaatatgaagcagtggaggctgctgagaaggctgttactgccctaagtgatgagagcaactggagaactgggatgaaagtcaggcttctgtctaaacaaagtgtaatgggaccaggaaagtataaaaaaccttctaaagaaaatcaagatgcagtttccaaaatgattgatcagaatcaacattcaaaagaagaccagcttaaaaccttggaaaagatctccggtgctgatgcagtggggattaccaaggacagagataatttgaaacctgtttttatcactgagactgagcaccaagatcagaagccaaatgctagaggacgaaaaggatggtacaaaggtcaaggtcagatgcagcaaaatgcaaacaaacaaggcagttgtggttccgagtcattaaacaagcctatttctggaccgaggatgccagatggaacaaggggcttcacactgggacgtggtagatctcttccactacagaagtctgagaaggctgaagagtagagctaccaaaaaaggcctgttaagaaccttatccaaagaagctgggaatgagatcctacgtcgttaagctggggtcaccggcgcactgagatcaacgtcaagcacagtaactgcatggaccacaataactgcacaacatggacatagtcggcataatttatcgtctcggt

SEQ ID NO: 18234 - DNA, 1114 bp, Zea Mays
ttttgagattaggtacttaaaaagagagattgagagtgcagaatattcattcccagcctggttttcaggtggtgcgaaatcactgattcgtagaattcttgacccaaatccagagacacgaatcaggatagaagagatcagaagtgatgaatggtttcagaaaaattatgaacctatcaaagaaatagaaaatgaggaagtcaatctcgatgatgtcaatgcagcttttgatgatcctgaggacgataatgaggatgcttttgaagatgaaacaggtcctctaacacttaatgcattcgacctaatcattctttcgcaaggattgaatcttgcagcgctctttgaccgcagacaggactgtgacaagcttcaaaatagattcttatcacgcaatccagcaaaggttatcttgtcaagcatggaggttgttgcgcaatcaatgggatttaagacacacattcgcaattataagatgagggtggaaggtctaaatgccgacaagactagccatctctcagttatggttgaagttttcgaagttgctccatcaatcttcatggtagaactacaaagagcagcaggagatacttcagagtataacacgttcgtaaataactactgcagcaaattagatgatatcatctggaaatttccaactgagaagggaaaatcgaggataccccggttatcaaagtctcattcataatctagtgctgtgtgttatcaattactatggacttaagtggatatatttgcagagtgtatcgcaattggattatgatattctaagtgtagctcttcgagtagtatatgtttgtatattcagagtccccatgtacaaagaggccgttttaattgaggtttccgtacctcgattccctgtgcaaagttttcatcgatgttttagactacacatctgtatattttgtcgagagcatcagtttcttagacaccacctatgtatcatgcgtttgttgccatctagtgtcattttgtaagatctaacttgtgatatacttggattgagtggtatggttgaaaagagtgaaagtcctttaaaaatcttagtgaaaaatacaaacttacacaaagttgatagaacatttttgagtta

SEQ ID NO: 18235 - DNA, 4238 bp, Zea Mays
gtttttgagtaatccgacgcgagcacgcacgctgcctgtactactactcgtctgtctagtccctccgcagtccgcccacgccccccgtctccctccttcccattccccgcaaaccaagcgacgacgcggcccacgccatgagctgatgaacattgggccagtcgctgctccagtcctctgctcttccttccgcccacgccagcgccaacgccagcgcctcggggccgtgcgggggctagggtttggattcgtgggtggagtccgaggctagatccagcaggaggaggggaggggaggggaagggttgtgggtccagccggcggggatggccgccaccgccggggcgtcggacgacggcggtagcgtgggcggcggcgggggcggcgagcggatgaagctgctgtgcagcctgggcgggcgcatcctcccgcgcccgggggacggcacgctgcggtatgcaggcggggacacccggatcgtgtccgtgccgcgcggggtatcgctgccggacctcctcgggcggctcgccgacgcgtacggcggcgccactggcccgcacttcgccgtcaagtaccagctccctgacgaagggctcgacgcgctcatctccgtgtcctcgccggaggatctcgacaacatggtcgaggagtacgacaagctcagcggcgccagcccgaagctgagggtgttcatcttccccatcctggatgcggcgggcggcagcggcgccgcaggcggggaggacttggagaccgggaactttgactcgggccttcggtatctggaggccgtgaacggcattgtgcgcaaggacagcatcgcgagcctctcctccacgcagtgctctgacggggggctcccccctccggcgccatcaggtggcggcggccctggatctccagctgcgctctcccccacatccactagctcaaatgatgctgcgagatcgaacatcactggagccggggcggcgcctccgccccttgttgacgtcttcagtaatgctgctcctgctcctgtacatgtgaagccacaggagattggtgctgaagggagggctccccaggcgaatccacatccacatccagaggcagctacaaacacccatccggaggcagcgaggtacaggcaaccactatcgcagctgccaccactgcctcctgtgttcatgaacgatcacagagatgccattcagggtctgaatcagcagctgccaggtaacggagcaagattcgacgactgccacatgtgcttgaaggcattgcctcacgcccactctgatccagtggtcaatgagtatggcaatgaggtgcatggaggggctgctccagagcctgggcctgtgtttatgagcctgcggcctgaagatgtggcaaggatgatgataccggagaggggtgttcagccacccatgggggcttacggatatacgcatatgcatccagtgcctcaggagaggatgtatgtgcccaagatggaaggggttacaaactcagtattcattgatccaactggcttgcatcagcatgtgtatgtgcagcagcagcagcagcagcagcaaatgccgccacaacagttgccatctacctatgggtttagccatattcctgtgatttctagcgagaaggacagagtagtttctccaagttctgcccacaatgatgttgcaaactctcatcatcaatttatgcagcagtcgcagcagcagttaccttctggccatgggatgcctcagtatccagtgaagcctactagtcccagtaacccgcttgctggtgaaggtagtgtaagtggcaattcaaggcataatgaggatggacaggtgtatcgtgacaatatgcctccggttgcacctgtggctgtgccaacatacatggcaaatgtggacaggatgatggattcactccgtatgagccccagcgaagtttctggctctactgaacaaaggaaacatgcaatgtctcctgacagtggcttaccccagaatgcagtgccagattactctcaggggcatccagagaatagtatcagtacctggccagatacacgagcaaatgatgttcatccaagcaacaccaatactttttttgatgttagtgaaccaaaggtattgcttcaaactgaatctgcgccaccaccttctgttgccagctcttatctgcataatgtccagcatgttaatatgagtcatatgccacatatggtgagcattgggggaccctattctagctatgttgttgctacagtcggacctggtggattgcctcaatcaacttatggtattgatatgatctatccaaatgccactgttaatccagtgactgagagaagagatgtcccgcctgaagtttatcacaaggaagctccacatgaagtcgtagctcctccaaacacagttcagttgccgacagcagcattggcaaaccatgctacaaatgtggatcaagcagctgcacatgcactgccaccaagacctaagagggtagcaagcagagagaacatcagcccaaaggatccgcacccacacaactctttgttgaactgcaaagggccagatctgaatattccagctgaggatgtttctctccagaaacagtcagatcacaaaggtgatgacatctctaacccagatttactgagtatggatgatgggttagctacatctaaagctcagtcatctgagcctcaacctcctctggtaaatgaaggagttggggcaattaccaataaagtagaaggtgaagtccaccccaacgaggtttccaagagcaggccagcagattggatttcaggatttccagcttcagatggacgtctgcagattataaagaacaatgaccttgaagagctccaagagcttggttctggaacttttggaactgtctatcatgcggtatgacttctggaatgaagcatctaaacttgctgatctgcaccacccaaatgttgtcgcgttttatggtgttgttcttgatggacctgggggatccattgccacagttacagaatatatggtcaatggttcacttaggacagctttgctaaagaatgccaaaaccctcgatcgacgcaagagattaattattgccatggatacagcctttggaatggaatacttgcatagcaaaaacattgtgcactttgacttgaaaagtgacaatttgcttgttaatttaagggaccctcagcgtccaatatgcaaggttggtgatcttgggctttcaaaagtgaagtgtcagaccctcatctctggaggtgtccgaggaacacttccatggatggccccagaacttctgaatggtagcagcagcttggtctcagaaaaggttgatgtattctcttttgggattgttctctgggaactgctaacaggagaagagccatatgcagatttacattatggtgttataataggtggcattgtgagcaacactctacggccgccagtgcccgactcctgcgaccccgagtggaggtcactgatggagcaatgctggtcaacagaaccatctgagcggccaaacttcacagaggttgtgaataggctgcgctccatggcggcatcccagaaggtacaacaacactaagggaccatcggcacgcagaagttgtaccagggcagcagtcagtcaaacttgcaggttacatccatgggccgccaattcacgccatccgccatatatgcctaggatctgttcataacccttcatttgttcgtatattgtaatcaaaagttacccgccgtgtgtctacaacgtgtcgtcgcaatggacgcagcaggtgcctgcctattcattcattcataccgttttggtcgtcgagaggtgcgttcaataagttactagtccagtgtccgttataggggagtccggtagtgtccgttataggggagtccggtattattattattattgtttcatcttcttcttcgccctttctctgggtaataattgggttacttggaaactgttgatcagtgggtcagttagaatgtgaactggttgttgctgggtaagtatgtggtttgttggtatattgagtctggggacagagagtgaggtcctgatctgcttgtaacagtacctgctttggttttgtgattgctatatactgaaacccaaatccctctgttgctattctaaattctgagttgtttggtgcatgtcgtggtgggagcattttggtgtctccatcctccactccagatgtgtgtgcttctttattgcatcagtttggcg

SEQ ID NO: 18236 - DNA, 3064 bp, Zea Mays
gcagtactgcagcggatcccgatcccatggcacacggtcgtttgaggcattgcgagtcccgagtcgactctctcccgtttcccggccgtccccttcaccaatccaatccaactccaattcgtcctccggtcctccccctcgaggcctacgcacaatagattcgatctcgagtcctcgaatcctgccttttcctctggtcaggaaagcatgagcttgatttccggcgcttctcgccgtcgagctcgaaccagaagataagaagaatccgctaggggcgagccccatagaagatggccccgcacccgcaggaggacaaatcagatcggcacagcagcggcgccggtgcgtcgagggagcaggaacggcggccgtccaaggcatggggaatcctcatcttcggcctcatcggcgtcaccaccgccagtttcgctattactcaagttcgcaaaagcatggactggttctacactcagttgaataaagtgcagtcaacatcatcttggacttggaggtatacaagtaataactcaagtcgtggaagcttcagtgaggaagctaagaaaagatattatcagcgaatgcagcaggaatatgaagaggaacaagagagagttcaaagaataaggcatatgcagagtgtcttcaacagagagaggaataaatttggacgaggttatgaaagctggagggagaatggccctcctcgtggctacaattacatccctcgggatgattggtattggcagaccgatacttctcactcagaacataaaaataggcggacgtacacaccggcaggacctagggtttatcctatgtcgcatcactatgcagttctaggtcttgacagatcacgagcgacaccatatacagatgcagaagtgaagactgcttttagaacaaaagcgatggaagtgcatcctgaccaaaatcaaaatgatagagatgctgcagaagagaagttcaaggaggttgtcaagtcttacgaagcaattaaatcggagagaaaaaacggtgaagggaaggatgtggttgcaaaggccaagactggctctgggaagacctttgcctatcttctcccacttctgcacgagctactgaagttgtcctcagaaggacgtatacgaaaacctgcaccaaatgctttcatcctggttcctactcgagatttatgccaccaggtgtataatgaggcattatctctccttgagctctgtacatgcaaattgagggttgtgcaagttaccgcgagcatgtcggataaggatattactgttgcattgtctggcccccctaacattctcgtatcaactccagcttgtgttgcaacatgcatatcaaagggaattattcgtggacctgcagttaaagagtcactttcaatgatgattcttgatgaggctgacctacttctatcctaccgctgcgaagttgacttgaaagctctcatcccacatatcccgagaagctgtcagtctattctgatgtctgcaacttcaagctctgatgttgacaagttgacaaaactacttctgcataacccatttgttctaactctttcggaggttggtcaagcaaaggatgatgtgatccccaaaaatgttcagcagttttggatctcctgtgatgccaaggataaaatacttcatatccttgcacttctaaagtttgagctcattcagaagaaagttcttatatttgtaaactcaattgatatggctttcagattacgactgatcttggaaaagtttgggataagatctgcagttttgaatgctgagttgccacaaaattcccgactacatattatagaggcattcaacgcaaggctatttgattatctaatagcaacggatgacactaaaacaaaggagaagcaaaccaatgaggaaaataaaaaagaggcaacattgtcccgcaaacggaagaagcaaaccaataaggaaaaccagaaagagcaaaaggtgtcccgcaaacatttgcaacagactttagatgctgaatttggagttgtcagaggaattgacttcaaaaatgtatttacagtagtcaattttgacatgcctctggatgctactgggtatgttcacagaattgggcgaacaggtagagcaaataagactggtgcatccatatcgcttgtttcaccaaaggaggatagtacttttaaagagattgagcatatgttgcaagatgtcgaaaagaaagatatggactgcatttcacctttcccattacttacgaaagatgctgttgaatctctacggtatagggctcaggatgttgcaaggagtgtgacaacacgtgatgtacaggaagcgcgtcgacaagacataaagaatgaaatcctcaattctgagaaattgaagtctcattttgaagagaatccaacggaccttgatttgctcaaacacgataagttgctatgcaacaaggaaattcctgcatacctgcgtgatgtccctgactacctaattgatccgaaaacaaaagaagccagcaatgctgtcaagctttccagggctgctatgcatatcgacaagccccaaaggcggaaaaggcaggggtttaagggaggatcagggaaaagcagagaccctctcaagacattctctgctgagggcaaacgagggagacggaggaaagaaagggagggagaaccagatagaagaaagaagagtaagaaggcgtgaagttgatttttcaagcagtttgctatcaagctcgcccaattttgtaggctttgtttgaagcaacttgacaaagtgctgtatcggtgacactcgtaggtcgtagctaaggagtatgtttttattgcctgatggcaactcttaatttttaaagtgtactcgcttccccccttttcctgtactgttaggaagcactaatgacgtgaaatttcattcaccaaatcaggggtatttaaagctaataatgttaagtccccccaggtggaacattcacacaaaactcgcccattccccgtggacctgtcccagatgaggccgcgcacaatgttccatttcttcacctatcaattttagatttactaaaaccatattca

SEQ ID NO: 18237 - DNA, 3261 bp, Zea Mays
ttcatcgtcctcgtagacgcagactcgtccatgtttctctgaaacgaaccaaacagacaccgtagatccgagcgctcctccgtcctcccgggccacggcgatcatcaccgccgctgcgccacccatatccacagcagagccgctcgccctatagcttcacctcggccgcgcgtggggcggccatggaggactacccggaggagctgcggacgccgccggtgtcgctagtgtccatcgtggggtgcccagagcttcacccctcgatctcgacggcactcagctcccagcagcctcccatgaacacactggccctcccggacttcgccaaggcctctattctggcccgcagcgttaagccccgcgaccctctcgcaccgccgcaaccccccgcgggaatcctcaagaaggactggctacttaagcaccgcacccgcgtcccggccgccgtcgccgcgctgttccgtgccgaccaggtctccggcgaccccgcccagtggctccaggcctgctccgatctcgaaaacctcaagtctgcaattcaggggaaaaacactaaatcagtggtggtccttgtgcaggctcaagctaatgatgagctgagtgaggatgtaattgttgccctgagaaaacgtgctgaaatcgattccaagcacttggttgtgctagttgagcacgatgaagcagaatggaacagatctctgaacaaattgaagaatgtctttgtggagttatgtgcagcattctataaagaggaagggcgaaggataaaggctcgcattgagaaaaagaactttgcttctgttgagctgagcatccggtactgtttcaaggttgctatttatgcggagttcagaagggattggccagaagcattgaagttctatgaggaaggtgttcgtgttttgcgtgagatgattggaacttcgacaaggttgcctccaacccaacgcctggttgagataaaagcagttgccgagcaatttcactttaagatatcaaccttgctacttcatgccgggaaagtggtagaagcaatcacatggttccgtaagcatatcaaaagctatgaacgggttgttggaacaccagaagttgcttttcttcactgggaatggtttagcaggcagttccttgtctttggtgagctgatcgaaacaacatccacaactattccagatacactatctcctcgatttggcactgcagacaacacattgactgagtgggaatttcagccagcatactactatcagttagcggcaacttacttgagggagaagaggtatgccatcgaatgctcgtcatcaatggctaaccttacaacagaagttaatggagtacctgagtcagtaatgccttctgtatatgttggccaatatgtgcgcttgtttgagcaaggagatacagttagtctactaccgaaagagtggaaagctagaatgtttgtctgtgaaggcgacaataagcaaacaccttgtgatttgctgccatgctgaaagccctgcttccatggaagacttcccattatggaaatttgagaaccaagtggagacactgcccacaaaggacaccactcttgccttctctggacagaaacttattcaagttgacgagccagatgctcaagttgaccttgtcttaaattctgctggccctgctttagttggagagttatttactttaccagtgatcatagagtcaaaaggacatgcagtccattctggtgaactgaaaattaacctcattgatgctagaggtggtggtctgttgttgagtccgagggaagcagaagattctgaaagtcatcatgttgaacttcttggtgtctcaactgtgtctgaggataaagagtcaaaggaagaggctgatagcataagaaagatccagtattcatttggggttgtatctgttcccacattgagtgtgggtgattcctggtcatgcaaattagaaatcaaatggcatcgagcaaaatcagtcatgctttatgtttcacttggttactccctaggctcaagtgaagaagaagcattgcaccggcttaacgtccatagaagcttgcaaattgaagggcagatccccttattagttagtcatcagtttttgagatcatttaggcgagaaccgttgttgctatcagggatcaggtccttaggaagtgatgataaaaaatgttctcttgctatgaatgagtctaacatgctaattgtgactgcaagaaactgcactgaagtgcctttgtgtttgcattcaatgaccattcaacctgatggtgattcagagcagctgtgttcagtgcaacagatcagtggaatttccaatcgtcatgcaattgttgctcctagggaggaatataaaggaatattttcggtcaatccacgggctatcagtacaaacttcagactaggtgaaatttgcctgaattggtcaagagattcaagcctcggtgaggatcaagataggcttattatcatgaaagtacagttacctgaggtcaacattgaggagccgccgcttgttgtgggcatggagtgccctccctatgcaatcctcggcatccctttcactatctatgtgaagattcacaattcaacgtctttgcttcaggaaatcaagtactcccttgttgattctcagaatttcgttttttctggtgctcacaatcatgctgctttcattctaccgaaatcagagcacactgttagtcataagtttgtaccgcttggttctggctctcagcagttgccaaggatcacagtaacttcagtgcggtattctgctgcattgactccttcagcctcagcagcgactgtctttgtgtatcccagtgagcctaaattcaacttggaaactagccattcaacatccgatgaggtcgtgagttgagacctaagcagcctgaagtctcccctctcctgacacttagctcgacccgggcttcatgtgaggtaaggtatgctactggaaagaccaccagcttgacatttcatgttgattgttgaagaaacgaatcagattcctgtcggcgagaaggtcgctgtgcaaaagttttggcattatatttcgaggtttcgattttgtagcgcttctcgattaaccacatatgtgtaacttatgattacttcattgtttttggttcaatggtgcaacatacacaggaagataggctcttgtaaattaccatcccaccagtaaagtgggggaacaaaccagccccatgtcagtttttactctttgatgcttgccaactcgtcaatttgt

SEQ ID NO: 18238 - DNA, 3869 bp, Zea Mays
atatatgccttcgttcctcgatcgtcagccgccgccagttcctttgccggttcgcgcaccacgcaacgcaagtgctcttcccttcttctctctcggttctcgccttctcggccctcctcctctattcttccctctcgtccacggccacaggctagccggccttgagcgcctgtgacggcgcaggttctggggttgcaacacgcccctccgcccttccggcgcatctgctgaattccactctcctcttgcccgccggcgtcgcctcttttctttgctatcgtcggcctcggaccccaaagacgacaacagcaggagggcagcgcacctgtgaaagcggcgcctctcttgccgttaaatttccgcgtcgcctggcttctcttccgcactctgctttcaagcccctctgccatgaccgtgcccaccaaagacgacagccaaagcggcacggtggccgacacagtgccattaccgacataccgttcgttagcagcgccggtgaggaagcctgtcgacaagttcgcgctcctcccggccttcctcaaggttagagggcttgtgaaggagcacatcgactcatttaactactttgtcaacaaaggaatcaagaagatcgttgaggcaaacaaccgaattgaagcgcgcaacgatccatccatttaccttaggtaccttggtgtgcatgttggcatgccctcggtacatgtagagtataacattgaaaatatcacaccacatttttgccgccttactgaccgcacttactctgctcccataaaagttcatatcgaatacactgtcggaaagcagcatgaagtgagaagaaagaataactttatcattggctacatgcctattatgctaagaagccatgcctgtattctgtatgaaaaggatgaagctgaactagcaaaatatggtgagtgccctcttgatcctggcggctactttgttgtcaaaggaacagagaaggtcattctaattcaagaacagctagcaaagaatcgtattattgttgacactgatagcaaaggaagggtgatcgcatctgttaccagtagcacgcatgcaataaaaagcaagacggtgatttttatggataaggggaagatttatttacagctgaatcagttcaacaagccaattcctattatagtggtgatgaaagcgatgggaatggaaagtgatcaggagactgtacaaatggttggcagggacccaagatacggagatctcttatttccatctattcaggaatgtgcttcagagagaatatatacacgccagcgagccctgcagtacatggatgagaaggtgacgtatcctggtgccacaaatcagaaggaaggtcggtcatactcaatcctccgtgatgtgtttattgcccatgtgccggttaaaaatgggaacctacgaccaaagtgtatatacactgccttaatgttaaggcgcatgatggacgcaatcgtaaattctgacacctttgatgataaggattatgttggaaacaagagatttgagttgtctggccaactaatatcccttctttttgaggacctattcaaaacaatgaattcccaagctgttgagcgcatgaataaaaatagtgacaagactcactctagtcctttggattttagccagttgataatgcaagattccattacctttggtctggaaagggctatttccacaggaaattgggatattaaacgttttaggatgcataggaaaggtgtatctcaggttctttcgaggctatcctacatggcatctttaggctatatgacgcggataacaccccaatttgagaagactcgtaaaacaagtggtccacgtgctttgcagcctagtcagtggggtatgctctgcccatgtgatactcctgaaggagaagcttgtggattgacaaaaaatttagctttgctttctcatgtcacaacagaccaagaggaaggcccactgatatatctgtgttatagtctaggcgtggaggatttattgtctctctcatctgaagaaattcatacgccgggttcatttctggtcatgttcaatggattaatactggggaaacacaaagatcctcagaggcttgttattgatttgaggaatttacgtcgatctaatgtaattggagagtttgtaagcatttttattaatgagaaacagcattgcgttcacattgcctctgatggtggccgtgtttgtcgcccacttataattgctgatatggggatatcaaggatcgatgagactcacatggaaaaactgaggcatggaacttgtggttttgatgatttcctgcgtgatgggttgattgaatatcttgatgttaatgaagaaaacaatgcactgattgcattgtatgagcacatggatcaagatgatgttgaaagaagcagcatcacacacattgaaatagagccattgagtatcttaggggttgtatctggacttattccatatccacaccataaccaatctccacgtaatacttaccagtgtgcaatgggtaagcaagcgatgggaaatattgcatataatcagttgttcagagcagattcactactgtacttactagtgtatgcacaacggccactgctaacgacgaaaactattgagttggtggggtatgataaacttggcgctgggcagaacgccactgttgctgtcatgggatatagtggttatgatattgaagatgcaattgtgatgaacaagtcatcccttgatcgaggatttggccgttgcatagcattgaaaaagtacacagttttaaaggataactatggagatggtgtatccgatatgattgttgaaccccaaagagataatggtgttttgattaaacagaatatgagagcgttggatgaagatggaattgccggacctggtcaaattattcgcaatcatgatatctatgtaaacaagcgaactcccaaaaacacttcaaaaggtattggtagggcattgagagaaagtgactacaaggactcacctgccttgtacaaaggtgttgatggtgagactactgtggtagatcgtgtaatgctgtgctcagatacaaatgataagttatccattaagtgtattattcgtcacactagaaggccagaggttggtgacaaattcagtagcagacatgggcagaaaggtgtctgtggtacgattgttcagcaagaagacttccccttctctgagagaggaatctgtcctgatttaatcatgaatccacatggtttcccaagtcgtatgacaataggtaaaatgattgaacttcttggtggaaaggctggtgtttcttgtggacggtttcactatggcagtgcatttggtgagccaagtggtaatgctgacaaggttgcagacataagctctactctaatcaagcatggtttcagctataatggaaaagatttcttgtactcaggcattcttggtcagcctcttgaggcatacatcttcatgggaccaatctactatcagaaactaaagcacatggttcttgataagatgcatgctcgagctagtggaccgcgggtgttactgacgaggcaaccaactgaggggcgaagccgtgatggaggcttgcgtcttggtgagatggaacgtgattgtctaattgcatatggcgcgagcatgctaatatttgaacgtctactgttatcaagtgatccttatcaagtccaggtttgcagaaaatgtggcttgttaggctactacaatcacaaactgaagacttcatactgttcaatgtgcaagaatggggaaaacatggccaagatgaggctgccatacgcttgcaagcttctattccaggggaaaagtaaagtcaatactatgaggaatttcgtcttagctaataatcc

SEQ ID NO: 18239 - DNA, 111 bp, Zea Mays
cctatgtactagctgcattttatccatacttttatttcacttgctaactacgatgatggtcaccgggatgagtcttcataaccgaggagcaacgacgattcgaaccgatta

SEQ ID NO: 18240 - DNA, 1519 bp, Zea Mays
cgtcaccaatcaccattgcgagcgtggtcctgccttcgagtatccaacaaaggctttagctccatttatgctcgaggattatcggaaagtaacgatgggtcagagaggtgaggaaaagcaatatagctacgaagatattcttaggtgtatgaagaaagtcacaccaatggacttgaagcagactgttcaagtagataaagaccttgtgatccgtgcctattatgctggacatgttataggggctgccatgatttatgcaaaagttggggatgctgctatggtatacactggggattacaatatgacaccagatagacatcttggggccgcacagattgatcgtctgaagttggatgtattgataacagagtccacatatgctaaatctatacgtgactcaaagcctgcccgagagagggagtttttaaaagcggtacataaatgtgtttctggtggaggtaaagttctaattccaacgtttgctctgggaagagctcaggaactatgtatgttactggatgactattgggagaggatgggcttgaaagttcctatttatttttcagctggtttaaccattcaagctaatgtgtactacaaaatgttgattgggtggactagtcaaaagatcaaggacagccatacagtgcataatccatttgacttcaagcatgtttgccactttgaacgttccttcattaacaaccctggtccctgtgtactttttgcaacacctggtatgattactgggggattttcccttgaggcgtttaaaaaatgggcaccatcagagaagaatctggttacacttccaggatattgtgtttctggaaccattggtcataagttgatgtgtgggaaacctacaagggttgattacgaggacactcatattgatgtcagatgtcagggaataatgaatccgtctccattccgacaacccagaaccttaaaatgagtgctacagaaaggttcattacaggctgtgctgtggagcaaggtaaacgtagcctgcacaagcggaacctgatttatggtacaggtttgtcagaagagattggcagtgatgaggcggcgggggagggcgttcttctgatgcagaaacacaagtctccgaaaattctttgtgaggatgagctccttgaggtgctgggcatgggtcggcatcttgtccagtttgaaccaatggtctccagaattgtagctgctgttgaatccgagttgcagcgggctaaggcagcggatttagataacgatgggaaatgaatggaacaatataaatgtacattgccataattttggctgattactgtttcacctttctttcccaaaaatgcgagtaatgtcctacaccacttcagcactattactgacaagtctctttaaggtccttgggagttaccaagttatacaatatctagagagctactatcgcataaaatagggatttgttattctgtttgtatagtgaaatttgaaataaaagaagagataggccagctgtcagagacagcctcaa

SEQ ID NO: 18241 - DNA, 637 bp, Zea Mays
ctccagcgggtaatttttgcactgtttcatcgggatcatacaaacttgtgtgggacaattcatattcttcattcttcaaaaaggtccttcggtacaaggtggatgctgtgccaccggttgttgagccggccttgtcagccacggaactctgaagaggtctgtcttaatataatgatgtaacgagggccgatgcatgcccgagtatagctgtacaaatgtttctgaaggccccacacggtgctgttactgattattccatcgaatgctttgcggtgttctgatcgcagcattccctgatagctcgctgtcagagcgcatggatatgtactttgtgtgcacatggctgcggccacttgtcaccgacgaatgcctgaatataacagaaatgtattatatcgaccaataagagcatgtctgattggaagctgtcgtggtttgtttttattttttttctcgaatacggagagctgtgtgtcattgcaccaggaagaggaagagctgtggacgtgctccctggaaagagcatcccctttggctaccaattgttgaatttgccagtccatattttagcgcttcggatctgctcagatcccgattctgtttggatgaattgagctttgctttccccaacgaaaat

SEQ ID NO: 18242 - DNA, 2014 bp, Zea Mays
tcagctattcgcgggaccgtatccgagcaggacagcaggttgttcagcgatcactcgagcggtcgagccctcgcgccgcggagagtgtctccagtctcaagtacagcggaggatggagagcggcttgcttgacaccgccgcggctgccggtctctgcccggtggcggccgggcgccgccgcgtcgggagcacgggcacggcgaggtgcttcctcagctgctcctgcgcttccagagactgcagggtgagcgcgtcctactcccactccatcagccggatgctgagcggggtgcggtcggcggcgcgcaagaggctcttcaggagcgacccggccgagctgctgggcgtcgccaactggtcggagacgggcggcggcggcgccgggggccaccagcactggtggacggcgctggagaacaacttcgtgctggaggccaccgacgacgagtacggcggggtcgtcgtcgacgccgatcggctgccggccgacagggccgccttcgcgcgctccctcgcggcgtcgctctcctactggaagtccgtggggaagaaaggggtgtggttgaaattaccggtggatctagccgagttcgtccctttagcagtgaaggcttcaagtaccaccacgcggaggaagcgtatttgatgatgacgtactggatccccgatgaaccgaatatgctcccagcaaatgcttctcatcaggttggggttgggggttttgtgatcaacgaccaaatggaggttctagtggtgcaagagaagtaccgcggatcgtcgctggatggcgtatggaaactccccacaggcttcattcttgcgtctgaggaaatctacacgggggccagcagagaggtgaaggaggaaaccggggtaagaaaatggaactcgctagaaggctagagcccagtactttccgatccgtcttcctcgtagggatcgattctcacaagcgctgtgattgcgatacgctatgcaggtcgacaccgagttcgttgacgtcgttgctttcaggtacagtagtttgtttgccttcctctgtttcggcgattaacccgatataattgcgtctcagtatcttcgaactgtaggctaaatttgtcctacgtaacgtgtgttgccaggcatgcccacaacgtggcgtttcacaagtccgacctcttcttcatctgcatgctgaggcctgtgtcgagtgagatcaagattgacgagacagagattcaggcagcgaaggtgcgtctccatctttatttcaaggggatttcatcacgttttttcttttaaacgagcctgcaaaactagtactggagaaaaaaaacatttcaggcttcatttcacgatattcagataatgaatgaagttcgggacagtgatcgatcgataagcttgcgctaacccaccgagagagacgtttattttcagtggatggcgctggaggagttcgtgaagcagcccttcatccaggaagaccacatgttccagaagatcatggacatctgcatccagcgcctccgcaagtgctactgtgggctgacgccgcaccacgtcgtctccaagttcgacgacagaacgtccacgctctactacaatgtcgccgagcccgaggacgtgaactgcagcgccgcctgatgtaatatgatgtgagggggagggggagccaccccagcatctactagtctaatttttgctgcgcagaagtttcatgatgcagcagtgttagtcgtgcgattactgagagtgaaatactagtggcagactgcgcgaggcaatagagttgccgagcctgtacatatacgtgtagggcatatgcataaccagagagctgtatatcccggggcggatccccgggcaggaggaaaattttcattgccgccgtaaattacaatttaactttagctcgccctaaatcttatttatctctcttttttctttgtcctgagatccgcctgtagctatattagcttatagctcagtgctcgtgcgttgcaacgagatcatataatagctcgataac

SEQ ID NO: 18243 - DNA, 3766 bp, Zea Mays
ggggccgccgcgtacggcgtacctagcctgcgctgcgcgttccgtaaacggaagggtgagggtggtaattacattccagtcctcccacgccggccgatccgaggccaaagggagggaggagacccctttccctctcgccgccgcacgatggtcgacaccaggcggagctccgcggccaagcgccggggcccgtccgaggactcctccccgtcgccgccgacgacgcaggcggacccgacgacggcgggcttgccggtggagcccgcgtcgcccccgccgtcgtccgggagccgatcgggcaagcgcgccaaggtcgcggttgcgcgggcggaggaccccggtgcgccgcgcggcaaggcggtggaccccgccgcggtcgacgtgctcgacagctccgtggcgaacctgcagggcgtggcgaggccgccggccgccaacgtggccgcgtcctccgccgtgtccaattccgtagggaggaggaagaggaatcagtctgtgagggcgatcccgacgggcgaggggacgctctggaagccgaggcccgccggtggccgcgctgaggcctggggcagattgatttcccagtcttccgagtatccctcaattccaatttatactactcatttcactattggcaatggcggaaagtgtgacttgaaactcactgagacatctcctgggccacttatttgcaaactgaagcatgttaagaggggtgctgcccttgagatctacatgaacaaagttgtccatgtcaatgggaaggccttggacaaagctgctaaagtcaccttgatcggtggtgatgaagtcatgtttgtttctcttgggacacatgcttatatatttcagcaacttctagaggaaaaagcaagcacaccatctttgtgttcaaaatgtgtcattcaacaagaacaatatccagttgtcaaagataaggagatagtcagcagtttatgtaagactgtgggggagcaaagctaccacccttctgaggaaaatatgacatttggtcgacaccaacttttgaaggatgatttgaagaaagcagctataagtgcaagtgatatatcagaatcatttgataattttccatattatcttagtgaaaataccaaaaatgttcttttgtcatcatcgtatgtaaatctatgctgcaaggaatccactaagtggacaaaggatatatcttctctttgtaaaagggtactattatctggcccaccagggtctgagatctaccaagaattactggttaaggcacttaccaaatcctttggtgctaagctgcttgtcatagattattcgctgctgtctggtgggcagccttcaaagtcaaaggaatcaaaaccatacaaaaaaggtgatagggtgaggtacattggtcctattcaatcatcagggtttatgtttgagggacagagagctcctgattatggttcacagggtgaagtgaggcttacttttgcggaaaatggatcctcaaaagttggagtcagatttgataaacagatccccgggggcattgatcttggaggcagttgtgagcttgatcatggcctattctgttcagttgattctctatgcctcgatggtccaggatgggaagatagagccaaacattcatttgatgttgtgtttgagtttgcctctgaagaaagtcaacaggtgcctgtaatcctatttctgaaggatgttgagaaaatatgtggaaataattacacctaccatggtctaaagaataagcttgaaagtttcccagctggagtttttattgttgggtcccagattcagacagatgctcggaaagataagtcaaacaatgggtctccttggctcaagttctcatatagccaagcagcaatacttgaccttgcatttcaggatagctttggtcgggcgggtgaaaaaaataaagaagcactcaagatgtcaaagcatataactaaacttttcccaaataaagtgacaattgaatcacctgaggatgaaacggaactctcccagtggaaacagctattgggtcgtgacattgaaattcttaaggcaaaggctaattttttgaaaatacaatcttttctaacccgccatggtatggaatgtactgatttagaatcagtggtttgtgttaaagatcgtaatctgacaagcgaatgtgtcgataaaatagttggttatgctttgagttatcaactcaaggatcaccctattcaaactcctggaaaggatgcgagagttgtcctttccggtgtaagccttaagtatggaattgatttgttggaaagtatccaaagtggccctaagaagaagagcacaaagaagtcactcaaggatgttgtcacagagaatgaatttgaaaaacgtcttcttccagatgtcatccctccagatgagattggtgttacctttgaggatattggagcattagaaaatgtcaaggaaactttgcaggagttagttatgcttcctttgcaaaggcctgagttgttctccaaaggacaacttatgaagccatgtaaagggatattgctttttggtccacctggcaccggtaagaccatgcttgccaaagctgttgcaacagaggctggtgctaattttatcaacatatcaatgtcaagcattgcttcaaagtggtttggagagggagaaaaatatgtgaaagctgttttttcacttgcaagcaaaatttctcctagtgttattttcgtggatgaggttgatggcatgctgggtagacgtgagaatccaggggaacatgaggccatgcgcaagatgaaaaatgagtttatggtgaactgggatggtcttaggacaaaagacaaagaacgtgttctggtacttgctgccactaataggccatttgatcttgacgaggctgttgtcaggaggctccccaggaggttgatggttaacttgccagatgcacccaacagaaagaagattcttagcgtgatactagcaaaagaagatttggcagatgatgtagatctggaggcgttagcaaacctgacagatgggtattcaggcagtgatctgaagaacctgtgtataactgcagcacatcgtcccataagggaaattcttgaaagagagaagaaggagagaaccttagctgaagcagaaaataggccagccccacctcagtgctgtagcggcgacgttcgctccctaaagtttagtgatttcaagcacgcacatgagcaggtttgtgcgagtatatcatcggattcaaaaaatatgaatgagctcgttcaatggaacgacctctacggagaaggcgggtcgaggcacaagacaccgttgagctactttatgtagcctaacgtttttttagatgatttgtacatacagaagcagcctttgtataggtgtgtttccagttaattttgctggaaacatttattcatgtcgggtttcgtttctataatcatatcagcttgtgtctgcatctagtgtagcctgagcttctgattagttattaatttatttcagtccgttggatcttgcgtcctggtatagtctgtgaaaggtctcgacggagattcatttggatttatttaatagtctggatgatatggtaatgtttgtgtgggtgtgtgcgtgacagagaaggttttacccttccctctgcactaggtatggcaaagaggaaattctccacaggtcctacgaacgcttgtggtggccatttcttttccatcttcgttattcgtggggataaatcctatcggaattccaattataattagatagtacttgattt

SEQ ID NO: 18244 - DNA, 2583 bp, Zea Mays
gcctccctccctccctcctcgaataaaaacttgcgaggaaaatgtgaagaccccacgcgacccaacagcagacccacagggagtcagagatactgatcggaggcggtgtcttctacttctagccgcaaccgcaggccgcacgcagccccaccgctccgcccgtccatcctctccaactagtggcagcgcggtggcaaccgctcacccaccactcctcccccaaatttccccacaatcatagctctgcacgttagggagcgacgccgacgcaccaaaggaacgaggggaggccagggaacagcagatacgcaagcgccggaatgctgggctccaagacgaaatctggctccgccgaggcgaagagcaacggcaaaccggacaaggagaagaagggcggcggaggcggcacgccgccaacccccaaggacagcaagccgcgcaagccggccgagcagcacgcgcagcttgccgcgatccgagaagagctcgtgaaggccaaagagcagttgctggagaacgagaaggagaagtgcagagttcttgctgagctggagcgtgccaagaaggtggctgatgaggccaatgccaagctgcaagatgctcttgatgtgcaaaggagggctattgaggcgcaggaggcagacaaactccctgccggagagtcgaagcaggcaagcatccacgaccagcaggaggatgatgacgctgtgctgcggtcgacagtggagcagcttgagaaggctaggtacgagctggccgatgcagtcgatgccaagaatgaagccctcagccaggtagatgatgccgttagggcttctgaggtgaaggcccaggaagttgagcatctcattgcagaggttacacgcctcaaagggctggttgattccaaggtggatggcaacaggaagaagactgcagagaggattcagaatcttgaagaagagaactttgcattaaagcttgagcttcagaaaaaaaaggctgctgaagaaaaggcggttcgattggagcgcatgattgatgaacttgagagtgatgttgatgatgctaggaattttggttccaagtcaaagcagttagctgatgaatggcagaagaaggcacagcttctcgaggtcagattggaagaggctgatcagtctaatattttgaagggtgaatctttgaattcagcaatggaagaattggattcaacaagtagtttgcttcgtgacagagaatctgaagttgctgctcttcgtgacaaagtaaggttctttgaggatgagcagacaaagctcaagaatgatattgttgtgtccggccaacgggcagatgcagcagagaaagaggcggcggatctatggacagaggttgaagggcttaggctgaagctccatacagtggaagaagagaaaatggaggccctgaacagtgataagagtactaccttagaaactgagaccttgaatgaacagaagaaccagctgactgacaagcttgaggcaaacaaagatgagcttgagaaaactaagaaggcaatggagggtctggcctcagccttacaggaaatgtcagctgaatccagagaggcgcaagagaagtaccttctcaaacaagatgagattgagcgtgctcaggcacaggtagaggagcttagcttgagtctgaagaatactaaggagaactatgagctattgcttgatgaggcaaactatgagaaggtttgccttacgaaaacagttgaaagactgaaagcagaagcaaagagtgcacatgaggaatggcattccaaagagctaagttttgtcaattctattaagaattcagaggaagagatagttgctatcagagttcagatgatcaggaccttggaggttgttaaagagaaagaacgtgaaaacactgagttgcaggagaagctgcagcagcttgagtctcagctaatggaagcaaacagaatcagggaggaagccagcgctgaaactatccgatggaaggagaacatattagaccaagagaatgaattacagaacataaaacaggagaacgacgacctgcaggcaaaggaattagcagcttctgagaaggttaaggaactctctttccagcttgctaatgtaaaagatagcctgataaatggtaacaccaaggaaggagataatgagaaggggggtactgaagaggatgatgaacctgttgtggtagttgccaaaatgtgggagaacggcaagtttgctgactgtgattcatctaaggagaaggataatgatggtgactcgcaggttgatttggaatcaaacaagggggatgcaggtcttgacagcaatgggttgcactcaactaatgagagcagtggcagagcatcaactaaacagccgcaacagcataagaagcctttgctgaagagattcggtggtttgctgaagaagaaaagcgaaaagtagcataaaaccatctgatgatattctttgttctatcttttgacatatttctacatatttctttgattagctatctagttcctgagtcttcccccgatattatggtaaactgagtgatggatgcttcaaagaatacaaaatgtcgcctgtatttacatca

SEQ ID NO: 18245 - DNA, 4321 bp, Zea Mays
tttaccacttcactgtcggctctccagaacaaaagaagaagcttgccagcgctgtggaaaaagtgataatctagtctcttgttcaacatgtacatacaaatttcacagaaaatgcttggttccttgcttaaacatcacatctgataaatggagctgcccagaatgtgtaagtccattaacagagatggagaggattctagatattgaagtgctggaagcacctcgtgaagattctagttccacagagcctcgatcaaagaagatggagcgatatcttatcaagtggaaaggattatcatacattcactgctcttgggtttcagaaaaagaatattcagaagccgcgaatatacaccctcgtctgaggactaggttgaataacttcagaaggcaaaaggaagccatgaaaatagaagcagaaagatctggtgaggacatcgttgcaattagaccggagtggacaactgttgacaggatccttgctagcagaaaaaacttagttggcgatcgggaatactatgttaaatggaatgaacttacatatgaggaatgtacatgggaaaatgagtctgacatcacggtgttccaacctgagattgaacgcttcaatgagatccagttcaggcgtaagaaatctggtgacaagggcaaggccactcgggagccacgccaattcaaggagagccctacgtttctttctggtggcacactacatccctatcagcttgaagggttaaactttttgcgatattcgtggtttcataacaaacgcgtaatccttggtgatgagatgggtcttgggaaaacgatacaaagtattgcttttcttgcctcactctttgaagacaagtttggtccgcatctggtcgttgctcccctctcaaccctgcggaattgggagcgtgaatttgcaacttgggcacctcaaatgaatgttgtaatgtattttggagctgctgcttctcgtgacattattaggaagtacgagttttactacccaaaagagaaactgaagaagctgaagaaaaagaaatcttctccatctaatgaagataagaagcagtcaaggataagatttgatgtcttattgacgtcttatgagatgatcaacatggactcgtctattctaaaaaatatagaatgggagtgcttggttgtggatgaggggcatcggttgaaaaacaaagattccaagttgtttggtcaacttaaagattataataccaaacatcgtgttctattaacggggaccccagtccagaataatcttgatgagcttttcatgcttatgcacttccttgagggtgaaagttttgggagtataactgatctccaagaagagttcaaggatataaaccaagacaagcaaattgagaagcttcatggaatgctgaagccacatcttcttcgaagattcaagaaggatgttatgaaagaacttcctccaaaaaaggaattgattctacgagttgaattgacaagaaaacagaaggagtactataaggcaattctcaccaagaattatgaagtgttagcccgtcgtaatggtggacatacatctctaataaacgttgtaatggagttgcgcaaactctgttgccatggattcatgattgatgaacctgatcttgaacctgccaatccagaagaaggtttaaggaggcttctagattcatcaggtaagatgcagctgctggacaagatgatggtgaaactgaaagagcagggtcatagagttctaatttattcacagttccagcacatgttggacttgctggaggactatttaagttacaggaaatggacttatgaacgcatcgatggcaagataagtggcgctgataggcagatacggatagatcgcttcaacgctaagaattcaactaggttttgctttcttctttctactagagctggtggtctgggaataaacttggcaactgcagatactgtaatcatctatgacagtgattggaacccacatgcggatttgcaagctatggcaagagctcatcgcttaggacagactagtaaggtgatgatatacaggcttgttagccgaggtacaattgaggagcgaatgatgcagcttacaaaaaagaagattttattggagcacttagttgttggtcgactcaccaaagctaataatgtcaatcaggaggagttggatgatattatacgctatggatcaaaggagctttttgaagacgagaatgatgaatctcgccaaattcattatgacgaagctgcaattgagaggttgttagaccgtgatcaagttgacggtgatgaatctgtggaagatgaagaagaagatggattcttaaaaggattcaaggttgcaaactttgaatatatcgatgaggcaaaggctcaggcagaaaaagaggaggcacggagaaaggctgcagctgaggctgaaaattctgaaagaaactactgggatgaactattgaaggatagatatgatgtacagaaagttgaagaacatactgctatgggaaaagggaaaagaagccgcaaacagatggctgccgctgatgaagatgacattcatgatttaagttccgaagatgaggattactcattggaggatgacatttcagataatgacacaagtttgcaaggaaatatttctgggaagaggggccaatattctaagagaaaatcacgtaatgttgattctattccattgatggagggcgaaggacgtaccttgagagttcttggattcaaccatgctcaacgagcaatgttcctacagacactcaatagattcggttttcagaattatgactggaaagagtatcttcctcgtcttaaaggaaaaagtgtcgaggaaatccagagatatgctgaacttgtcatggcacatcttgttgaagaaattaatgattctgactatttttcagatggcgttccaaaggaaatgatgcgtgttgatgatgtactagtcaggatagcaaacatatcccttattgaggagaagatggctgccacaggaccaggaaaaattacaaacatttttcctaattacttgctctatgagttccaaggcttatctggtggaagaatatggaaagcggagcatgatctactgttactgagaggcatactgaagcatggatatgcaaggtggcagtatatatcagatgacagagagaatgggctttttgaggctgcacgacgagagcttcatctcccttcggttaatgaaataattggtgctcagttgaacgaggcaaatgggaatttggaaggtgcacaggaaggccaagcgaacacaacaagcatgtcgcattacaaggagatccagagaaagatagttgagttcttgagaaagagatatcatcttatggagagagccttgaatatggaatatgctgtgataaagaaaaaaattcctgttcctgatgatattactgaacaaggtgttccagcaggacatgctccttttattccagatatcagtgaactgttgcgggaattgcccaatcttgagccaatttctaccaatgaattggtttctgagggcacagctggtcagttacaagttccccatctctacaataagatgtgtggagtgcttgaagagagtggtgcttatgcgctcagttccttctttggagacaagtccgcatcttctagtttggccaatagccttcgacagtttgaaactgtgtgcgagaatgtcgtcgaggccttgcgaccacaccaaaatggtactggcagtgccatcaaagaggaattggtagatgcagccaccaaagcagcagcagcagcagctcctcaacaagattcaggccatgatgcaccgcatgggcagtcttcgacagccaaggcggacatggaaatcgatggttgatttgtaggttccagagtggtaagaaagggaatccccctctaatcattatgtatactgtggtcagaatgtgcgctatatattgtaacatcaaagaaagcacctccaggcctgagggtgttactgctaatgcgtttggtttacttgttgtccttgtaatatgcatacacatttagaactcatgcagccattttgtgtgctcgaaccggtggatcgctgccctgttgtcttgtactgtgtttagggcctgtttggatacgaatggttaattataagacggggctaaagataagtacggataagtacggattagctatagttggctagcttgttggttaacaattagctaaactttggctagctagatggtaaacaattagttaaaagtttagcaaaagaattagttcacctattaactcagtttgttgcctcctttttattatgccaactaatttg

SEQ ID NO: 18246 - DNA, 144 bp, Zea Mays
ttgacattgagtagatcctctcagtaccatcggtaagccaagggtcgagagttcatatttgctaacaaaaggtcatgcatttgtgttgacatccatttggtcatgttgttcatctgtttcttcatgcgagatgaaccgacttgg

SEQ ID NO: 18247 - DNA, 1164 bp, Zea Mays
atctgaaccacaacataagacgacagacttactgcgtccgctgcgtcgcgcctccccctgccgccgcctggctcccgcccgcggggtgggatcccgccggaacgttagggccactgccgccgatcgttttggagaagccgtccatgacgctgagcacggaggtattctagatgggagagatctcgatgggagacggtggcgttcgccggtcgatgcgtgggttaaccgcgctcgggatcgagggtgccgagaaacgaacaaagggagcagcaatggcggcggcctggtgttaagaggtgacctttttctttcttgcaaccgaagccgaagaggagagcgccacctatgggttgagatccaagccggctgggctgggtctcgtgggctagtatatgaaaaccaacggctaggatggattaagaagcgagacaacatcaggtcaaccgtccgatcccctcagagctaggagtggggaccaggggagctgggagtttgcggcttcagctgctgctgcgagcctgcgacctccgaggcggagctcaatggagttatccactcccgtcgggagctcccttgctagaactgcgaccatggccctcgttagccccagcttcaagataaccaatcaaatgtgtgccaggggtatgccacttgaatgccaatttcctcataggctaccatctgtagcttgttcaatgttgttaaacacacaaccttcacaacgaaccaaccataaagattgtggtttgcttcaggtgcaatgtacagaaaaccttatgcagtcgccagtatctttcagtgacttctctgtttcagtgtgtgctcaagaggatggtctgataaagctacaggtaaatgtatctggcacaatgacagattctatctttgagaaagttttcacaaagaatgttgccgccgctcaaccccttcccggctttcgacgaatgaaaggagggaaaactccagacataccgaaagaagttgctctacacttaatcgggccatcaaaagtgaagaaagaaacaatcaagaaaattataagtagcacggttgctgagtatgttcaaaaggagggcctgactgtatcgaagaatatgaaagttcagcagagctatgaagagcttgaggcagcatttgaaccagggaaagaattttgctttgacg

SEQ ID NO: 18248 - DNA, 2346 bp, Zea Mays
ggcttcgtacgagcagcgctcggaagctgcggtgagccgcccgcaatttgtgcctccctccgataacaggacaaggattgatcactcagagtcaagctctgcatctggagtgaacctttcacaaagtgctctgtccaccaatcaagtttctcagtatgccaatgggagccaaatgtcaacagaagcatatcgtgccaagcatgagattactatcgtcggcaatgaggcacctgcaccattcatgacatttcaatccacaggcttcccatcagagattctaagggaggttctgcaagcaggattctctgcaccaactcctatccaagctcaatcatggccaattgctctaaggggtcgtgatatagtagctgtggcgaagacaggttcaggaaaaacactaggctatcttctcccagggtttattcttttgaagcgcctgcagcataattcaagggaaggtccaacagtattagttttgtctccaaccagggaattggcgacacaaattcaagatgaagcaatcaagtttggcagatcttcaagaatatcttctacttgcttatatggaggtgctccaaaaggccctcagctaagagagttggagcgtggtgctgacattgttgtcgcaactcctgggagattaaatgacattttggaaatgaatagagtgagcctgcaccaagtatcatatcttgtccttgatgaagccgaccgtatgcttgatatgggatttgagccacaaataaggaaaattgtgaaacaaataccaccgaaacggcaaactcttatgtatactgccacatggccaagagaggttagaaaaatagcgtctgatttactggctaacccagttcaagttaacattggaaacactgatcagctagttgcaaataagtcaattacacagcatgtggaagttatcccacatatggagaaatcaagacgacttgatcagatcttgcgctcacaagatcctggatcaaaaagcataatattttgctccactaagaggatgtgtgatcagttagctcgaaacctatcacggcagtatcgtgcttctgctattcatggtgataaatcacaggctgagagggattctgtgttgaatgactttcgaagcggcaggtgtccagtacttgtagccactgatgtggccgctcgaggcttggacataaaggacatcagggtcgtggttaactatgatttcccaactggtgtggaggactatgtccatagaattgggaggacaggtagggctggtgcaacaggatctgcctacacattcttcggtgaccaggattcaaagtacgcttcagaccttgtgaagattttggagggtgcaaaccaatctgtgccgccacagttgaaagaaatggctcttcgtggaggatatggtggaagatcacgtcggtgggcatcttctgatgactcttatggtggtcagggatatggtgctaaaagatcaactgatagcttcaataataacaacttcggcaaccaggctggaggtggttcaagctttcactcgagctccagtggcggtcagtttggtgatactacgagcttccatggcagtgtccgcaacaatcagacgggggacaatgcgagctttccacccagctccagcaacaatcaggctggcgatggtctcagttttcatgaaaggttctatggatcacgtggaagggaccagagcagaacaagcaatgatggattccgtgccaggagcagaagtcctcctggcaagcccgtggaagtttccaactggtgattgcatccactaggtgcaatccaatttttgcgatggtgacgaaaccaagtagaagatggcaccctaacaagttatattatttccttttcttatcctgcttagatccaaggatgtgatggtctgaaccctaacggtctcctgctatcttgatttgacgtctgggagacgcttgattccgtgcctgtgggttgtaaagcgttaaaacttgactttgctagtgtactcccaatgatataacccaatcctgggtaaacaaacgcatggggatgaattttggacgaaaccatggacaactgatgtgtgtttaatgtcatgtacaatctatgtcgaaggctgttgtaaatgccgtccgcatagtttatattgagatgagtgtctgttattgcatgtgttcgccgtggtttgtaaacgcatgtgttgtagacagccacttgacgtagctgttcgccgtggtttggaccttggaggttgtactaaattctaatcgtatggatggctggaacacaaaagtccacgagtctagtcgcgtaaggatgcaccatagtcacaaaaagtttctggatcgatagaatcga

SEQ ID NO: 18249 - DNA, 436 bp, Zea Mays
gaaccccatggtgcagagccggggcaagctgcagctcgccatcaacgccttcatgctcttctgcgcgggccgcatggccacgctggccaagtggacctagtaactagccataatgatgaggatgattctagtgatgagaaagatataaattgggccttaatagagatcaaattgctatggtggatgaattgataaaggttgtcaataaaaaaggagaacatatatgccgtcgtatgtgtgtctgtatattatgaactgtatgtttgaactgtattttaaccagcaactattcatcatcacccgtagtgcacagatgccgccggcgccgaaatgcctcttgctgagctgccgaattcatcaccacagacagtaccactccacttccatctatcaaagggtgtttgggactgctctagaatagatttatttttttaaa

SEQ ID NO: 18250 - DNA, 990 bp, Zea Mays
tcgctacacattcttagtcaactcttgagatttgtaactgtgacattgactgggcactcttccttgccatctgcagatggccaagttcgacttgaaaagcttttggggactgaatctgagaactctgtctcgagctctaaaggcccagcacgactgaagggccattctgctccaggaaagtgtgtaaaacactgggaatccagtggaaataaatctaccaagaaacaggtctccttcgcagagcgtccagtatcttttgtcaagtgtggaaccattgtggactcccttactgaggcaatagctggcccaagtggtggtgatacctcgtgtgttaaacctgttgaaagtaactccacccatctaggctcctttgaggtgcacaccaagggctttggttcaaagatgatggccaaaatgggattcatcgagggcactggccttggtaaagatggccaaggtatagtgcagccgatacaagccgtgcatcgtcccaaatctcttggactaggtgtagaatttgacagtgtggctgaggcgatcaaagcaagggcagaacccatcaaattaatttcagagctgaggcggaatgtgtgggcaccagagacgagtggcgttggctcctttgagaaacacaccaagggttttggctccaaaatgatggtgaatatggggtttgtcccagggtccggactggggaaggatggccagggcattgccacccccttgaccggagtaaggcgaccgaaatcacggggactgggagccgaggacaaatattagcttacaccattttcgcatttgatgtatctttcttgtcgtgttccttgttacatgcggattacatagtttgctgggagggcgaacctttgagcaccctgaatggtgaaacaatgggttttcacttgtttctttcaacttctcaatgaagttttatatatttgttctatcaatgttatatttgtttcatttttctatggcccttgcttgtgc

SEQ ID NO: 18251 - DNA, 1254 bp, Zea Mays
caatcatgtctcatgtcttcttaacgatgatttttggtggtgatgcttgggttggatgcagctgggaaaaccaccatactctataagcttcacattggtgaagttctctccactgtccctaccataggtttcaatgttgagaaggttcaatacaagaatgtagtgttcaccgtgtgggatgttggtggccaggagaagctcaggcccctgtggaggcactacttcaacaacactgatgctctgatttacgtggttgattcactggatagagagagaatcgggagagccagggcggagtttcaggctataatcaatgacccttttatgcttaacagtgtgttattggtgtttgctaacaagcaagacatgaggggagcaatgactccgatggaagtgtgtgagggccttgggctgtatgacctgacgaaccgcatctggcacatccagggcacctgtgctctaaaaggcgatggcctgtatgaagggttggactggctagcgactactctggacgaaatgcgtgcctctggacggttaacctcagcatcatcatcggcatcctgaatcacgtgtaacaggagggacaaacgatttgatcctcgtgatacgcccattgaaggatcatcttgtgattcaggctttgcgcgctttgttttcttttgtgtttccccaattgctgttggctatacatgtgtgctatgaactgggtggtgcatctggcaaggctaggtagtcagagttacagacgccggttccgtggtgacgatgtcagtacggtggtggtgtcgtactcgtctgctagtcggaagcaggcatcatcatccatctcgtcgcttgtgtgtgggagtgactgtaaatactaccactgatgacatggctctcgtggtttcttcgtctgaaactaaagaaacggaatcacatacgtacttgtgtgtgcgtcgtcgcctggagtcctgactcctgagtggtgacataaccatgcactagttgaactgcaagagacctagtactcgtatgctctgtgtagtgaaacgcaagtgatttgactggagactgaacgctgaaatgcaagtgatttcggtggaggctacggtttgcttgcttgtaagcgggcatgcgcggcggcccttttcctgccgctttggttttgcggccgtttggtatctgtcgagattttgtaaagaaacccaataagataacatgattattgaattacatccctttataaacacaggacgaaacattcatttgttg

SEQ ID NO: 18252 - DNA, 1856 bp, Zea Mays
atgtgcccagtagaagcaaataaaatcatgtgggtaatgtagatgaggaggaaagttttattctcagggatcgactcctccccctcattatttgcctactgaggacggacaaacttcctgctgttctcagaatttaccgggatacacttataactgttatgaaagcttcaatcaaaaccacagtaggagagttactcccagttttaactgccagaccaatagattctgactcagtaactggagacagagctaccgatgctgatgctggaggccagtccttagcaaataagttgcggagtctttcatctgaaggatttgttcaacttttatctgccattttcaggatagtacaggtacatttacagcaagcagctgaagtgaaaagaatagttgagtgggtcatgggaaaccttgatggaacgttaggtgttgatgctagtaatcctacgttacaacatggtggtacagttattcctgatacccaagaaaatgactcttcaagaggctctaatactcttacacggagtacttccaagatcccatttgtccaaggaaaaacaaatgatttttccattataaattcgttaaagaatgttcgggctgatgtcttgagagagaacactgaagcagttttcgcggcttgtgatgctgcccatggacggtgggctaagctgctaggtgttcgttctgctttacatcccaggttaaggcttcaagaattcttgatcatctacaacataacagaagaatttatagctgctacagaaaagattggaggcaggttgggttacaacattcgtggaatcctacatcaacaatcgaagcaattcgttgattatcagcataatgttcggatgacaaaaatcaaggcagttctagatcaagagacgtgggttgctgtggatgttcctgaagagtttcaagcaatcgttctttcactttcatccacttattcttctgttaatggcatggagatgcctagcactgatgataactcaaagtttagtgatcatcggtctacaagtcaagaaccgacatattcagctaaaaatattgctgataatggcaaagtaacatccgggactggtgaaaacaaggttgaattcacttcacagactgaaaataatgttgccgggaatctaaagtccaccttgcaaacgattgtacatggaggtgttggctatcatatggtaaactgtggtttaatactgttgaagatgttatccgaatacgttgacatcagtaaatgtttaccatcactatctttggaggtggtccaacgtgttgtggaaatattaaagcttttcaacactaggacttgccaacttgttctcggtgcaggagccatgcaggtgtctggacttaaatcaattacgtccaaacatttagctttggcgagtcaaatcattagttttatgcattctttaattccagatatcaggcgagtacttttcctgaaaatacctgaagcgcgcaaacatctgttaatgtctgagctggatagagtagctcaggactacaagatccatcgagatgaaattcacaacaaacttgtccagataatgagagagaggttgcttgcaaatcttagaaaattaccccaaattgtggaaggctggaatggcccagaggataatgacgtgcagccgagtcaatttgctaaagctgttacaaaggaagttacctatttgcatcgcattctttcccaaacattgcttgaggttgaggtgcaaacaatattcaggcaagtggttcaaatattccattcacatattacagaagcattttcaaaattggaagtcaatactccctctggcaaagaataggtatgctgcttatttgtgcatcttttagca

SEQ ID NO: 18253 - DNA, 1590 bp, Zea Mays
ttttaatccttgctatgccatttctgtggacgaatttctcctcgctttcaaaagattaagagagaaatatccataatgaagcttgtcaggcatcccaatgtcgttaggctacacgaggttttggcaagccggaagaagatatttataattctggagttcatcactggcggcgagctattcgataaaattattcgtcatgggagactcagtgaagcagatgcccgcagatactttcagcagcttattgatggtgttgatttttgtcacaagaaaggagtctaccatcgagacttaaagcctgaaaatctcctccttgattcccaaggcaatcttaaaatttcagactttggactgagtgcatggcctgctcagggatctttccttctacgtacaacctgtgggactccgaactatgttgccccagaggttctcagtcataagggatataatggcgcacttgctgatacatggtcatgtggagtaattttatatgtattgttagcaggttatcttccatttgatgaagtggacctgactaccctttatggaaagattgagagtgcagaatattcattcccagcctggttttcaggtggtgcaaaatcactgattcgtagaattcttgacccaaatccagagacacgaatcaggatagaagagatcagaagcgatgaatggtttcagaaaaattatgaacctatcaaagaaatagaaaatgaggaaagtcaatctcgatgatgtcaatgcagcttttgatgatcctgaggacgataatgaggatgctttcgaagatgaaacaggtcctctaacacttaatgcattcgacctaatcattctttcgcaaggattgaatcttgcagcgctctttgaccgcagacaggactgtgacaagcttcaaaatagattcttatcacgcaatccagcaaaggttatcttgtcaagcatggaggttgttgcgcaatcaatgggatttaagacacacattcgcaattataagatgagggtggaaggtctaaatgccgacaagactagtcatctctcagttatggttgaagttttcgaagttgctccatcaatcttcatggtagaactacaaagagcagcaggagatacttcagagtataacacgttcgtaaataactactgcggcaaattagatgatatcatctggaaatttccaactgagaagggaaaatcaaggataccccggttatcaaagtctcattcataatctagtgctgtgtgttatcaattactatggacttaagtggatatatttgcagagtgtatcgcaattggattatgatattctaagtgtagctcttcgagtagtatatgtttgtatattcagagtccccatgtacaaagaggccgttttaattgaggtttccgtacctcgattccctgtgcaaagttttcatcgatgttttagactgcacatctgtatattttgtcgagagcatcagtttcttagacaccacctatgtatcatgtgtttgttgccaactagtgtcatttttgtaagatctaacttgtgatatacttggattgagtggtatggttgaaaagagtgtgaaagtccattaaaaa

SEQ ID NO: 18254 - DNA, 1690 bp, Zea Mays
caccgatatgcaacacggcaacacgcaaaggggggaaaaaactcggaaatcaaacccctgatccgatcgagcccgcacactcccaccgtttcccactcccatggggctcctcagctccctgccgccccatcgccggggcgccttctcgggtggcggatggcagtggtcgttcctcgacgtcgtatggggggtcttcctcatcgccgtggtcgtcttcctcgcgctcgtcttcactccgcggcgcggggaccccatcctaaccaccccctctgtcgcccgcgccggcggcacggtgccgccgtgcgctgcctctgaggtggacctcctcccctgcgaggacccgcgccgcagctcccgcctcagccgcgagatgaactactaccgggagcgccactgcccaactcgtggcgaggcgctcgcgtgccttgtgccgccgccccgaggttaccgcattcctgtgccctggcccgagagcctccacaagatctggcatgacaacatgccttatggtaagattgctgaaagaaaaggtcatcaagggtggatgaagcatgaaggttcgtacttcatttttcctggcggtgggactatgttccctgatggagctgaacaatatattgaaaagcttagccagtatgttccaatgaaaactggtgtcatcaggactggtcttgatatgggatgcggggttgctagctttggtggatttttgcttaaggagaatatcatgacactttcatttgcaccaagagattcacataagtctcaaatacaatttgctttggagagaggagttccagcatttcttttgatgttgggcactcgccgtcttccttttccagcacagtcctttgattttgtccattgttcccggtgtttgataccttttactgcctataatggatcttactttattgaagctgaccgtctgctaaggcatgggggctatctaatcatatcaggcccccctgtgagatggaagaatcaggagaaggaatgggatgaacttcaagcaatggcaggagctttgtgttacaaattgatcactgtagatggtaatactgccatttggaagaaacctgctgaggcttcatgtcttcctaaccaaaatggatttggccttgatctttgtagcaccgactatgatccagatgaagcatggtacttcaagttgaataaatgtgtcagtaaaatttcagtggcggaagagacagctataggttccattctcaagtggccagataggctgtctaaaccttctgctagggcatcagttatcaacaatggagcaaacttgtttgaagtagatagtcagaagtgggttaggagagtgtcatattataagaaatcgcttggtgtgaagcttgggagcacaaacatacgcaatgtcatggacatgaatgcattctttggaggattcgcagccgctataatatctgatcctgtatgggttatgaatgttgttcctggtcagaagccattgacacttggagttatttatgataggggccttataggggtttatcatgactggtgtgaaccattctcaacgtatcctcgtacctatgatcttattcatgctgatgcaattgactccttgataagtggcccgatttcaggcactagcagaagcttgagtttgggttgcagcctaaacgtgatttaacttgaattgcttcctttgatcgga

SEQ ID NO: 18255 - DNA, 2830 bp, Zea Mays
gagagctcatggcgtgagcgaggggttgcaggcagcgctcgcctccgcccttctggtataaaagcctctcacgccgcacccacatttctcacatcacagtgcgggcggcgggcgccactctcacacctaccaggaaaccaatcaaaacttaaaaccaatcgaaattagaccggcgacgaggattagcgctcgccggcgatggattctgactacggcgtgcctcgcgagctctcggaggtgcagaagaagcgcacgctctaccagcccgagctgcccccctgcctccaggaagacagctgttgtccctgatgctaaggtcatatctgaacaccaggcggtcagggttggcattgtcttctgtggcagacaatccccaggaggccacaatgttgtttgggggctctatgaggctatcaaggcccacaaccaaaacagcaaactcattggtttccttggtggatcagatggtctgctagcacagagaaccttggagatcactgataaagttattgcttcatataaaaatcaaggtggatatgacatgcttggtcgaacaaaggatcagattaggacgacagagcaggtcaatggtgctatggctagttgccaagctttgaagttggatgctctggttatcattggaggtgtcacttccaacactgatgctgctcaacttgccgagacatttgctgaggcaaagtgtgcaacaaaggttgtaggtgttcctgtaactttaaatggggaccttaagaaccagtttgttgagacaaccgttggctttgacaccatatgcaaggtgaacgcacaacttatcagcaatgtatgcactgatgctctatctgctgagaagtattactactttattcgcctgatgggacgcaaggcttctcatgtggcattggaatgtgctcttcaatcacatccaaacatggttatcctaggagaggaggtggctgcttccaaacttacaatttttgatattacgaagcagatttgtgatgcagttcaggcaagggctgaaaaagacaagaaccatggggttattcttattcctgagggccttgtggagagtattcctgaactatatgctctgcttcaggaaatccatggcctccatggcaaaggtgtttctgttgagaatatctcttctcagctttcaccttgggcatctgcactctttgagtttttgcccccttttatcaggaagcagctactactacatcctgaatctgatgattcagctcaactttcccagattgagactgaaaagctgctagcccagttagttgagactgagatgaacagacgtttgaaggagggcacttacaaaggaaagaagtttaatgcaatctgtcacttctttggctaccaagctaggggagcactgccttcaaagtttgattgcgattatgcctacgttttggggcatgtgtgctaccacatcatagctgccggattgaacagttacatggctacggtgacaaatcttaagaatccagtgaacaagtggcgatgcggcgcgactcctatttcgtctatgatgactgtgaagcgatggtcgcgtggcccttcagccacccaaattggaaagcccgctgttcacatggctagcgttgacttgaaaggaaaagcatacgatgtgttgagacagaattcttccagctttttgttggaagatgtctacagaaacccaggcccgctccagtttgaaggaccaggtgccgattcaaagcctatttcattgtgcgttgaggatcaagactatatgggcagaataaaaaagttgcaggaatacttggagaaggtgaagaggattgtgaagcctgggtgctcgcaggatgttcttaaagcggcgctgagtgccatgtcttctgtgacggaaacactgaacatcatgacttcatcttctaccggccagactccactgagtcattaggtaccatttcatggtatggatcataatccccacttttttcagtggtggcgattaacgagtttaggaacagcaaccctggtatcatacgggttattcttttgtagccttttggagagttctatcggttttggattcggtagtttatgaaggcttgttgatgagtttgagctcgaatagcttttgaaacagccggatgatgccatctttaataaaccaaattctgtgactgcattcacatttctgtcagtcacctgagtgagaaaatgtgagtctcagcaatctcttcatctgaaattgtttgcttgttgctttttgcatggaggcttcaagcgatttgatcgttggtctgagcttaatctctttcatggcgtactacatgtcatagtgtaaaattaggtatttatagtgtgcttcttttgggaaataagctagtttatcttctcacccacttttttgttttgtttgtcgaatggaatgagttggtccatcatcacctcattcctcatagttagttatagggtatttggtttgaggaataagttagtccaccattttcatacttctcacttttttgtttggttttgtggaatgaaataagttgatccagcaccacctcatttttattaggatgtttggtttgaggaatgagctagtccatcatcttctcacacatttttgtttggtttgtagaatgtgatgagttgatccatcatcacctcgtcccttatagttaattagttaatactaatatgaggaatggagcaatcccactaaatttgaggaatagattcatgatacatcacattattttggatggagtgatttctcaaaccaaacatccctatagttagttagtactaacatggggaatgaggtcattccaccaaatttgag

SEQ ID NO: 18256 - DNA, 882 bp, Zea Mays
gaaaccaagcatttaggtcttacgacgcgcccaaagctcacgccggacctgctcctctccgacggcggcatcggcttcgtgctccgctactttcccaaggcgttcaagccccgcccccgcccaggccacgaggtggacgacctcgccaacctcatcaagctctacgcggactggcactcccgcctgatcccctactactccttcgaacagttcgtgcgcaaactcgagaaattgggtgccggcaaccgcgtcagggacgatggtgggcctctctgaaggggagaaacacttcatccgcggcggcattgcacaagaccttcgcactgatggacgtaggcggctgcagttccggtccctctccgtccaaaccggagtcattccacaggcgaatggctcagcgcgtgttaggttgggggccactgatataatcgctagtgtcaaggctgaactaggaaaaccaagcattcttcaccctgacaaaggaaaagttgccatttttgtcgactgtagtccaaccgctgagcctctgtttgagggtagaggctctgaagaattgtctgctgagctctctgtttccctgcaaagatgcttgttgggtggtaaaagtggtgctggtgctgcaattgatctgtcatccctaattgttgttgatggaaaggtctgctgggatctgtacattgatgggcttgtggtcagttctgatggtaatttgctagatgcgctagctgttgcgataaagtgctgcatctgatgaggaacctgaagttgatgtaagtgatgaggaatttctgcagtttgacacatccggtgtgcctgttattattacattaaccaaggaaacaattggccaccaccggcaacaaaaaaaatgccctattttat

SEQ ID NO: 18257 - DNA, 3375 bp, Zea Mays
caggtttgtggtgatctgtaactttgcggggttcagacttcagacagaggtgctcttgtcaccgtttcagttaagacactctgatccactgaagaataagacttagtcatgccactcgatgccgataactcctcctgcaacaatgccaaggaaacagcagtatccaagtccataggtcgatgaataaaaactacaactttgatattagagcgaagactatcaacgaatctatttattatggctactgaatgaaggatcatgggcatgaagctggtgcataatagaatcaaagagatcaacatattcagtaacagttgctgtctgtctaatatggaagaactgacgtataaggtggttgtgttgatcacgttcgaaatgggcgctcacgtccgcacaaaattcagaccaatgagtgtgtcgtatagcaggatctacagattgaagccaaaaggcagctgtgcccacaaaattgagaggcaattttaacccacaactcaactgggatggcaaaaacttcgaagtaagactcacacttggtcttccacaccttgggatgatgaccatcgaattgaggaaaactgagattcggtagggatgcagttaaatgagcaggataaacagatgtaggcaacaccggctctaactggtgaggagcagtattaattggggaaccagagatcgaaaagtgctgcacacctgtgaccggaggtggagttagggtggtcagttggtcaccaccccaaaaccatcactccggtgagtatcatgaagacgatggccatttggtccttgagctgaattaagaaacggcattgcaaggcatcgaccagcaaaagcaatctacaatgaactagttgcttcctcccctttgggtgttcttcgaagtgacatcacttcaggtgccaggattagacatttacaagagaggaaccagtcaagttacattggtagccttgcacgccgggtccgagacttagaatcaccaagcggaacttctctgcttaaagagatttacagaagtgacccagagcgtgtcatacaaatatttgaaagccaaccttcattacattctaatcctgcagcactttcggagtatgtaaaagctcttgtaagggttgataggctggatgaaagtgccttgcttaaaacactgcagagaggtgttgcttcctcgacaaggggcgaagaaagctttagtagcattccagcattaattggtgctggtcaagtaacaaaagatggagctcttggcactgcaaatgcacctattcacatggtcacagcagaaacaggtcaatttaaggatcagctttggcgtaccttccgaagcattgcactaactttccttcttatctcgggcattggtgctctcatcgaagatagaggaatcagcaaaggccttggtctgaatgaggaggttcaaccaagcattgagtctaaaacaaaattcagtgatgtaaagggtgttgatgaagcaaaatctgaacttgaagaaatagttcattatcttcgagatcccatgcgcttcacatgtcttggtggaaaacttcctaaaggtgtcttgcttgtgggccctcctggcactgggaaaaccatgctagctagggctattgctggtgaagctggtgttcctttcttctcttgcagtggaagcgagtttgaggagatgtttgtgggagttggagctcggagagtgcgggacctttttgctgctgcaaagaagcgatctccttgcataatatttattgatgaaatagacgcaattggtgggagtcggaatcctaaggatcaacagtatatgaagatgaccttgaaccagctgctcgttgagttggatggctttaagcagaatgaggggataattgtcattgctgcaacgaactttcctgagtcgctagataaagccctagtcagacctgggcgttttgaccgtcatattgttgttcccaacccagatgttgaaggtcgacgccaaattctagaatcccatatgtcaaagatcttgaaaggtgatgatgtggacttaatgatcattgctagaggaacaccgggattctctggtgcagaccttgctaacttggtaaatgttgctgctcttaaggctgccatggatggtgcaaaagctgtcacaatggatgatcttgagtatgcaaaggaccgaatcatgatgggtagtgagcggaagtcggcagttatctctgacgaatgcaggaagctgacagcataccatgagggagggcatgcccttgttgcaatccacacagaaggagctcaccctgtccacaaggctaccatcgtacctagggggatggccctaggaatggtggcccaactccccgacaaagaccagacaagtgtgtcaaggaaacagatgctagcaaaactggatgtctgcatgggaggccgtgtggcagaagagcttatctttggggatactgaggtgacatccggtgcgtcgtcagatttccagcaagcgaccgcaatggcgagagcaatggttactaagtatggcatgagcaagcaggtcggccttgtctcttataactacgaggacgatggaaagagcatgagctcagaaacgagacttgcgatcgagcaggaggtgaagaacttcttggagaatgcatacagcaatgcgaagaccattcttacaaaacacaacaaagagctccatgctctagccaacgcacttcttgagcatgagaccctcacaggagcccagataaagaacatattagcccaggttcataacaaacagcaacatgagcatactatcgaagcaccacagaaggcctcagtcgcaccagcttcccccgcatcaccagctgcatcagctgctgcagcagcagcagccgccgccgcggcagcacagcaggcggcagccaaagctaagggggtggctggtatgggatcttagcacattagagcacccccactggtttgcattgtgtatatttcaccaaacaagcaaagctgttccagcaattaacgttcaacgagggtcctcggtagtatgctaaactgctgcagcaacagaacatactgattgtgtggaagctactgttcacgtgcctcgagtgcgaagcagaaacgaaaactttatgcattgtagtaggaggcacatttagctggtgattggatcagttttgtacccaaatcgaaaacaatttctgttgtttacaccccaagaattgttacatttcgatctgcctgccgccttcaccctaacagagcataaattgtaatacattctgaataagatgtcctgtgtgcttgaatacaatgtggcagctgccgaatcgattcgtcagccccttcgatgctcatttgttgtatgctatgttttgccaggctaaaacgatcctttgttcttcc

SEQ ID NO: 18258 - DNA, 1519 bp, Zea Mays
atggacgaccaagtccacaccgaggatactcgcactgccctatggggacagtcgagcctggtcaaggtaacactatggcatcagaaagtccgaataatggcctgtatagcgaaagggatgggacaacgcccataccgaaagctgatcagcagcatgatggggagtgacgcaagaatcgagaggggtccgtcgggggaggtttggccactgggcactgaccaagaaagagtgatgactgatgagcaccccccagcccagctgccgctcaaagcgacaggtggagatcggagggaggaagaagaactgagctgcggatcgagggaagggaacaagcaagcagccagagccaggtcgtggggagccggcggcagtgatcttcttgcgtcgaaggcgaggccggagcgtcggtttgagcgctcgtgcgatatgggggagcaggagaacaacaagatcggcggcagcggcaacgacaacgccatggcggtggacgaagcgggcgcgggcgcggccgcgaacaaggggaagagcctcggcgccgcggacccgcgcctgcaggccatttccgacgccatccgcgtcgtcccccacttccccaagccagggatcatgttcaacgacatcacggagctgctgctgcggccgggcgtgttcagggacgccgtggacatgttcgtcgagcgctaccgcggcatgggcatcgcggccgtcgcaggcattgaagctagaggattcatctttgggccagccattgcgctagccataggagcaaagttcataccactacgtaaacctaagaagcttccaggtgaggtattttctgaaagttatgtacttgagtatgggatggattgtttggagatgcatgttggagctattgaacccggggagcgcgtagtggttgtcgatgatttggttgcaactggtggaactctttctgctgcaataagacttctcgagcgcgcaggagctaacgtggttgagtgtgcatgcctcattgggcttcccaagtttaaggatttctataagctcaacgggaaaccggtttacatcctggtggagtcccgcaaataggacgcagtaaaatgaaaaagctttctagcttcccgtccaaagaagctcacagcttcactcatttgcacgcgcaagcaaggtggtatgggggcaccgagaaactccgcagtaatctgtgttgaggccacggccagatgatgctatgtactcctatcttcatggagagggtgatggactgggtgaaacgtagtcactgtacttttgtagcacgtcatgtctagtgtttcttagtagccatggctgaagagagtttgtagcttattcccggcttcctgcagccaggaacatcagtgttagccagagaagctaggaaaaaggatcttatgttgctgctcagttttctaccagaatcgtcttcctttttttcccctttgcagaatcaactctttggtaaactttactaagctcgttttgcctaaacggccgttcaatcatgaagaaagagcaa

SEQ ID NO: 18259 - DNA, 155 bp, Zea Mays
ttaccttcccaagagcgttttacccgtcacgcagacattacaattcatcggagatgcggaagcagttacaataacttacttttattgaaaagtaagacagagttatagatttatagaccagaacataatatacgagtgcagagtattattattat

SEQ ID NO: 18260 - DNA, 2070 bp, Zea Mays
ctaataagtttttttttcacaaagcagatagctctgctgaactgcagaaacttataaactcttccagtcctatggttgtgcagtagtaaactgaaattaaaggacagcttctggtaatgtagtttctgattctgacatgaatgcaaagccgtctgcaaataagaacgatgacaaaggtggagatgtgaagtacacaaaccacactctcgatgaagttgctagtatggttcgggatactatatcggcttttgacactaaggttcagagtaccttccgtgatttcgaggaatgcaacattctttgtccatacatgagtgacactataaaagaaatagctaaggcctgtcagactcttgaagggaaggattcatctccaactgctgtaaaattgttgcgcacccttcattttcaaatgacgaagctttacgttctacggctttgttcatggatgcgggcaacaactaaggagatatcaaaagatgatacttgggttattttatccacccttgagagaaacaagtctccatatgcaatttcatgcatgcccctggaattccgtgacataataatttcagcaatggaccggattgatactatgattcttaatctgatgagcgagactgcgaagtcatatgacatttctcaaccacttcaggaaattaatgagtctgtcagacttgcatttttgaattcctttctggattttgctggttatctggagaggtttggaggtgaactaactgagaacaggccaaacaatgaaaacaattatgttcaaaatggatacataaatggtactagagaaacatctgctaacacagatggagatttgcacaaaaagctgctggttgttttgagtaacattggatattgtaaagctgaactttcagaagaactgtacaccacatatagacacatttggtctccagtcaggaataatgatgagcgaagttctgacatgcgagatctgatgacttctttctctgcgcttgaagagaaagtcctggaccaatatacttttgcaaagtcaaacttgatcagaagttctgcacaaagttatcttttggatcctgggatttattggggagcagcaccaatggtaaagagcattcgagatgcaactcttgacttgctgcacatccttgtagcagtacatgcagagatatactctggtgctcggcctttgttggagaagacaatgaaaattttggttgagggtttggtcgacatctttcttagtgtttttcatgagaataagaccaaaggtattaggttgttggatgcaaatggtttttgtcaactcatgcttgagcttgagtattttgagactgtgctacacacatacttctcacccgaggcacagcaggctatgaaatccttacaagagaatttgttggaaaaggcctgtgaaagtattgcagaagccatggaaaatcctggacaccaacggcgaccaacccgtggcagtgaagatgcatcgtcagatgatagacagccatcagtatcacctgatgatttgcttttgcttgctcaacagtacagtagtgatctgctgcaaggggagctggagaggactcgattgaacatagcctgcttcatggagtcagcccttcaatcaacgtctgcgccagcaggctcaaagcctgctgcatattcttcttaccatgcgcaagtaccacagcacgcccccattcaaacgtcctcgcctagttttagaaggcagcagactggtacaagctctcctgtagtctccagacggcgacgataaaaatggtggtcaagtgcttctgcacgggaacataaaattgtataatatgcccacgaatcaaatactgccttgctgactgaagatagcaccacagctgtatctgctgcgccagtctccttcggtcctcactgcttgtttgtatattcatttggacagtttatgtatcccgacatttgttaatgttgtatcaggtggttcaactagcatcgggataattttcttatatcgaaagcggctgaagtgattgagattcaactagcatcgggataattttcttatatcgaactgttattaaatgcacg

SEQ ID NO: 18261 - DNA, 2764 bp, Zea Mays
cgatcttcgaattctcctcctcttttccttcctcttctgcagcgccagcgccagcgccgaccgaacccaacgccaacggcacggcaagccaagcgaagcggagcaagggtttgctcgccccacacccgtcccgcggccgaggctctgcttctcatcgtgacaagcctggcgaactgccatggacctggtgggatccttgctcctgagcatggcacgtctgcttgacccatccggtctccacttcgtgggctggctcgtcaccgcgggctccattggtcttgccgcactcatctacgctctcctcaggctgcagcgtgaggcggcgttgtactggaccaaggcgaccagggagaagcgtgccgcatggaggagattgcggtgccctagctcctgccactcgtggtctgaggactacttccacggtggccagccatcgacatgctgcgtttgcctgtcgtcccttggctccacgcagggcgtcgacatggttcaccgctgctctgtttgcggcgtggctgcacactcaaactgctctccccgtgcagagaaggattgcaagtgcgttgcacaggctggcgcttcgcccttgctgcatcactggtctgagaggtgggtggagctggatgacaacccggagatatcctcctcctgttactactgtgatgagccgtgcggtgtgcctttccttggagtctctcctatatggcgttgcctgtggtgccagcggcagatccatgttgattgccatgcaaaactgttgaaggaaaccggaaacacttgtgatcttggccttctcaggaggcttatagttcctccccaatcagtgaaagaaattggtcaaggttcaggaattagtggaatgctgaactcaatcaaggacgggtttgccaattcaacagttgggaaccgtaggaggtcacgcaacaagaagcgcatgaataaccatcctggtggcaagataaattccattcccacaaaattctcagtcattgattcagtgcttgaaggatttgctagattgaagggcctggatgggaagtatgcactagcaaagcctttatctcaacattctgtaaagcaaacatatcgatctgttattcctaatggacgagtcagaaagtatgaacttgttgatttgccacaagattcaagaccactgctggtattcatcaatggcaagagtggaggtcgaaatggaccttctcttagaagaaggctgaacatgttgttgaatccaatacagatatttgagctaagtgcttctcaggcacctgaagttggattacaactattccacaatgtgaaacacttcagaatccttgtttgtggtggggatggaactgtagcatgggttcttgatgctattgaaaagcagaactacgaatctcctccccctgtcgccattcttcctctcggaactggaaatgacctatcacgtgttatgcgctggggagggggtttatcttctgttgaacgacaaggaggcatatatgcacttttaaatgatgttgaccatgcagctgttacagtgcttgatcgctggaatgtaaccatcaaagagaagaatggaacagaaggtgaatgcaccaagcaaataaaatttatgactaattatttaggtattggatgtgatgcaaaggttgcttatgacttccacaccactagggaggaaaaaccagataaattttgcagtcagtttgtcaacaagcttatatatgctagagagggtgcaaaggatatgatggataggtcatgttctgatttaccgtggcatgttagccttgaggttgatgggaaaaacattgaaattccggaggatgcagaaggtgtgattgtaatgaatatccctagctacatgggtggtgtggatctgtggcaaaacgacaatgaccataatgatgatttcagattgcaatcaatccatgacaaaatacttgaggtggtttgtatatccgggacatggcatctaggcaaactgcaggtcggactttcaagggcacaccggttagcccaaggaaaagttataagattacacctccacagttcattccctgtgcaggttgatggtgaaccatggatccagccacctgggtgccttgagatatctcatcgtggacagatgttcatgctaaggaggacatctgaagagcctactggacatgctgccgcaatcatgagtgaggtgctcgtgaatgcagagtgcaatggtgtgattgacgcctctcagaagagattgcttctccacgagatagcactccgtttatcctcctgagactatccagtccagcaaccctcacctcacaaggctaactcattctgtaccctttgatgccaaacctatcgtctctgttgagaaatccctttgcacagacgtaaactgctatggtagagttggtgtatacaatacaaagagatagaaggtgtatacaatacgaggaaatagaagtttccttttgtatttggctgtaccttttgagataggtcatctacttctttgtggctggtttcatcagaacagctgttgaagaattttgtagcgcagagccactataaccgcaactagggctcaatgaaatgtaactagagtggatgtgaatgttttgtttgcaaagatattgatgcaactgttatcacacttcatgagaagacctgaatttcgctaaggggccattttgatccttttattttgaaggaattggaatttacttcaaagagtctatgtaacggctggttctcacaactagtcgttggtggcacaccgatg

SEQ ID NO: 18262 - DNA, 1139 bp, Zea Mays
gttcatttgcgcttgcttcggtggtgatttgtcgccgacgcgtccggattctgtgtcgaattatgagtgaaacagggcacactgtacaagtcactaacctctcgagcagagtatctgaaagtgatcttcatgagttcttttcgttctctggtcctattgagcatatagaacttatcagatcagaaggatacggtgccactgcttatgtgacattcaaggaacgctttgccttggaaactgcagtattgctcagtggggctactattgtggatcagccagtatgcataacctattggggacaacctgagggaacttttaatttctgggacaggccaacttgggaggttgaagaggaaatcgaatacaggaactaccaaacatgccagtacaacactactccgcaggaagcttttacagtggctcaagatatcatgaagacgatgctagaaaaggggtacgtgctcagcaaggatgctttggctaaggctagagcctttgatgagtcctatggattaacagctgcagcagcagccagggctgcagagctgagcaagagaattggtttaactgatagggtcaatgctggtgttggtgcaatgcgatcagtcgatgagacatatcgcgtaagagagacaaccaagacggttgctactgccactggaagaacggcagcaaaggtggtaaatggcatcgtcaccagcagctacttctctgcaggagccatgatcttgtctgatgctcttactagggctgccaaggccgcggcagatctggccgctcatggtaggcagaattaagtgaaaaatagacataaagttcatccttgcagttactaaacatgaggacgaacaccttcaagtgatgttgcttgatgtatatttatgacacaacagtgtcgtaaattaaaaggagacgatcactgcgtttggaacaaattgtttgctctgataagtttgattattgcaaatgtagtcaagtgatcgtgcagtcatgtttcggacttcctgcgcatttcatattcgcgcattgctgttgagtatctggagaatcaaagcaactgttctcccctagacaagtgttgtattacgaatataatatccctgattccagagcaaaaaaaaaatcatccttttttcaac

SEQ ID NO: 18263 - DNA, 2697 bp, Zea Mays
attcactacttgctgcctagtttggagctacatctttccttttcactgagtacaagtatgttggattattcatgggcatctttgcaatccttatattcctcttccttgggtccgtcgagggattcagcacaaagagtcaaccttgccactatagcaaggacaagacttgcaagcctgcccttgctaatgccatcttcagtactatagcttttgtgcttggtgcggtcacctcactggtttctggttttcttggaatgaagatagcaacttatgctaatgcccggacaactttagaggccagaaagggcgtcgggaaggcatttattactgccttccgatctggtgcagttatgggtttcctgcttgctgccagcggtcttttggttctttatattgctattaatttgtttggaatttattatggcgatgactgggaaggtctttttgaggctattactggttatggccttggtggttcttctatggctctttttggccgtgttggtggtggtatttataccaaggctgctgatgttggtgccgaccttgtggggaaggtagaaagaaacattcctgaggacgatccaagaaatccagctgtcattgctgacaatgttggtgataatgttggagatattgctggaatgggatcagatctctttggctcatatgctgaatcgtcatgtgctgctcttgttgtggcctcgatctcgtcttttggaatcaaccatcaatttactccaatggtgtatccccttcttgtcagctctgttggtattatagcatgtctcataacaacgctgtttgcaactgatttcttcgagataaaggctgtgaatgaaatagagcctgctctcaagaaacaacttataatatccactgttgtgatgaccattggcattgcgctcatcagttggcttggtcttccatacaccttcaccatttataactttggagcccagaagacagtgcaaagctggcaattgttcttgtgtgtggcggttggtctctgggctggcttagtcattggttttattactgagtactacacaagcaatgcctacagccctgtacaagttgttgctgattcctgcagaactggagctgccactaatgtcatttttgggcttgctctgggttacaaatcagtcattatcccaatttttgctattgcgtttagtatcttccttagcttcagccttgctgccatgtatggtgttgctgtggctgctcttggaatgctgagtaccattgccacaggccttgctattgatgcctatggccctatcagtgataatgctggaggcatagctgaaatggctgggatgagccataggattcgtgagagaactgatgctctagatgctgcaggaaacaccactgctgcaattggaaagggttttgctattggctctgcagccttggtatcccttgcactcttcggtgcctttgtaagccgggctgctatctccactgttgatgttctgactcctaaagtgttcattgggcttattgttggtgctatgctcccatactggttctcggcaatgaccatgaaaagtgtaggcagtgctgcactcaagatggtggaggaagtccgccggcagttcaacaccatccctgggctcatggagggcaccacaaagcctgactacgcaacttgtgtcaagatctcaacggatgcatccatcaaggagatgatccccccaggtgctcttgttatgctgacaccactgatcgttgggattttgtttggggttgagaccctcgctggggtccttgctggtgcccttgtctctggtgttcagattgccatttctgcatccaacactggtggtgcctgggacaacgccaagaagtacattgaggctggagcttcagagcatgccaggacccttggcccaaaaggttctgaccctcacaaggcggctgtcattggtgacaccattggagatcctctcaaggacacgtctggcccctccctcaacattctcatcaagcttatggcggttgaatcccttgtcttcgcccccttcttcgccgcccatggtggcattatcttcaaatggctctaaagatagcgacaacgttagttagtcgcaagagaaaggccgcagttctgcggctgcgaggggaatagagcagtatgtcagctatacaacatctatggcatgtgctttgctcctccacttgattatagcccccgttgtgtgtttcggtttctgttttcctggagtttttggttccaggcttccgaccatgttttgatcccataaattctcctccagccttcgagcaactgagtccatcttcgtaagtcatcagccctagccagacattgaagcatcggaaaactttaagggcttgttcgttttggtgataatccacatgtattgggtgggattgagccggtttaaatccataacaagtcaaaatacatctcaatctcacccaatacacttcaatacacatgtaatatcaataaccgaacaagccctaatagtttttagagatatggtgatgattatgatgatgattaatctcagtttttttcctttgaaagtaattagcatggtctttgcttgagattttgttctcttttcaaaacgatatgcatgcgaaatggaggtgatgtttttttttgaacggttgtttcaaagcaatatgaaaacataaaggtagtgatgttcttcaaaa

SEQ ID NO: 18264 - DNA, 3475 bp, Zea Mays
caccatgtcattgaaaataggtcaatgaagctcttaaactagcaaaccagttgattccttcagcagcaagggatgttgaagacacccagatcatactagcgaaagaaaaaatacttacggatgaaccaaggttcttgtgtcaattctctagggatattcttcctgtcttgatcaaggcggtgaactctggtgccaattcatacatttgctatgggtgtgcttcaattgttaacaatatttgttacttcagtaaatcagaaatacttcaggacttgctcaaggaaacaaacataccaagcttcttggctggtttattgtctagaaaggatcatcatgtgctgacctcatcactaaagatagtcgagattctcatgcaaaagcttcctaatgcataccttggtttctttatcaaggaaggtgtcgtcaatgcagttgaggcgcttcttaatcaacaggattgttcaaaatccacccatatgcctgataacatgcaacaacctgagactcaacctgtcataagaaataagactacatgtttctgctacgcatttgatgcctgtagatctgaagctgctgaaaaaaggacttgcaggattgggaaggacagtctttttacttttgccaggcatgtgaagacaacttactttactaaggatgtagtgagctctgagatggggttaactgagattttgcagaaactcaaaaattgctgtgcagttttgaatgagaccacagacaagtcatctgaacaatgcaatcttcaaaatgaagaatacttatctaccattttaagtgaggtgatgatggagcttcatgggggagaaacaatgacaacctttgaatttcttgagagtggattggttaaatctttatcaaattacctctcaaatggcaagtacctccaggtggaggacaatatgggttgcagttctgaccatcttttggctgtggtgaaaagatttcagtcattttctcggatgtctttctcaagaatgggccaaggttgggatgacatgctcctgacacttttagtaaggaagctgcagaatgctcttacttctcttgacaactttccagttataatgagccacaacttcaagccaaggagcagtattgctgatatccctacaaggcactcaacaattactccatgtatccgagtaagattcaagaaagacgaagatgaaactaaattgtcaagctataacagtgccgtgaatgtggaaatatcgtcatccttgcaaaccattgaagaatttctatggcccaaagttagtatagatgtcaatagtcaaaaggctgaatcaccacctagtgacactgctttggaaatcaaatatgctgacgatgactctcaggaacaagattccacacctagtcagaaggctgattcaccatcagagggcctcacttgtggaagtcagaatctacctgcagaaacatgtccgaagcaaggaacttcatcttctggtcaagcagaaagaaacacaacaatcttgagtgattacaccatacaacaaaaattggtatttagcttaaatgggaaagagcttgaccggtctgttactctatatcagtcaatcctgcaggatcatatcaatgcagggtctgagataattctggacatgcagttttggcgcagtgtacatgacataactttcaaagctgctaatccagaagcaaatagaacagctgttaacccagaagcaaatgattctcctaggcattcctctactgcaatgtcatcaataaatgagaatacaactgggtttacatggcagatgctcccattcttttctagtatgttgcttggtaaacttccttgcaaacttgacagatcaggtgcttcgtatgacatattgtttatgttacacattttagagggattaaacaggtattcctttcacctcgtgtctgatgagagaaaccgttcttttgcccatggaaggataactaaccttgatgatctgaaggctgaagttttctcgattcctcagcaagagtttgtcagcgccaaattaacagataaattggagcaacaaatgcatgatccattagtttcaaggtcttgctgcctgcctttatggtgcattgaactgatgtctgcatgtcctttcttattttcatttgaggcgagatggaagtatttccagttgacggcatttggttctttgaaaaatcatcatggccacatgatggatgcaagtgttaacagtgttgcggaaagggggtcttcccactcacggaaaaagttcaaagttgatcgtgatgatatactggtttcagcagcaaaaatgatgaagtcccatgctaagagcaatgctctacttgaagtagaatataaagaggaagtgggcactggtttaggtcctacaatggaattctatacattgataagtcatgaatttcagaagtctggtctaggcatgtggagaggggaacttccttgtaaatctggtacccatgatactcatgtttctagatttgtggttgcctctaatggacttttccctagaccttggtctgcttctgaagatcctgcttcctttcaagaagtgagcgagcgattccacttacttggtctggttgttgcaaaagcaattaaagacaacagaattcttgacattccattttctaaagcattctacaaacttatccttggacaggagcttaatatatatgatatccagtcattagattctgaactggccatatgccttgtggagtttcaagcgcttgcttgtcagagaaaatatgcagagtccaatttgacaagggactgccagatatcagatttgacttatcggggttgtagaattgaggatcttgctattgagttcgctctcccaggatatccagaatatgtgctctcgccaggaagtcgctctgactgtgtaagcgtgctttcttctgcctgcttctgaacagactaaatccccccacccaccccacacacaccaaattaattgctaatgctattgttcagttgaatgctgagaatttggaagaatatgttcgtcatgttgttgacgcaacggttaaaagtggaattgcaagacagatggaagcttttaagtcaggatttaatgaggtatttccgctaaaaaaactccaggttttttcagaggacgagctagagagattactttgtggtgaacaagatacatgggattttgcgaaacttgtggatcacatcaaatttgatcatggctacacttccagcagccctcctgtcattaatttgctggaaatcatacaagagtttggatccattcaacgtagagctttcttgcaatttataacgggttcacctcggcttccaccaggcggcttggctgcactaaatccaaagttcacagttgttcgaaagaataacagcaatgatgttgatcatgacctgccgagcgtgatgacttgtgccaactatcttaagttacctccatactcttcaaagctatgctttgtttgtttcgac

SEQ ID NO: 18265 - DNA, 2478 bp, Zea Mays
caaagtgctagctcttctatcatggaaaacaataggtacctatcgacgttcttcatcatggacgtggcatcgacgatcccgttccagggccttgcctacctcatcaccggcgaggtcagggaaaacgccgtgtacagtatgctgggcgtcctacgcctttggcgtctgcgaagggtcaagcagttcttcaccaggctcgagaaggacatccgcttcagctacttctggatccgcagcgcgcgtctcgtcgcggtgaccttgttcctggtccactgcgccgggtgcctgtactacctgatcgccgaccggtacccggaccggcagaagacgtggatcggcgcggtgatccccaacttccggcaggccagcctgcggatccgctacatctcttccatctactggtccatcaccaccatgaccaccgtcggctacggcgacctgcacgcccagaacaacgtcgagatgatcttcaacattttctacatgctcttcaacctcgggctcaccgcctacctcatcggcaacatgaccaacctcgtcgtcgagggcacccgccgcaccatggagtttaggaacagcatcagggcggcgtcgagcttcgtgggccggaaccacctgcctccgcggctgaagcagcagatcctggcctacatgtgcctcaagttcagggcggagagcctgaaccagcagcagctcatggaccagctgcccaagtccatctgcaagagcatctgcgagcacctcttcgtgccggtcgtcaaggacgtctacctcttcaggggggtctcaagagaaatgctcctgtccctggtcaccaagatgaaaccggagtacatcccgcccaaggaggacgtgatagtgcagaacgaggccccggacgacgtgtacgtcgtcgtctccggcgaggtggaggtcatactgttcgacggcatctacgagcaggtgcaggccacgctgggggcgcgggacatcttcggcgaggtgagcgcgctgagcgaccgggcgcaggccttcacgttccggacgaggactctcagccagctgctgcggctgaagcaggctacgctcaaggaggccatgcagagcaggcccgaagacagcgtcgtcgtcatcaagaacttcctcaagcatcaggtcgagatgcatggcatgaaggtcgaggacttgctgggagacaacaccggcgagcacgacgacgacgcgaatgtgctgacggtcgccgcgatgggaaacagcggcttactcgaggacctcctcagggcaggcaaggacgccgacgtcggtgacgccaagggcagaacagcattgcacatcgcggcgtccaaggggtacgaggactgcgtgctggtgctactcaagcacgcgtgcaatgtgaacatcagggacgcgcagggcaacacggcgatgtggaacgccatcgcggcggggcaccacaagaccttcaacctcctgtaccaattcgggcgcgcgtcgaacccgcgcgccggcggagacgtgatgtgcctcgcggcgcgccgcggccacctcggcgcgctccaggagctcctcaagctcggcctggacgtggactcggaggaccacgacggcgccaccgcgctgcgcgtcgcgatggccgagggccacgcggatgcggccaggttcctgatattgaacggggccagcgtggacaaggcgagcctcgacgacgacggctcaggttcaggctccggctctggcgccgcgcggctagcaatgtcgcccaccgagctgcgcgagctgctgcagaagcgggagctcggccactcgataacgatccacgactcgccagcggtggtcccgaacggcggctcgtcggggcacagccgtccaggaagattacagagcacaagttcggacagccagcgctggcctcgggtgagcgtatacaagggccaccctttcctcagaaaccgcacctctgaagctggcaagctgatcaacctaccaggcaccatggaagaattcagagccatcgtcggtgagaaactgaaagttgacgcggagaaggcgttgatcgtgagcgacgaaggagcggagatcgactcgatcgacgtgatccgggacaacgacaagctgttcatggtcaccgaagaagatctgaggcggctggcatcaatggactggctgtcgtgcgagtgatttggttcctcccaagataattggaggctaaatatagaatacagtacaagagtattgtgcttctacgatgtctaggattgatagattgatggcaactactgagtggcatgagctctatcgagcgactaatttgcaggcaatgtgtaccatgagttcggaccactgtccgttattaatgcaaggtcattcttcttgtaatttctataaggggtttcattttgaatcctattgggtacacactgacgggttcaaagatgtagttcaacaagcttggacggccacaattaactcctctgatgtcattcttcggctacatgttaa

SEQ ID NO: 18266 - DNA, 1061 bp, Zea Mays
gtgaatatgatctaagtggttttgctgtgggtgggattagggatgggtgcgaacaatcagattgtgctctcctaggaggggagacagcagaaatgcctggtttctatgcagagggtgaatatgatctaagtggttttgctgtgggtgttgtgaagaaggataaagtcattgatggaaaaaacattgttaagggagatgtgcttataggtcttccttccagtggtgttcattctaacgggttctctcttgttagaagagtactggagaaaagtggactttctttggatgatcagctcccaagaaatgatggcataacaactacggttggtgaagctctaatggcaccaaccttcatctatgttaagcaggtgcttgagattattagcaaaggtggtgtgaaaggactagcccacatcactggtggtggctttactgacaatatcccaagagtattcccctccggatgcggggcaaaaatttttactgggtcatgggaaatacctccaatcttcagttgccttcaacaggctggaaacattgatgacgcagagatgcggcgaacattcaatatgggcattggaatggttcttgtggtaagtcgagagtcagcagacagaattattgaagacacccatggatccaatcctgcttatcgcattggagaggtgattgagggtgatggggttcagtatgtctgacctcgtatgccttttatagtggcttgagacttgttggtctgctctgcaaagcagcagagtttatgtaacaacataatcttgtggtgttaagttctgcaccactactcccgctagaaagtgaagggtaaccaaataattatttgattggatccacgggaacttctctaaaggcttaccagaggaggccattaggaggaaatacagttgatgagaatttttcatggagagcggtattgttttcgttgagtaaatttaaatagttaaatttattatttggtaaaaccgtaaaactacattttaatcaattacatcatacttggcttatagtaacacaactaaacttgcaaccccggtggtttcgat

SEQ ID NO: 18267 - DNA, 1014 bp, Zea Mays
ccttgcttttacgctaatttggattgcaccgagtggtggtagagatcgcccaaatccttcaacaggagagtggtacccgtggacaatatgaggaggcttctggagcatgctggtgttcctgggcacatatatccactatcattactgtgctacgaggttatgcctccaccacaacaggtcgagaaagagattggtgaacagagggtgatatccttccatggagtaggcttgtcagcaactgaagaaacaaagtatggggatattacttgtcataccaagaatgctgatgagggaagggagctattcacaaatactttgtacaactcagttgttaatcagtacaatgtcctcaaatctgctatctttagagatcgtggagcagctgtatcaaacaatgccatctcactgtcacaaccatggcgatgaatgtagctttcccagtccagattcgatactgaagttaccttttcagaagaacaggtgaactgcaattgtgcaatttttctgggaaaaactcttgaagtttaatctttctgatatcactggactttaccaatcatggtggagcttattactctaatgcagatcctcgctaagatgtctggctggtcaagggtgattggtgattctgcagatagggatcctcgtaacattgcatgccgtcgtccgcaaattactgctccctcaggttgttcagtaatgtgctggttgggcactgaggaatccatcaggttgcatccttttgtctagacgtcgatttgtgttgttgaagtggtaaacattttcatcctgggctgtatcgtcatcatgtatagataggctcgagtctctctcttttttttttggctccacaattttttggagatataaaagcggcaggagttatgacatgcccacagtcggccctccttgtagaaatcctttggatgtaacctgtctctttcttatatacatactgaaagtcaaggcagatatcccgtgtttcgagtacgtggctccgtgactacccgcgtc

SEQ ID NO: 18268 - DNA, 617 bp, Zea Mays
gtgcaaacaagctctgagtgtttttgttattcttatttgcaaacaagctgtacaaatgcatttgcttgaatgtgcaaacaatattggttacaaaatcaatttctgatcaaaatcaaaatgaacaagctgtactttattcctcctttcatatctcagggttacaggcttcacatgagccaacagaactcacgcctccaatgcaatctacacaagctccacatgagcaatctacagagactctaaacaaacaactttctataggtattggcctccaatgccatcagctgcaaacaagagcgtgatacagacgcttcactcttcatttattgagcgattcagataggcaccacgcttcttcaggcacgaatagcacgccatctccaagggtcgtggagagatgcgcgaggctgtgcacgccatggcaggggacccgaccgcggtcttggagatgggcgtgagcgcgctgctatcccgcgagcgctaccatggtaagccgctgcagggagcctacggacgacggctgtaaatagtcgaagcggccggcgacgtgtggacggtgggcggcgacatctgggcatcttctgccacaaccgcagctggtgagtggtgactggtgg

SEQ ID NO: 18269 - DNA, 98 bp, Zea Mays
tagactatgatctgtttccgagctttgagggatcaaagatcaagcgttgcgaccaagtgatctggctcttcgagttctacaaggttgaagaccctgag

SEQ ID NO: 18270 - DNA, 1726 bp, Zea Mays
atttttttgaacatccacaccattggaatacagaattgagtatgatgcccagcttgaggagatgcttgatgaagcttatgagcgctttgtaactagaaagggtggtgaaattaaacaagaacgcaagcgtgcgaaacgaatcaatcctgacgctgatgcagacttgttagagggaggtgaagatgatggtgttgctgaaatggatcaagattttgatgaagaccaagatcttgatgaacatcaagatcaggagaccaatccccttctgttagctctagatgaacagaggccaactaaagagcagattgtaaagcaaatggtatagtcaggacgtgttcacagaagcagcaactggcattactgagcagagtgacactgaagatgaaagggagagtttgcaaaggaatatgaagaagatggttactggcaaaacggaaaaagtggctaaagcacagcgtttgcaacgagatgatattgagattgtaccagcagaacctgtccgagatgaagaggatacgtcttcatcttctggtgaatcagatgtttcggaggatgaactcgatgattacagaaaggctgaagtactagcctatgctaagaagatgctgaggaagaaacagagagagcagatacttgatgatgcttacaacaagtacatgtttgatgatgaagggttacccaactggtttgttgaggatgaaaaaaggcataggcagcccatgaagcctgttacacgtgaggaagtagctgcaatgagggctcagtttaaggagatcgatgcccgcccatccaagaaggttgcagaggccaaggcccggaagaagcgtgttgccatgaagaaactggacaaggctcgccaaaaggcagatgctatagctgaccagaatgacataaacgagctatcgaagaggaagatgattgaccggatttacaggaaggcgatgccaacgaagcctcagaaggagtatgtcgttgcaaagaagggggttcagttgaggactggcaaagggaaggtgttggtggatccacgtatgaagaaggacaagcgggccagcggaacttgtaagaaagggaagaagggcggcaaaggcggcaaggggaagggtggtcagaaaggcatgagagggaaaactgggaagaaggccgggaaagccccgagttaaggaagatgaggagctaagcacggctgggatgctggatgccttcctcccagctaattttttgtctcgtcctactacagctactctcagtaggcagatgctttgaagtcgtgtgatgataaaatttatgtgttaagttttgtagcgtgagttatcatggctacaatttgttctgaaactagtggtcactaatcttaatttacacagttcagtcaattatcaaaactttttaacccctttggcgacaccagagtataagaaatacagatgcctgcatttctactaatatttgtgtggcgcacccttgtggagacttcttttttacaggtgaggaatccgcttgcatttccttatcagatgaaatgaaggcagcactttgagggcgtgttcggctggctacaagccgacactgttgcagctgtttggactgctgcagctgcaatccatagagagaaaaatactgtagaagccgcagccgcagccggattgcagccgcagcaagccgcagcgaacaagctggaatccgaaacattgagatgcagagaccgtcatggattcgcatttcc

SEQ ID NO: 18271 - DNA, 1184 bp, Zea Mays
ccctcctctctcgctttcgtctccacgcctagggtttctctgcctcgccggggaagcgatgcagccgctgcaccaaccgccgatgaacgggcaacacggcccgcctcctccgcagggatccggggttcccacggcttcgcagcagcaggcgccaccgccgtcgtactaccagcagcagcagcagcagcagcaggggccaccgcctcagtactaccagcagggtcccccacagccgtgggcgcagcagcaacagtacgctccaccgccgccgcagtacccgcctcagatgcagcagtacgctccaccaccgcagcagtacgcccctccgccgcagcagcagtacgccgctccgccgcagcagcagtacgccgctccgccgccgcagtacgcgcctccgccgccgcagtacgcgcctccgccgcagcagtacgcgcagccgccgcagtacgcgcagccaccgcagtatgggacaacgccgggaagcggtgaggtcaggaccctgtggattggagatcttcagtactggatggacgagaactatctccactacaacgccttcgcgcctgtggcccagcagattgcctctgtgaaaattatacggaacaagcagactgggcactcagaaggttatggttttattgagttttactctcaagccgctgcagaacatactctgatgaacttcaatgggcagatgatgccgaatattgagatggcttttaagctgaattgggcttctgctagcactggggataagcgtggagataatggttctgaccatgcaatatttgttggtgatttggcccctgatgttacggactccatgttggaagatgtgttcagagctaactatccttcagttagaggagctaaagttgttgttgataggatcactggacggcctaaaggatatgggttcgtgcattttggagatctgaatgagcaggcacgtgctatgaccgagatgaatggaatgatgttatctacaaggaaaatgaggattggggctgcagctagcaagaagaatacagatgctcagcagacatatgcaactaatgggtcctgattattggagcatctaagtgcatctctgtatcttggaaactaaacccctatacatattctggtttattttttccattttcttgctggatgatagtgtttccataacagttttctttcta

SEQ ID NO: 18272 - DNA, 394 bp, Zea Mays
aggctctctaatcagtcatggggagaattcaactccgaagaaagatgtttatcaattgttcgctgagaaggttagggataacaaacagctggaatcaagatgggcaatcatgcaagaaacccgtgtggagtattttcgtggaaaagatttcaatgccttcatcaagaattatccagaagtcagggaaattttggggccagataaggatttagaagtggaagacattgttaacactttgttgaccaagaaccttgtgataaggtgtgaccgagttatgaaaactgtgaggcctggcaagaaaaagttatcatcatggcctgctcacttggagatacataattaagagctgccatctttggcatcttatgggttctccttgggaaacgcggtggtg

SEQ ID NO: 18273 - DNA, 1196 bp, Zea Mays
ctttctgctatcctgcctggtcctttgaggccttttgggttgtgattgggcatctggatgaccggtcaaagcccatcctcttctccatggcaagactcgacagggtgaagaacataacagggctggtcgaagcttttgctaagtgcgctaagctgagggagctggtaaaccttgtcgtcgttgccgggtacaatgatgtcaacaagtccaaggacagggaagagatcgcggagatagagaagatgcatgaactcatcaagacccacaacttgttcgggcagttccgctggatctctgcccagacaaacagggcccgtaacggcgagctctatcgctacatcgctgatacccatggtgctttcgtacagccggccttctatgaagcgttcggtctcaccgtcgttgaggccatgacctgtgggcttcctactttcgcgacgctccatggaggtccagctgagatcatagagcatggcgtctcgggcttccacattgacccgtaccaccccgaacaggctgctaatctgatggccgacttcttcgaccggtgcaagcaagacccagatcactgggtgaaaatatctggagcagggctgcagcgcatatacgagaagtacacatggaagatatactcagagaggttgatgacactggccggggtctacggtttctggaagtacgtgtcgaagctcgagaggcgggagacgaggcgctaccttgagatgttctacatactgaagttccgcgagctggcgaagaccgtgccgcttgcaattgaccaaccgcagtagcttgcgcaactgcgactgcgtagcacttggtacaagactgaaacctgaaggaccttcagtaatttaggcgcggcagacggtagccaataaaatgtgccggagctgaactggttttttattatgtacataatggcagtataacaaaattactgaaggcaggtgggttgcagttgtgtgttcgttactgtttactgtattatgtcaagctgtcggctgcaatttctttgctggcaagccgcaggcactggtgaagtgctgataaatacatcatattctgttgacctgtgaagaaacttgttctaggtggattccattgtactagctctgttgcccagcatctccttgtttgggaacattaacaaccagccctcaaccctcaataaaatagtcgcatcatgtagctac

SEQ ID NO: 18274 - DNA, 1363 bp, Zea Mays
cttggtgtgtcattactgaatagtttagaccgagtttgtagaacttctccatctgtctatggtgtatcacttccatggtatgattgatatgctcataaactgtggatatgagaaagggaccacactatttggatatggttatgattttcgccaaagcaacaggatagacaaagcgatggctggtttgagagcaaaacttgagacagcttataagacctctggagggaaaaaagttaatttaatctcacattctatgggtggattgctagtacgctgcttcatgtctatgaatcatgatgtattcactaagtatgtcaacaaatggatttgcattgcttgtccattccaaggtgcccccggatgcatcaatgattctctacttactggattgcaatttgtttatggttttgagagcttctttttcgtatctagatgggcaatgcaccaattgcttgtcgaatgcccatcaatctatgaaatgttaccgaatccagaattcaagtggaaggaaaaaccaattattcaggtttggcgtaagaaccctgaaaaggatggaactgtggagcttgttcaatatgaagcaactgattgtgtgtccttgttcgaagaagctttaaggaataatgagctcacgtataacggaaagaaagtagcactaccattcaatatgtcagtcttcaaatgggccaccaagactcgccaaatcctagacaatgctgaattaccagatactgtgagcttttacaatatatacgggacatcttatgaaactccatacgatgtatgctatggctcagaaagctctccgattggagatttgtcagaagtgtgtcacacagtgccgtcatacacttatgtggatggagattgcacggttcccatagaatcggcacgggctgatgggttctctgcgaaagaaagagttggcgtcaaggccgaccaccgtggcctgctgtccgatgagaacgtattcaagcttctcaagaaatggctcggtgtgagcgagaagaagtcagagtggcgttgcgtgtctaaatcctactccaaagtgggtaattgggttgccctgtagttcttcaggaagactgttattttggcctttcctcctgaagagaagatgaaacaaaattctggtgattgtattgtatgtctgcacgatgtaaatccctgcgagctgcacggaacaagggattagtgccccttgtacgatgtatcattgccagacatttcttttgaagcctagggtcatatattcattgccccttccaactttggagcatagtaaatgaataatatgaaatcgatcataatttcagaagtgttctgtatttggattagaatgttaatttgcccataacggtgg

SEQ ID NO: 18275 - DNA, 3036 bp, Zea Mays
caccaaccttggttttagcacttctcctatatgtcagataccttgggggagcatttgatgtagaatcattagtggaaaatttgttgaggcagctagctggcaatcaggaattggtggtaaatgtttatgatgtcacaaacatttcgaaccctcttgtcatgtatggatcagaagttcctcttggcaacccctcaccatcgcacatctgcatgctagattttggtgatccattcagaaagcatcatatggtttgcagatacagaaacaagcctcatgtcccatggtctgcaatttctaccccatctggtgtctttgtcatatgtatgcttgtggggtacatcgcgggtgccgcttggagtcgttatgataatgttaaggaagattgccggaaaatggaggagctgaaaaaacaggcggaagcagccgatgttgctaaatctcagttccttgcaactgtttctcatgagatcagaacgcccatgaatggagttctaggaatgcttgatatgctgttagacactgacctaacctcaactcagagggattttgcacaaaccgctcaagtctgtggaaaggctttaatatcgctaatcaatgaagtgcttgacagagcgaaaattgaagccagaaagttggatcttgaatctgtaccatttgatctgagatccatccttgatgatgtcatctcattattttcttcaaagtcaagagagaagggaattgagcttgatgtatatgtctctgaaagagttcccgaaatcttgttgggtgatcctggaaggtttcgacagataattacaaatttagtgggcaactcaattaagttcacagaacggggacatatttttgtacaagttcatctggcagatcattcaaatcttgcaacagaatccaaagttgagccggtggctaatgggatgaatggacatacagatgagaaaactgctgtagcaaccagtgtttctctcaacacactaagtggttttgaagctgctgatagccgaaatagttgggaaaacttcaagcttttgctttcttatgagaaaaatgagatgccctatgaaagtgtatctgataaagttactcttgtagtaagtgtggaagatacaggaataggtataccattggatgcacaagccaaggtgttcacacctttcatgcaggctgatagttcgacttccaggacatatggtggtactggaattggattgagcatcagcaaatgtcttgttgaactaatgggtggtcagataaactttgtcagccgaccacatgttgggagtacgttcacatttactgcggttctcaaaagatgtgacagaagcgctattggtgacagtaagcctgttatgttgcatcctcttccatccagtttcaaaggtttatctgcactattggttgatagaagaccagtaagagctactgtaactaagtatcacttgcaaaggctgggaattgcctgtgatgttgttgcaaccattgaactggctcttggtgtgctgtccgggagaaatggcagttccctaaccagtatgaagcaaccatgcatgttattgatcgagagtgattcatggggcttcaatattgatgtttctttacgatctagactcctggagatgaagcagaatggtcacacacatgtattacccaaaatcatccttcttgcagctgcagaatcgggcaaactcaaagaacactatgcagttgattctgtgatcacgaaacccctgaaagcaagcgcacttgccgcttgtctgttccaaacacttggcatcaaacagtcaagcaacgagagaagtgacaactcaggttctctttacgggttgcttcttggcaagaacatattggtggttgatgacaacaaggtaaatcttagagtggctgctggcacgttaaagaaatttggagcaaaggtggagtgcgtggagagtggaaaagatgccctcgccctcctacaggtcccatataagtttcatctttgtctcatggacattcagatgcccgaaatggatgggtttgaggctaccaagcaaataagggcaatggaagcgaaggcaaatgagcaggcagtcgcctgtgacaattcagaaatagatggtgcgacaagggcagcaagatggcgcctgcctgttcttgcaatgaccgccgatgtcatccaggccacccatgaagagtgcacgaagtgcggtatggatgggtacgtcacaaagcccttcgaggagaagcagctcttccaggcgttgcagaagttcttggaccccggcatgtcctgctaacgccgaagtgatgcgttggaggtgaggcactattctcctctattctgtaattccctaaccttggccgcaacctgatccccaagaaagaccgtgcagcgcgggctgctcgtcgatcatgccagcggggaacagcaggcagacaaggcagcacgcaccacgggccttcgctggtctgcctgcctgtgcaggcgtcgtgtaaatgtattgtatttgcagggatactgtttacagcgctagtatgccccgtgccacaatgtccgagctacctgtggctgatgcacgttgcgcataggtggttttttttgtacagcttccaccatttttgtgctccagatcagaccaccgaaggaggcaagcatgctcgctggtgcagtgcagcactggaaggaaaacctgacttcctgagagtagatttttgctgtttaattgcattgggatttatgatgtattataatcagataaatgtgtgatgtaagctggcgtaattggcccaatgcatttccattgttatggatgagttgaaatggcattggttagacacttagactacactattgggtgtatgcccttccacagttccattttccctgcaaaatatcaaaatgtgcaaagggatagtggaatcatggcttgaattatatgaattttctttggtgtttttttcccgtatcgaagctcgactataacattagaagaaagcatctggaggcatgtttaagttttggttattacacactataaaatacaagtggtatttaac

SEQ ID NO: 18276 - DNA, 1499 bp, Zea Mays
atggggacacagaaaaaagcggcagaatgggcagcacgtgatgcgatcagccatcatcaatccgccgccgcgccgcctacagctcctcccgagacgggaggcgaaggaagacgagaactagacgccactcctacagttttacgtttacccatcaccaccagtccagcaccgagcaccgaccagatcaaccaggcccgccccgacccgaagatgcagcggtggctcccggcgctcctccgccgcgccgcgcccggcggcggggcggcgcggctcttcgcctcgtcctccctcctcttcgacgacacgcaggagcagttcaaggagagcgtgcgcaagttcgcgcaggagaacatcgcgccgcgcgccgcggccatcgacgcctccaaccacttcccgcgggacgtggacctgtggaggctcatgggggacttcaacctccacggcctcaccgcgccggaggagtacggcggcatgggcctcggctacatgtaccactgcatctccatggaggagatcaccagggcctccggcgccgtcggcctctcctacggcgcgcactccaacctctgcatcaaccagcttgtccggcacggcagtcccgagcagaggctcaagtatctgcccaagtggggagcatatcggggcactggcaatgagtgaacccaactctggctctgatgttgtcagtatgaagtgcaaagctgagaaagtggacggcggctatgtccttaatgggaataagatgtggtgcaccaatgggccgtctgctcagacgctggttgtttatgcaaaaacagatctagctgcgggatcaaaaggaataactgcattcataatcgagaaagggatgcccgggttcagtactgctcagaaattggacaaacttggcatgagaggaagcgacacatgtgagcttgtttttgagaactgctttgtgccacgcgagaatgtcctcggtgaagaaggcaaaggtgtttatgtcatgatgtcagggcttgatctggaaaggcttgtattagctgcgggccctattggccttatgcaggcatgccttgatgttgtacttccatatgttcgacagagggagcaattcgggcgtccaattggtgaatttcagttcatacaggggaaaatggctgatatgtacacctcattgcagtcatcaagatcatttgtatactcggttgctagggactgcgataatggcaaagttgatcgcaaggattgtgcaggggtaattctctttgctgctgaaaatgcaacccaagtggcacttcaggcgatccagtgtcttggtggaaatgggtacataaatgagtacccaactggtcgtctcctgagagatgcaaaattgtttgagattggtgctggtactagcgagataagaagaatgataattggccgtgagctcttcaaagaggactgaaacttctattttgcaagccagataccagtgcatattgttaactgggggagacaaaaggttaccacttaccaag

SEQ ID NO: 18277 - DNA, 704 bp, Zea Mays
ctttttcctctcttctccactcttcttctctcactcctcagtctttctcttagccgagcgcccctcttcttctttctcggtttctttcactctccactcaaatccactcaaaatactctcaagtttgccaattttttgggagaaaatttatggggctgctccccttaagctcctccacactttccctccatctttttgagatttgactggatgaatctctagatcgaggatggtttgtcgccgaaatccttcagtcattgaatctgactctaatgaagactccctagagattcatgaggaggtacccacaaggtctaggtccaagcgaggaagaggctctagaaatgttgtgatgggagctgaggcctctgggtctcagagtggtcgcgggcgtatgactcgaactcctagtcgctctcgccctactgcaaatccacaggcctgggaaccttcaagcaatgatgaaggtggtaaagacgatgttactgatcttcctcttctagatgctcccattgtcaggggtctagttctgcataaggcccaagccagaagatctgcgaatgaggagatcactgattttagtgccagtggaggctcgacacctcttcatgacatgcgcttccaaaatccagcttgtaatacctactttgtaataaaaatctaaaaagagaaatttcatttctttatatatttgtgagtcatct

SEQ ID NO: 18278 - DNA, 2149 bp, Zea Mays
ctccaagccataaaaatttcatgttcattcctgctgatctttctgtttggaaggacctatattggacctctgcttgaagttaataaatgaagtggaatcagagaagacttccttcactttaagatgccggtcaaatgaagaccaactagaacttctaaaaaagcaacttgaggccaatgaatcacacaagtctgaatatctaaaacgctacaaagctgctataaatgagaaacagaaagcctctgttgatcttagtagtaatcttgcaaacctgaggaccaagtgtagcacattagaagaacgatgtgtaagcatatctaaagaacttgatcatgtccgacatgaatgcactgattggagggtgaagtatgagcaatctgtttctcagcacaaggctgaacaagatagatttgtcgctcagttggcatctcttgagtctaggcatagctctgcagaaggaaagttgggagcagctcgggaacatgcagcatctgctcaagatgaggctgcagaatggaagaagaaatatgaaatggctgccgtgcaggctaaaactgcattggagagactagcatcagtgcaagaacaaattaacaaaattgcacaagaaagggaaagttctataagggcagaatttgcctcacatttggagggaaaggaagaggaaataaggaaattagttgctaagattagagaagcggagagtgaagaaagtgtattgactgaacgcttgctggttgtggaatcaaaaacacaaggccacaacaaggaaactacaggcttgagggatgaaatcaaagaactaacaagcaagttagagtatctaagagatagagcagtatcatatgaaaagcaagctagaatgctcgagcaagaaaaaaaccatcttcaagagaagttcttatctgaatgtaagaaatatgatgaggcagaacaaagatacaagtctgcagaaagggatgcgaagaaagctgttgagttggctgatgcagctcgaacagaggctattgcataccagaaagagaaggacaaggcacagcagttatctattgaaaaggtagcagttatagagagggttcaaagacaggtagacagactagagcaggaaaaggttaatctattgggcgaagttcagaggatgcataattctgaatctgatgcctggtccaaggttactttgcttgagagtagggttgctgagagggagaaagaaatggatgatttactgagccgtagcaacgaacaaaggtctagcactgttcgtgtccttgagagtctgttggcaacggaacgtgcagctagagctgaagccaataagcgtgcagaggccttatctctacagctacaatctgcccaaggtaaacttgatatactccatcaggagctgacatcgattcgccttgttgagactgcacttgacagcaagctcaggaccactacctatggcaaaaggttgagagataatgaagtacgactgtattctatccaagatatggacattgatcctccagagaggagcagaaaaagaaccaaaagcaacactagccccttgaagcctgtccaaactgaggatggtggttctgttcacatgagagaagacagcgttacagttagcacggatgtaaaagatgacaatccagatggttacaaaaagttcaccatagctaaactgaaagaagagctaactaagcatggatttggcacgcagttgttagagctcaagaatccaaacaagaaagatatactcgcactttataagaagcatgttttgtgcgagtaaataatggccacgtgaagttccagtcttcaacacataatctatccaaactagggaaacaatagagtagtctgtcagtatttttaacaagctgatgcctcattgttctccaggcattcgtttctgctgattggtttgtattttggtgttaacatcgaattagttccggtttgtgtctaggctttgtatttcttagcttgctggttggctgggtgaagttcttaggacttctgagtgctaaatgacctcgaccaacgctagtcgtgggcaagtttgtggtacgtttgtatatggtatattgctgtgtaaagagtgctttatccaattcaaatatgatatactcttcaagtctgcatccagcataccagcaga

SEQ ID NO: 18279 - DNA, 886 bp, Zea Mays
tccatccgggcccacttgtcatctgactcagtgtgtgtgagtgggctactaggcgtcttccactcttcctctcctttccagaccccagagccagagatcaaccacctgcggcggcgatggggatcggtgagcacttcgagggcgtgaagcagcactgggcgagcaacttcgccttcctcgactactacaagaaggtctacggccgcgccgagcccctccccaagtggtccgacgccgacgtcgacgagttcatcgcctccgacccggtctacgggccccagctcaaggccctgcgggagtcgaggaagtttgcgctcgccggggccttcgccggcgccgcccacctcggcggcgtcgcgctcaagtactccaaggcgccgcacggcgtcgtgctggcgaccgggttcggggcgatcacgggcgccgtgctggggtccgaggtggcggagcactggtaccagctctacaagatggacaagcagggggccaaccttaggttcatctactggtgggaggacaaggtctcaggtccgtcctgtcccccgtgccatcttgtcctctctgacgatccagttcctgtttagtgtacgtggttaattctggacagaagagctgaaccatgttgaattgaatgatgcctatttgagcattccagtttgacaaaaacattgatgtctattatctgtaatccttattgttttgttttgtttcctagtttttctctaataaggtgcgtatcggttgtggaaaccaactggacgatgtatttttcatctctgtcagtagtgacatttatccttagtacttacaatgtttatggtcaatctggtgcaaacagcaaatcctctccgttttcaaggaatgaaacctgaagtttgtaccacag

SEQ ID NO: 18280 - DNA, 1216 bp, Zea Mays
ggcaggaggtgttttgttcgtgccttcacgggataatggattaccacagttgatgaagcaaaggaattctacccgttatttggccttggggctaatattgctcttatcttttctgggcgtactgtgaagtatttctcaaatttgcgcaggacattgggtcctggaattgatggctgggaagtatctttgaaaggaatgatgagcatagtggtactccttggacttgtcataacttccatctattggggagtgaacaagtttgttttgaatgatccttcacttccaaaggctgatcgtaagaagaaaaaggaaaagcctaaacttggcatgaaagagagtctgaaggttctgctctcctcgaggtatgtgagggatctagctaccctagtggttgcttatggcattagtatcaatcttgtcgaagtcacgtggaaatcaaaactcaaggcacagttccctagtccaaatgaatattcatctttcatgggtgatttctcgactgcaactggaattgcaactttcacaatgatgctgttaggccgtattatactacggaaatttggctggggtgtggctgcaaagatcacccccaccgttctgttgctgactggtgttggattcttctctctgattttgtttggacagccactgactcctatgcttgccactatgggtatgacccccctactggcagccgtttatgtgggtgccatgcagaacatatttagcaagagtgcaaagtacagtttatttgacccatgcaaggaaatggcatatatccctttggatgaagatatgaaggtaaaaggaaaggcagccattgatgttgtctgcaacccactgggcaagtcgggcggcgcacttatccaacagttcatgatcctgacgttcggatccctggcaaattcgactccataccttgggggcatactcctggtcatcgttctcgcgtggctaggcgcggcgagctcattggacaagcagttctcgagcctggctaagcaagacatggagagggagaaggctgcccaagaccaagggaaactagaacgctcgctactcacgtgcggcttcaagcctgcccgtaatcttcctttgtaataataacatgagcaaaatcttgacagccggcagcgaatgtcgctctggagatggcaaatgtgtgttttgaactgaatggtaaatgtgcggttatctcttgaatagtatcttggct

SEQ ID NO: 18281 - DNA, 449 bp, Zea Mays
aatgatgagaaaaatgaagatgatggctacttctgaatcggaggctgggttcgcagcggagcatgacaatttctggtccaaatgaagctgaacaagacaacactggtacaagagactataagcatgaatacgaagatggctacgtacggcaatggtggtgaaggctacgacgaaaggattgcggcgatattacggttgatgaatggcatgatgtataattttcttgatggacaaaaggatatatacacctccgatctgttttgtccattgagcagcaatctatgtaatcttatgcctaatgaacaggctaaggatgttttagacacaactactctagttggcacaatgttggattcggaagggaaacattgtaaaacgttggttgcttccttgtgtacatgttgcgcgcagcattatattatatgtctattgtttgtcatggtggcata

SEQ ID NO: 18282 - DNA, 2863 bp, Zea Mays
ccctcccccgccggcccgcccacacacaccggcctctcgcttctctcccatcctccaaccactttcccttgcacgctagtagcagtggtactagtcctaggccagtactgccaccactcgtagcccagatcagcgggagcaggaaaaaaaaatcgaaccaaagagagggggagggaggtgaaaagcttggggagaggagacgagggagcgcagcataaatcccgatccccaaatcgcaaaacctagccgctcccgatctgcaatgccgcaggcttgagtgcgagcgcacggggaatgaggcgggtggcaccggcgatgatcgccgccggcagtgctggcggcgaggatacggcggagggggcggtggtggagaagacgctgctcaacggggacgtctaccgcggcgggttctccgctggatctccgcacgggaagggcaagtacgtctgggctgacggctgcatgtacgagggggagtggcggcggggcaaggcgtccgggaagggccgcttctcgtggccttcgggcgccacattcgagggggagttccgcagcggccggatcgaggggcagggcgtgttcgtcggccccgacggcgccacctaccgcggcgcgtgggtggcggaccgacgccacggcgtgggcgccaagagctacgccaacggggactactacgagggccagtggcggcgcaacttccaggacggccacggacggtacgtctgggccaacggcaaccagtacgtcggggagtggcgcgccggggtgctctcgggccgcggcgtgctcatctgggccaatggcagccgctacgacggggtctgggagaatggcgtgcccagggggactggggtcttcacgtggcccgacggcagccggtacgtcggctcctggcctgggacctgcgtcgacctgccggctataagcggcacgttcttcgcgccggtgggcgctggggctcctgctgctgtgaggaagagatcctccgtggagggtgtgggggagaaggcgaccccgcggatctgcatctgggagtcggagggcgaggctggagacattacttgcgacatcgttgacgcgctcgaggcgtccatgctctacaaggaggccgcggctgttgcgggaggggcaacgtacacgcggaaactgccccagaggaatacccggcgagcagccagcggagtcccacgctgggcgtcgtcggcggccaccacgcctgagagtaagcgacccgggcagaccatctccaagggacacaagaattacgagctcatgctgcagctgcaattgggcatcaggcattccgtgggaaagtcttcggccgtgccgatgcgagcactgcaaccgggcgattttgacccaggggagaagttctggacacggttcccaccagagggttcgaaggttacgctaccacattcatctggagagttccgatggaaggactactgccccatggtgttcaggcatttgaggaagttgtttgctgttgatacagcggattacatgcttgcgatctgtggcaatgatgctctgagggagctgtcttcacccggcaaaagtgggagcttcttttaccttacccaagatgaccgattcatgattaagacagtgaagaaatcagaagtcaagctgctaattcgaatgttaaatagctactacaaccatttcaatcgatacaagaactcattaatcacgaggttctatggtgtacactgtgtgaagccccttaatggacaaaaggtccgatttattgtcatgggtaatctgttctgttcagaataccagatacatcgccgttttgatttgaaaggttcatcctatggacgaacagcagacaagtttgaagatgaaattgatgagacaactacactcaaggatttggacctcaattttgtcttccggttgcagcgatcttggtacaccgatctccatgaacaattgggacgagactgtgattttttggaatcagaagggattatggattacagtttcttggtaggagttcacttttgtgatgacatctctgcctcaaagatgggatcctctacttttactgcctctccaaagcttttaacaaagagtgagtcatttcaaggtggtggcacgccagagctttgcttctcggatgatgattttgatatggtacctgattgccaccggaaacctctgattagacttggtgcacacatgccagcccgggcagagcaagcatccaggaggagtgaattcgacccgcttctcctaacaggtggaggattcctgttcccaaaccagaccggcgaagtgcatgatgtgattttattctttgggataattgacatcctccaggattacagcttaagaaagcgggccgagcatgcttacaagtcattacagacagatcccaactcgatctctgccgtggacccgaagctctactcgaagaggttccaagacttcatcggcagaatttttgtggaagatggctaactggcattggatagagattaaccgcgaattccatgcggaggccagagcacctgtaatgattccgggacagtttttttgcgctcagtaaagaagtctgcataattgccaagaatcatcttcatccatggggatccggtaaagcagcagcccctcggctgggtgtaacctactgtgaagcatcaggtcagcagtgaaggagatctgagttcgaagcaaatttgccgcgaattctccggaaatcattcgagtggctggattttgaagcgcagccatgggatcggaggattttgtctgtaaaatgatgtgattcggcgggctggaatgagagggaaggcttgcaggtccttgacctgaggtggggggtgtgatgtgtcagagggagatgagtatt

SEQ ID NO: 18283 - DNA, 2176 bp, Zea Mays
ttttgccctaatacatattccatatatctatccctgttcgcatcacgactcgcgagctcccggtcccaaaccctaggcctagggggcgacctgacccgatgtcagcgtcttacggatccgaagactaccgcggcggcggcggtggcggaggctacggtggtggaggtggccgaggcggtggcgggcgcgggggtggacgcgaaggagactgggtttgccctgacgcgagttgtggcaatgtgaactttgcgaggagggctgaatgcaataagtgtggagcaccttgcccaagtggaggtggtggcggcgggggtgggggttataatagatctggtggaggtggtggaggatacaaccgtggcagtggtgattatggttctggaggtggtggtttcgaccgagatggtggagactataattctggtgggcgtggtggtggaagcgggggtggaggaggctacaatcgaagtggtggcagtgaccgtggttttgatgaccaccgtggtggcagaggtggcagctatgggggacgagatcaggagaaccaaaggggtagtgaaggtggctacagtgctggtggctatgggcaagctcctccacaagctcctccttcgtatggtggtcctgcgggtgattatgcagcacctccgagctcctatggaggcaacaatgcttatggttcagattctgcagtgccgcctcctaatagctacagtggtggcccaggctcatacccaccaagctatggtgccccgcctccacaccaatatggtggtgccccaggggggcaagggggtctgcctcctacatatgatggtggatatggtggtcggtccatgcctgggggtggaggatctgggggtgcaccaccgccttatcatggtggcggcagcggttatactggtagtgctgaccctgaaccagctggaaaagttaagcagtgcgatgaaaattgtgacgagacatgtgacaacgcaaggatttacatctcaaatttgcctcctgatgtcactgttgaggaattacaagagctatttggaggaatcggccaggtcggaaggatcaagcaaaagcgtggttacaaagatcagtggccttggaacataaaaatctatgctgatgactctggaaaagccaaaggagatgcttgccttgcttatgaagatccttctgctgctcattcagctggtggattttacaataattatgacatgagaggttataaaatcagtgttgtgatggctgagaaatcagcacccagagcggcaccctcatatgggcatggcggtggtcgtggtggtggccgcggtggtggtggacgcagggataattacagagatggcggggggcatggacccaatagaaaccagggtggtggttcacgttcacgaccatactgaaaacaaaacaattgttgttactgtgattgtcatctatgagaaaccatttctattcctgttatacagatttgtactcatacaggctcataagaggcagatggatataagctccaaatgctggtaggtttgtgatgttatttcagccggtggatcactcatgtaagctttggattttgctgcgaagaacaggtagggaggttttgttctgtgttaggtttattagatttcgtgtacattagacgacatatcaaccaccaatcatagaacgttccatatccgtttctgcttctgggcactcagcttattttggtgaaagagccaatttttttatcaaggttgcagccccatcacttgtgccctaactcatcgtccccagcaacacgatatgacgtgtgttgaagtggtgatctataagtagaaaaggagctgaattgagtgaattgttgcttcatctgcccccgtgatgcctctcgaattgggactgggagctcgtgacttacagcacttgccacgaatgggaaaccctctgctccaaaggaagcagttcaagcatatcgacgtgcttgcagggtcatcgctaaaaataatgtctcgaccacatgctaagattggaggttgttgtccgattatatatgttacaaaatattacatatgtgatcaatccaaggggtgtaacagttttctcaaagggacacactccttgggatacgctccttcacttgtatataagtgtaatgatctctggaatacaatcagtggctgtcacattctctcca

SEQ ID NO: 18284 - DNA, 4829 bp, Zea Mays
ttccacctagatcctgctcaatggggtgcctggaaggttcatttctcatagaaggggcttgcggcaagctattaactcgtctggtttttgagcgtggaagcactgatgcagcagcaaaggttgctgacacaatgagtgttgattttgtgcatgagattatatcagcatgtgtgccacctgttttacctccacgaacaggacaaggatgggcttgcattcctgtcatacctaccatttgtaatattagttcagaaaacagactatgcaccaagtcttctcctgctcaaggatggagtgcacatgattcgtccttgtcttctcgtcaagaacccctctatcctctccaattaaatttagtgaagcatttagcccagttatcttcagtaagagcagttttggcctgtgtatttggaagcagcatactatctggggacaatgaatcatcttttactcatgtgaaagattcaacacaagctccagaaactgagagatcattttttgaatttgctcttgagcaatcagagagatatccaaccttgaaccggtggatacagatgcagtctaatcttcatcgagtatccgagtcttctataacagataaatccgaagtctctttgcatcaatccaagggaaagttttgtatgaagcgaacccgtgagtctgacagtgatggtgaatcagagcttgaagagaatgtcataagcgggaacaccagttcaagttcactagaatccactaaacatgaagacgctaggctagagccaacaacttttatttcatttgattgggagaatgaagcaccatatgaaaaagctgttgagaggttaattagtgaaggaaaattaagtgatgctcttgctgtgtctgatcgttgtttgcgcaatggagcatctgataatttgcttcagttgctcatcgaacagaaggaagaaaaaggtccaggcacaggacaaattcatccatatggatctcacagtcttgggaatgatacttctcagtactgcttgaggctgagagacaaaaaagttgcagctcagctcgctctaaagtacttgcacagctgggaccttgatgctgcaaccaatgttctaactatgtgcatgtgccacttacctgagaatgatcctatgcgcagtgaggtgttgcacatgaagcaatctttacagaggtatggccatatcatgagtgctgatgagcactacactagatggcaagaggtggaagctgattgtgaagatgacccagagggcttggcactccgtcttgctgccaaaggagctgtttccgctgctttggaggttgctgaaagtgcctctttatcaattgatttgcggagggagttgcaaggccgtcagcttgtcaaactgctaatcactgatccacttaatggcggaggcccagctgcagcttcaagatttctgtcaactttaagggattccaatgatgctcttcctgtagccattggtgctatgaatttattacctgacctgcgttcaaagcagcttcttgtgcatttcttcctcaagcgtacagttgggaatctatcagatgctgagattgcacggcttaatttgtgggcattaggtctccgtgttctttccttattgccattgccatcacaacagcgttgttcttctctgcacgaacaccctcagttgatcgtagaagtactgttgatgatgaaacaactccagtctgcttctttgattttgaaagaattttcttccttgagggatgataagttaattattgcgtatgctaaaaaagcaatctcaattaacgttagctcagctcctagggaacgtcgatcgaatatctctgcatcaagggcaaaacaaaaaaaggctacaactccagctaaaacaaattttgtgcaaagttttggtaactttcagagagaagcacgcaaagcattctcatgggtcccccgtgatagtggcactaaaacacccccaaaagatatccttcggaaaagaaagagttcaggctctggaggtgatagatcctcttgggaagcaatgcctggtttacaggaggagcggacacctgtatatccttctgaggcgcaagaaagacttccttttgtctctgctcctgatgagtgggtgctgacgggagatcctgacaaggatgatgcaactcgttcatcccataaatatgaaacctctcctgatatcacactgttcaaggtagttgaaaagtttagaaaaaaggcattgatatccttgtgcaccaatgagtcagtagctgcaaaaggtgcacttgaattgtgtatgactcagatgaaggttgtgctaagctcccaacagttgcctcttgatgcctctatggacaacatagcccgggcttatcatgcaacggaaacttatgtacaggcactctcttatgctaagaatctatttaaaaagctcgttggtagtagtgatttgtcaagtggctctgaaagaagtaaggaagttgatgatgtttctgtggacactggcagttcaagcactgggagccagtatctggatgagctgtctgatttcctaactcaagcagacatgtggttagggcgtgcagagcttcttcaaagcctgctgggatcaggtattattgcctcgctggatgatatagctgacaaagaatcttcaagtagactacgtgacagattggtcaacgatgaacggtacagcatggctgtatatacttgtagaaagtgcaagattgatgctgtaccagtatgggttgcatggggccatgcattagttcgaatggagcactatgctcaagctcgtgtgaagttcaagcaagcacttcaacaatacaaaggcgatgcaacttctgttgttactgaaataatcaacacaattgaaggagggcctccagttgatgtttcttctgtccgttccatgtatgagcatttggcaaagagtgcggcgaccatctttgatgattccctttctgctgatgcttatctgaatgttctgtacatgccatcgacatttccacgatctgagaggtcccgacagtccagaggtcatgtagacagccaattcaggactgctagttcctaccttgaagatggccctcgcagcaatcttgatagtgtccgatatgctgagtgtattcattacttgcaagattatgctcggccacaaatgcttgctttcatgttcaggcatggccattacactgaagcatgctctctgttcttcccattcagtcaaccaaccacggaaggggaaacatctttgtcttcagctccatggagtgatcctttaacaactgattatgggacaattgatgacttgtgtgatctctgtcttggatatggtgccatggctgttttggagaatacaatacggacaataacacaatcgcccacatatcatgaggcacacatgattcagtacatgaacactattatcacccgcatttgcaactattgtgaaacacacaggcattttaattatctctacaacttcctggttctaaaagatgaccatgttgcttctggcctttgttgtattcaattatttatgaattcaatgtctcaagaggaggctttgaggcatttgggacatgccaagacacatttcgaagaagccttatctgtacgagatagaacaatcgaggctactaagttggtattgcggtctgctcggaataagggtgcacctggaaaaatgaccagggaaacgataatgaaatattccactcgtgtttcctatcaggcgaaggtgcatggttgttgaaactctggctgaaaagcattttgatttagctttcagaatgcttcatgagtttgatctcccagctgttgatatttatgctggggtagctgcatccctcgcagaaaggaaaaaagggggccagttgacagagttcttgaagaatataagggggactatagatgatgatgaatgggatcaggttattggtgctgctataaatgtttatgccaacaagcataaagaaagaccagatcgccttatcgacatgctaatcagcaatcacaggaaagtacttgcttgtgttgtctgtggacgtctaaaaagtgcattccaaatagccgcacgaagtggaagtgtcgctgatgttcaatatgttgcccatcaggcattacatgcaaatgcattgacagtgcttgatatgtgtaagcaatggctcgcgcagtacatgtgataccatagatacttgctgagagagttctcacgtgaagacagaaaaactaaggggcatttggtttgaagagtcaatctattttagatgatgttgtgtatcataagtttattttataaatttggtggaataaattcgttctccatattattactaattatgagcttatgatgaatgaaatgctgatgaatcaatttattatattcaacaaactaaaaaagaaagtgagaggtgagaagatgatagactatcttaatccttaaaccaaacatgtcacaagtaatcaaagcaaggaaccatctgaaagctggtgttcaatcctcatatcccatttcaacttctttccgctttccacttcgtgcagcacaatgcctccatgtgtatatgcctctttaagggcatattcgttatactatcctattgcattctttggtctttgctgctccctcggtcctaaattataaaatattttctagatttatagctttttgttatgtatttaaatatacattgtatctaaatatatagtaaaaaataatgtacgtagaaaaatcaaaacgttttataatttagtgttgtaaagctttgtaatttcattacttgtccatccagtgagactgtttaattgtgagcgcttggcagcccacaaaacagtcagtgccagc

SEQ ID NO: 18285 - DNA, 824 bp, Zea Mays
ggaagatgcaacaaagttttaagaaccatcaccgtgtgattggggcagaccatacttgacaagggatttctttcacctcttgggagaaaagatgggggataatgtgatgcttatagttgctgaaaaagatgataaactagttgctggcgctcttaaccttattggaggtgatacactatttggccggttatggggatgcctgccagatgcttactttcccaatttgcattttgaagcttgctattatcaggcaattgaagcagccatagagttaaacctgagtaaggtggaggcaggtgctcagggagagcacaagatccagcgtggttacctcccagtgacaacttacagctgccactacttttcaaatcctggttttgcggcagctattggaaattatcttactcatgagacggctcaggttaagcatgctattaaggtccttcgtgattccggaccatacaaggaagacatactgaaagagttcgctgctcaacaagacgacgacctgtagaatacagaagggacttaaactatttgcatactgttttatagaactaacatcttctatgtagcaacagggatacaggtcgtccaaagtgttaccaaactacgaatcccacatttggacactgctaggactgtaaatatttaacattgtaacatcagtcttacggcgttgagttgggagctatagctatactcagttgtctcgctcttacttttccccaacagaaggacttgatgcttcctgtatattgcgctttgactttgattagatttataggaaaaaaattacataaatatctgcagctgtcattcag

SEQ ID NO: 18286 - DNA, 416 bp, Zea Mays
actgccacgtcaccgcatttgcacccagctttcctcccatcccatggcttccctcctctgccccgcctcttcctgcccctctgcttcactgcgccgcacagccgcctcccccgctgcaccatccttcgcctcaagtcggcactacggagccccgcttacgttccgagtcgcctctcagccgccgcaggcccttgccgcggccccttacggctacggcagcgacctgctcaggcccatcgacacacagacgatcatcatagccgccgccgtcgtatccgcagtctccctctctctcgtcctcggcctcaagggcgacccggtgccgtgcgacagttccattggacgtcagcgcttcacttggtggttttcttagtcatttcagtgcccactacaaattgatggaaattatcaatagg

SEQ ID NO: 18287 - DNA, 3337 bp, Zea Mays
gcgccttctctcttcaccctcaccactcgaagtctctcgaacagacgagcggcgagcgcttctcctcgctagaagcgacagcgaagtgaacataaccaaaacgacggcaatcgccgagtccatatggcctcgatcagtgctcccgcagtagcatgccgcgtcgcgccggcgcgcgcaacaacctcggttcttcccgcgcactcgcggcggccgggatgcaggtcggtggtgtggcggtgctgggccgcgacgagggggagacggaggcggtgggcagggctgcgggcaaggtgccgcataagctgcgacgtcagccagccgtcagccgtgcagccagattctgagagctctggggagggattggtggcgcaggacgacgggccgcggcggccgccattcgacatcaacctcgccgtcgtgctcgccgggttcgcgtttgaagcctataccagtcctccggcagatgtgggctggcgcgaaactgatgcggctgactgtcagacagtgttcctgtccgatgtgtttcttcgtgaagtatacgatggacggcttgtcgtcaggctgaagaaaggcataaaccttcctgcaatggatccatggggtactagtgatccttatgtaattctacaactgaatggccaaactgcaaaaagccaaattaaatgggcgacaaaggagccaacatggaatgaagatttcacgtttaacattagaaaatctcgtgaaaatcttctgcaggttgcagcttgggatgcaaaccttgttaccccacacaaacgcatgggaaatgctggattataccttgaatcattttgtgatggtaacaatcatggtgttactgttgaattagaaggcctcggtggtggtggaactatagagatagaggtcaaatataagagttatgacgatatcgagcgtgaaaaacaatggtggagaatacctttcgtgtctgactttcttgtgaagagcagcctgggatctgctcttaggatggttcttggatctgaaagtataaatgctagtcagtttgtgaagtctgcatttgggcaactgagttctttcacatacacctatcttccaaagccatcatcattggaaagtggagttgatgtttctaaaagtgatgaagaatcctcagatggcccaactaattcaaatgagcttcaacaacagaatattgattctgaaatcatttcagattctcattctcatagtgaagttcaatctcctactgctgttgttaatagtgaaggaaattcatcgtctgatatgaagaaatcagatgaatatttttggagagctctgaacaatgtactaaaccaaaatgtactacagaactttggattttctctcccggaggtcaagcaattgggtggttttgacctattaagttcacttggtctgaaatcacgcaatattgctgaacaggaatatctagaatctggacttgcaatggcagatacttcaacaaatggtggcagtgaaacaacttctgaaaatacagttggtgttgagaatgaaaatagaacattgacaaccaaagaggaggtgcaatcttcctttccagatataaataaagtatctcgggatgtattgtctcaaacagaaaatatactcggagctctgatgatactttccaaaaatctctcaccacatgatcagtcagtaccgacaactggaacaaatgggaaatatgacatgattagagaagagcaaggtgcttcagctgcagattctgttcaaaaggctgatactgtttcatctgcgttactgtccattgatgcacaggaagcagaggatatgcggcgcttgtttgcaagtgcagagactgccatggaggcatgggctatgcttgccacttcactgggacgtaacagtttcatcaagtcggactttgaaaagatatgttttcttgacaatatttcaacagacacacaagttgccatatggtgcgattcttctcgaagaaggttggttgttgcctttcgtggaaccgaacaatcaaggtggaaggatttgcgaaccgacttaatgcttgtacctgctggactaaaccctgagaggctaggtggtgacttcaaacaagaagttcaagttcacagtggattcttaggtgcatatgactctgttaggaacaggatcatgactctcatcaaatatgccattggatacgatgatgaagaagatgcagaaaacatacctaggtggcatgtttatgtgactggacacagtttaggtggagcactagcgactcttcttgctcttgaactttcatcaagtcaaatggccaaaaatggtgccatatttgtgacaatgtacaattttggctctcctagagtgggaaatagaagattcgccgaagtctacaatgcgaaagtaaaggacagttggagaattgtcaaccaccgggatatcattccaacagtgccacgtcttatgggctattgccatgtggaagcaccagtttatcttaaatttggggacgcaaaagatgcaccggtaaataacagcattctagatgatgaagaccaaggtgacgtgataggggagtacacacctgatgttcttgttactgaatttatgaaaggcgagaagcaacttgtggaaaaactactgcaaacagaaataaatttactccgctcaatcagggatggttcggctcttatgcagcacatggaagacttctactatgtcacccttcttgagaatgtgagatcaagttatcaagtggcagatactgccaatgatgaataccaattgacagcgtgatcctagtaaaactgcacagctgaacatcatggactgtgtttccctgcaaaaacttcatttctgaaggacactgaatggggctatgaaagtgtgcaatccttactcttagtggaaacatgaacaggcagaacagccttggacctcagtcaggatagaggaaatgaaactggtttcactggcggatatacttgtagcaccgtgtcaattggtagatatgttgtttgagctattttccgttgatgtagctagcacactttggaatatattgtatgatgtttgaaattctagaaaagttcatagacacctgggagaataactcaagaaatatccaagtccgttttggccaatattttttttcatggagaaacttgcacaccgtggtaggctaccggctacccaagggctgatagggtgtgttaatcgagtgtacgacctagataaaaatgttcaatgtgatggaactatatatcttgcatggaataaagtagcatcatgtaatttcggcattttttcttgaacatgcatgtgaaccgcgtcattatattaagatagaataagttatctggca

SEQ ID NO: 18288 - DNA, 459 bp, Zea Mays
agtttagggtttggagacggccgtcatccctcgcgcagcgcggctaatcgttcgacacggagacgaccgccgccggcagccgagctgatcagtctgtatctattccccacgggagcaaaagcaaggttggcgaatgtcaaggagcttgacagatatgatttagggagagatggtgtctgccaatgggagcatacattagctctgatcctgtgaagcgtgtcagtcaagaccatatagacagcagtagtaagaaccacccgaaaacaggcgagtcaccaagccatattgtatcagcgacgatgaaaatcatgttctcattctggatgttaaatttgagaccaaaagatggtgtattcgttcaagtgattttgtatcctattcatagttcccttaactgaaaaaatatgttccttttgtatgccctatccttatattagcatgaaaccattggcctgcaag

SEQ ID NO: 18289 - DNA, 2071 bp, Zea Mays
acttgttttaaccaaacaacatgacaagctttggcaactggagacattgctactgcaaaaggatacctatgtcaactacagccaggccttgagctacacaagccaagcactaagccagaaccttgctggtctaaggaaaagaagtccaatccgaaaaattagcagcacattgaactactatctggaggacaactggaaacgtgtttgggtgcttgcagtatggattggaataatggctggattgtttatttggaagttcattcagtaccgtaaccgttatgtctttgatgtgatgggctactgtgtcacaactgcgaaaggtgctgcagagactctcaaactgaacatggcacttattctcttgcctgtatgccgcaacactatcacctggctgcggaatacgaaagctgcacgggcattgccgtttgatgacaacattaacttccacaagggaaccaccttgtatgtgattttccacggctcattagttcatcagaggtgaagtatgctccactgcgcaaatactttggggaaaataaaccaacatatctggatctggtaaaaggagtggagggcataacagggataatcatggttgtgtgcatgcttatcgcttttactctagcaacaaggtggttccgccgtagcctggtgaagcttccaaggccatttgacaaactaactggcttcaatgcattctggtactctcatcatttgttcatcattgtgtacatatcacttgttattcatggagagtgtctataccttatccacgactggtacaaaaggacgacatggatgtaccttgctgttcctgttggtctgtatgtaggggagaggactctgaggtttttcagatcgggcagttattctgtccggttattgaaggtggctatatatcctggtaatgttttgacattgcagatgtctaaacctcccacattccgttacaagagtgggcagtatatgtttgttcaatgccctgcagtttcaccttttgaatggcatcctttctcaattacttcagcacctggggatgactatctaagcattcatgttcgacaacttggtgactggacacgggagctcaaacgggtattctcagcagcttgtgagccacctgtgggtgggaaaagtggccttcttcgagcagacgaaacaaccaagaaagcgttaccaaaacttttgattgacggaccatatggttctcctgcacaagactacagcaagtatgacgttttactacttgtcggattaggtatcggtgccacaccttttattagcatactgaaagacctgctcaataacatcatcaaaatggaggaagaggaagaagcttcaagcgatctttacccaccaattggtcgcagcaaggcacatgttgatcttgacacccttatgaggattacctcaaaaccaaagagggtactgaagacaacaaatgcttacttttattgggtgacacgtgaacaagggtcttttgattggtttaaaggggtcatgaatgaaattgctgaactagatcagaggaatatcattgagatgcacaattatctcacaagtgtttacgaggaaggggatgctcggtcagcactcattacgatgctacaagctctcaaccatgccaagaatggtgttgatatagtttctggaactaaagtgcggacacattttgcaaggccaaattttaaaaaggtcttatctaagctccagttctggcacaggaactaagcaagctctgttatgaattcaatggcaagtctacaacaaaattcgaattccacaaggagcatttctgacatacaacaaggttaatgcagaatattggaacaagggggagaagatgtgatgtatattgggataggctggcctccttcgtgtcaaaacccgagccacgtgaatgtgccagagattaactagaaagacggttccctacccttgcacgatgatgtcacgcaggtctcatcaaactcttgaattttgatacttgaaaattcaaggcatacattttgtagctagcaattttgcaaagtcattgttttgtaaggcaattttgcgaagccaattatcc

SEQ ID NO: 18290 - DNA, 2416 bp, Zea Mays
ggttcgctggcgatgcgtttcgagcattgaggacacagctaagagaaggacccaaaaaagcaaaagtttcaaagaggttgaaaaatttgatgtttttgtgctggagaaaagttctggttgcaagttccgatcgatgcaacttttgctcttcgctatcatgtctgctgcatttctaacaatcctatacacaccatctgtgtatgaacatcagttgcagtcaagctctcggcttgtcaatgggtggatatgggataagaggagttctgatccccgatatgtatcttctgctagcattcaatgggaggatgtatataaaagtatccaaaatctgaatgttggtgaacagaagctcagtgttggactcctgaattttaacaggactgagttcgacgcttggacacacatgctcccagaaagtgatttttcaatcataaggctggagcatgccaatgaaagcattacctggcaaactctctatcctgaatggatagatgaggaggaagaaactgagataccatcttgtccttcgcttccagatccaagtgtcccaagagcaacgcattttgatgttattgctgttaagctcccctgttctcgtgtggctggttggtcaagagatgttgcaaggttacatttgcagttatcagcagcaaaattagcagcgaccacagcaagaggcaatagtggaatccatgtgctgtttgtgactgattgcttcccgattccgaacctcttctcttgcaaggacctagtgaagcgtgaaggcaatgcttggatgtacaaacctgacgtgaaggcgttgaaggagaagctcaggctgcctgttggttcctgtgagcttgctgttccactcaacgcaaaagcacgactctacacagtagacagacgcagagaagcatatgctacaatactgcattcagcaagtgaatatgtttgcggcgcgatcacggcagctcaaagcattcgtcaggcaggatcaacaagagacctagttattctcgtcgacgacaccataagtgaccaccaccgcaaggggctggaatctgcggggtggaaggtcaggataatacagaggatccggaaccccaaagccgagcgcgacgcctacaacgagtggaactacagcaaattccggctgtggcagctcacggattacgacaaggtcatcttcatcgacgcggatctcctcatcctgaggaacatcgatttcctgttcgcgctgccggagatcacggcgacggggaacaacgcgacgctcttcaactcgggagtgatggtcatcgagccttcgaactgcacgttccggctactgatggagcacatcgacgagataacgtcgtacaacggcggggaccaggggtacctgaacgagatattcacgtggtggcaccggatcccgaagcacatgaacttcctgaagcatttctgggagggcgacgaggaggaggtgaaggcgaagaagacccggctgttcggcgcgaacccgccggtcctctacgtgctccactacctggggaggaagccgtggctgtgcttccgggactacgactgcaactggaacgtggagatcctgcgggagttcgcgagcgacgtcgcgcacgcccgctggtggaaggtgcacaaccggatgcccaggaagctccagagctactgccttctgaggtcgagcctgaaggccgggctggagtgggagcggcggcaggccgagaaggcgaacttcacggacgggcattggaagcggaacgtaacggacccgaggctgaagacctgcttcgagaagttctgcttctgggagagcatgctgtggcactggggcgagaagagcaagagcaactcgacgacgacgcggaacagcgccgtgccggcaacgacaacgacaacgcctgctgctgcgagcctgtcgagctcgtgagacttgtagatagctctgtctgccgagagtagtataccagtaccagatacagaacttctgaagctccatacatacatagcgacagctctgtaaaggtagctatgtaggccttttccttccccgaatgactatataccttcgtcttcgttcgccgtcacagctgcaggcagctccctccctcccgctggtttccgatggttaacaattcttttgtttttgccaataattcatcagtataggatgtcaggctatgttgcctcaattcccagtggctattgctgtgctgcagtacgtctggtttgatatgtggtggttgaacggatttttcagtgataaaatctggagtggtgcaatatggggttgctgaccatcgaacactgcgtcatcttgggacgagtatgacggcatcaccttttatgccgtagtgaagttggaatttagctcgctcgctcgctgggtaccgaaggatgaacgaaaccacccttgacttgtgagccgtttgga

SEQ ID NO: 18291 - DNA, 3056 bp, Zea Mays
tactgctgggaacttctttgaagctgttgtactctgcgataccaaatttgatgcatcacagtatgctttctttggcaacaatgccgtggaggaggttgaactaggtggattggatgatgatgatgatgctgcatttattgagcacgaagatgaagaaaaccctctttatgggagggataatatgttggaggagggtgtaggttcatttgctgacattgatgatcttgctggaactttctcgaagctgaccagaatagtcaatggaccaaagcaaccagtagtagttagtcatagtggatcaatttctagacaaagttctaatgcagagtgggtgcaagagtctgaacttccatattggcctacacagcctgtattggacactgatcacgggctggataaaaagaattggtggtcccaaccaccccattcagtcaacttcattgactatagactgcagaggacatcgtcatccccacagcaagatgctcagcataatcctgttgaacctattcttgaagcaaagccatctcctttacatagaacatcaacgtacccacaacaagaacctcagtacagtaatactgaaccaattcctgtgcccaagtcatcattcatttcatgtcctccatctggtgcagcatctcattcttcacctagtcagccacatcatgtgaacatgccatctcctcccactgcattccagttgcatatgtcttctgcacaaaatgatctactccttccccagttccatcatggaggtacgcctccagggcctccatttggtagacagaatcatgttttaaataatggatcgatgcatggaaagggtcccaggtttatgccaggtttgatgcctcatcaattgcaatgtcccaatggactgatgccacctcagatgcagccacctcatcaacatggaatgctgccaatacaacagtccccaccacagttctcacaactacatgcacggatgattggtccccatcattccccaccacaaagcatgcagatgtttggtcctcaacatccttcttcacaagtgatgagtagatttgatgcaaactttgctatgcctgacttgagtgatccaagagcaagatcaatgttgcaacatgaaaggctgggacagcgttatcctcaccaaggttatgagctcaataatattaggatagataatggatggtcacggttcagatccaagtacatgtgtactgaagaaatcgagaacattgcaaggatgcagcaggctgccacacacatcaatgacccgtatattgatgattactaccatcaagcttgtttagcaaaaaaatcagcaggggctcaactaaagcaccacttttgtccaaccttgattagagatccatcttcacgtgcacgcagtaaggatgagccacatgcatatctacaggttgatgctcttgggaggcttccattttcttctatccgcaggcctcgtccgcttcttgatgttgaacaagcctctgcaccaagtgataatgctgaaaaatctgtgtcaaagcctcttgaccaagagcccatgcttgctgctaggatcacaattgaagacggactttgcctactgcttgatgttgatgatattgatcgtctgctgcaatttagccagcagcaagatggtggtttgcaactgagaaacagaagacaggggctcctcgagcagcttgcagaatcactgcaattagttgatctccttgcaccaaataagaattcacctgtgtctccgtatgatgatttggtgtttcttcgcatagtcactctatcaaagggccagaagctactttcccattaccttgagcttctgacatcaggcagtgagcttgcaaggatagcttgcatggcagtcttccggcatctaagatccatatttggaaatatgccctctgatatcagtgcagtggagacaatgaatagacttgcaaaagctgtatccgcacatattgttcagatggatttgagtgatctcagtgcttgccttgctgctgttgtgtgttcatcattgcaaccacctcttcgacctctgggatccccagcaggtgattgggcttctgtcatcataaagcatcattcgacgccttttttgggctgcttacacagtactgcatgagtaagtttgatcgtgtggttcatactgcccaattgcaacctgctgctgcaaccgttataaccagggaaatgccagtagagcttctgcgtgccagcctccctcataccaatgaggctcaacgcaagcaattgctcagttttgctcaacgcactgtgcctgttggtacccacagttctcatgggtcttggtagtggaagcatcgagttcttattagaactgagtactcgctaaaaatggctctttaggggacctgttatgcttcccctgaaagaagagagggttaaacttgtcactagtactatgaatatcaaaaaacaagagtaaagatggttggagcatcaaaatggtaatactcaacatcaaattttgtgtcactcaaacatgtttgcatggattacttttgtagggtagtcagatgtctgcgtcaattttgtcaatacctgtgttggttattgcaaaatggttcctgtgggtctgttgctcttaagaggaatccgcaattggtctgtagcggttacttgaagacactgtttaattgctcttcaaggtggttcttttcaaggagtagttgccttggcctcaagatgtggaagttggcatagccacaacacgtcgttaagttcttcaggaacaatgcggttgctatggaagttgtaaaatggtagtattattgttttgcgacggccttttgccttttgagaactacaactgatgttgcccatttctctatgcttgatgtgcagaaagtggataaagcttgcatgcatccttactgaattgtgacatttatttggatagataggcgctcctttctttaaagcactgattttgtacggaaactctgatatagctaatctttgggtgcctgctgaaatgatgggctaggacgatttgtatatgaattcggattggtgaaatgaaacctaaactg

SEQ ID NO: 18292 - DNA, 1109 bp, Zea Mays
tacaaatggtgcacagttacaagcagaatctgacgcctttaatgtaaatggacacaagaccttcgttgcaatggatgattatcttgtcactgacaaaatcactgcattcatagtgcaaacgcaacatgcagcaactgaagtccttaaagaaaagcaaccaaaagactgtatgaaatggaccaagtattgcagacaatattacaaatattggacacgttcatggctctttctgaagatactcatggagaaattatcttgtacctgagaatcccccttatttttgcacaattgatggttgtgtcctgtagtggctttgataattcatcactcctaaacgattttagaaagctataccaactaatgtgtggaggacctgggcaaggggtggtagtcgcgctggttcgctatccacggcggcaagccgcctactcgaagatcccacctccgaggacgccgctacggggaggacatgggcactaatcttgaactaaaactaggggggtgtctatgtaagttaatactttctctcacatttgcatcaaaatttgttttccgataatcaacagatcttgacatgtttctatgacggctggttccgcctacaaccacgtggacaacttcttgcccgacatcatctcccagcttgttccacctacaaccgcgtggacaacttttcacccgacatcatctcctagctcctcgcattcgccaacaagttctgctatgagggcttgaagccaacctacgacaatcgggtcacaaccatggtgttggctcttgacgacgcctgatccctcatcgacatcggcctctaggaggcctcccacctcctcgtcacctcgtgcctctagcattcctatgggagcccccaaagtcactcacccacctagacatcgcccgtgttgttatttggtggtcagtatgtcacaatatagtcagttttttttgcttatgttgttggtactgattttattggatgtgaatttatttatcctttcattgtatattggaattcatgacattatctacatatgtacatgcttacatatctattatatttttgtataaatatttttttgatagtttttaatttgtatggcaaagcaagg

SEQ ID NO: 18293 - DNA, 984 bp, Zea Mays
tgacttgtctaacagaccatatttgaagccagaaatcatatgatgctggtattgtcattgaagataagaattggccaccctttatgcccattattcatcatgacatttcgaacgagataccaattcacctgcaaaggatgcagtacctggcgttttcttcactattgggattgacagcttgcctcttttggaacatcattgcaactacagcagcatggattaaatcagaaggtgtcatgatctggttgctagcaatcatctacttcatctctggtgtccctggggcctatgtgctttggtatcgcccgctttacaatgcgatgaggactgaaagtgctttgaagtttgggtggtttttcttgttttaccttctccatatcttattctgtgtctggtcagctgtggctcctccatttccattcaaaggaaaatccttggcatattttacttcattggatttggaatgttctgccttgaatcactgctcagcatcgttgtcattcagcaagtatacatgtacttccgtggaagtggaaaagctgcagagatgaagcgagaggcggcccgtggtgctatgaggaatgccttttgatagagcgacctaggcgactggaagagacacggtgtgacaatgggtaactacgttatgtacatatgctgttcgtctctgagattacttatactagcttatagccttcttgccttcatgcaatgtataccacctaccaccggagcttgatctcttacctaggttcagatgtgcttataggtaactagttttttttatacatttcctacatgatttgtactcttaactcgcgagacaattgttgttgttctttggatctcgagtgattctttgcacggcctgaaaccacttggtcttgaactttgtcagattcttgctgaagtggatattcaggtcatctttttttttctgtctttgcttactatctctttctatcaaggtttggttcagatatg

SEQ ID NO: 18294 - DNA, 1801 bp, Zea Mays
ccagcctctcatctcatttctgtgtctttgggctgcgatcggatgatggacttaggcacacgtgactggtggactagacaggaaaatcccaagttacgacgacttccccgagacgacggcgtaacaaggggggaaaaaaggaaaggggatcgccatggcagcgtcgccgcagcagcaaggccagggcggccctggcagcggcgggtggactcccgagcagttctggtcgctgctggacaaggcggaccgccggttcgcccgggtgcgagacctgccctccttcggccgccaggagcccgacgagttcgccaaggccttccgcgcctacacccagctctggcggatgcagcaggagcaccgtcaccgtcttctcgacgcgggcctccgccgctggcaggtcggcgagatcgccgcccgcatcgcccacctctactacgcccagtaccagcgcaccgccgacaccgcgcttctctccgaggcgttcgtcttctaccacgccgtcctcgaccgcgcctacttccaggacgccgaccaccacctcgcccccgccaaacacctccgcttcctcgccaggttcctcctcgtcgcactcctgctcggcaggcgttcgcacaccgtcccgcgtctcgcctcggacatacgcacgctcttagatgactccaaaaagtccttccaggatgccgaatacaaggagtggaagcatgtcgtgcaagagatcgcgaggttcctgcgagctgactcaccatttatgaacatgaggccgctcaggtacagctatgcattcgatccgcccccggacacgcttcgtactgtgccaactactgtcaagaagcgaggtctcgtcttaagtgacaccatactttgcagctactatcctaacgaggtcaaatttacagacctctccatagatgtattcagaatggttcagtgcctcgaatgggaaccatgtggttcatttgcgctaaacgatggttacagcgcccatgatgaaagtggacaaaatcaacccaatctattgaaagatttaagagatgctgcactgcccccgaatccacttaagacaattctctatcgcccttcggtaacacatttcctaacggtcctttccacaaaatgcgaggagcttccttcaaatggtatcatgttaatatatctttcagctacaggggagatgggaacttctggattttgtcctgatactggtgaaaatgttttgagcaactttaataagtttgacatatccagtcttagtcatactagttcaaaggaaaacaaagaaccttgtctatggttaggctgccgtgaaactgaaggttcaaattgcatataccctggtgatctaatcccatttacaagaagacctctatttttggtgattgacagtagcaccagctatgcattcaagtctattcatggtactgaaaggggggagacttctgccatgctactttcaccaagttcccgatcttccgctgcgggattcagtggcgattctactcggcacagtggtagccaatttactatgttcctcacatctccattgcaagctttctgccttctgcttggcaacaatgggacagatattgacagggatgcatataacaaagctgaggagttattattattgtccctaaatgaatgggctgcgactttagttgcatcatcttcacttcattctatttgggttgaagttttaggcgacccgctcctaagaaggttacttctcagagggcaacgcgccgccacctgcacgacgcacagctgctggtcccgcctggagaagtccttcttgctaccgaag

SEQ ID NO: 18295 - DNA, 2232 bp, Zea Mays
ctcctgctgtctgctgccgaagtcgccaactaacatagatcgcaccatttcccgttcacctccccttccgttacatcccaccatttgctgttcaccttccctcccgtttgcctcctctcgctgtctcgtagcttctttcctccggcgacggctgggcgagcggccgccagtcggtcccttcgtcggcgacgagcatccacctgcgccggcgctccatcttccgctccctcccttactcgcgctcggcacacaggcgacggcggcggcgctcaggatcgggctatcaccgacggggtccggcttctccgcccgcctctcgccactcgtcctcgcctccggtcctccgcacaccggccggtgatcctgcctctgtaggttttttgtactatactttttagtggttctggccttcttgacacaatggtgaagctgacaatgatagctcgtgtcactgatggccttccactggcagaagggttggatgatgggcgagatctgaaggattctgatttctataagcagcaagctaaacttcttttcaagaacttgtcaaaagggcatcatgaagcttcacggatgtcaattgagacagggccctactatttccactacattattgagggcagagtatgttatctgactatgtgtgaccgctcttatccgaagaaacttgcattccagtacctagaagatctgaaaaatgaatttgagagggtcaatggcaaccaaattgaaactgctgcaaggccatatgcttttatcaagtttgatacattcatccagaagactaggaaactgtatttggatacaagaactcaaagaaacctcgcaaaactgaatgatgaactctatgaggtgcatcaaattatgactcgcaatgttcaagaagttcttggtgttggtgaaaagctagacctgaaatgtcaagcaggttgacttctgatacaagaatatacgcagataaggctaaggacctcaaccggcaggcgttgattcggaagtatgctcctgtcgccattgtcattggggtagtattgatgctgttttggctcaagaacaagatatggtgattgtacagtacgaaggatactgggccctgttacaacaccggagaagaacagatggagataaaaaccaggtctattctggaacaagaagatgctttggtgacttgtatcccgtatctgcccattcaagcgattacttaagctgcccttttgctcctccctataagctagtatcaaagtgaattcgttggagtgcagacctgataagagcatctccggaagtctttcaaaatttcactctaaattctcattttgagagtcatttgcttaataattgttattatgtttttttcactctccaacagcctttaatatcctgtttgcactagggagccattctctttctatattggactaccgatgaatttggaggagatggatatattcggatagctgtttttaaaaaaagctgttgggggaatcttagcaattaggaagggtatagtctctagagaaactcatattttgtgcatccgttgaactcaatgtaatataatataagagctctagagttctacatcggggttgtggaactcaatgtaatacaagagctgtggagttgactttacatcggggttgtaatttttagggtggaactcaatataaagattcagggtggtctgatgagttgacgaaactcgagcatgctttttatagctgcctaatatgtattgatttaaggtcagagagagtcgtgtatactacagctacgagcagaaccctccgtggcaactggcacccaagtcctgtcctgtccagcaaaaaggttgggtgcgccgtgcgcgtctccacggggtcggagtcggaggtggatgggcagtgggcaaagcctctcgcgctggcgaccgtgcagatacaggctcagtgctcaactgtctcacaggcaaggatggcaatcgggccttattattcgcggataccttattatatccataaccatacccacggataccaaattccaccatacccgcatccaatggataattatccgcggttatttacccatacccatacccatacctattgctatccctactcacaggctcacagccgcgcacaggaccgtgtcggtgtcacggtggagagacgtctcggcgagtcggtggtgccacaatcgcggacacctggcgacgttgctgacagtcttttactacaccctttctaa

SEQ ID NO: 18296 - DNA, 2409 bp, Zea Mays
atctctctctctctctgtctcccaccacctatcttccctccccatgtgggcggcctcgagctctgcttaggtctcacagctgtgctctcgttggttgggtgatccgccccttgtcggctcctttcaactcgagagctccgggacagcgagatctgcgctgtcgccgccttacctttcttacgagctcgcgtgcaggcaccttcagagatggattttttcacagagtatggcgaaggcagcaggtacaagatagaagaggtcataggcaaaggcagctacggcgtggtttgctctgccgtggacactcatactggcgaaaaggtcgctataaagaagataaacgacatcttcgagcatgtgtctgatgcgacgcggatactccgggagatcaagctgcttaggctcctgcggcatccggatattgtggaaataaagcatatcttgctccctccgtcgaggagggagttcagggatatatatgttgtctttgaactcatggagtctgatctgcaccaagttataaaggctaacgatgacttgaccccagagcattaccagtttttcttgtatcaattgcttcgaggattgaaatacatacatacagcaaatgtatttcatcgagatctcaaaccaaaaaatattctggcaaatgctgattgtaagctcaaaatatgtgactttggcttagcaagagtagctttcaatgatactccaaccgccatcttttggacggattatgttgcaactaggtggtaccgagcaccagagttgtgtggatctttcttctccaagtatacaccggcgatagatatatggagtattggctgtatatttgcagaattgttaactggaaaacctcttttcccggggaaaaatgtggtacatcaacttgatataattacagatctccttggaacaccttctcccgaagcaatatcaaggattcgtaatgaaaaggccaggcgctacttgagcagtatgaggcgaaaaaagcctataccgtttacgcaaaagttcccaaatgcagatccacttgcactatgtttgttagagcgaatgctcgcttttgagccaaaagacaggccaagtgctgaagaggctcttgctgatccttatttcaagaatatagccagtgtggatagagagccttctgcacaggctgtcacaaagcttgaatttgaattcgagaggcggagagttacaaaggaagacataagggagcttatatatagggaaattcttgagtatcatccaaagatgctgagggagtttcttgagggaactgagtcaagtggtttcatgtacccaagtgcagtagatcattttaaaaagcagtttgcataccttgaagaacattatgccaagggatctacaggaactccacctgagaggcaacataattcattgccgcggccgtctgttgtctattccgacaaccgatcacaaaccacagccaacatcaccgaggatctttccaagtgtatgctcagagaaaatacacagaagacacatccatattctgcttctgttgcaagtaaatttccaccacatgttcctcaaggtgatgttgcaaggcctggtaaagcagttggttcggtgatgcagtacagcccatgtccagcgcctgctgccgagcgatatgagcaacgaagaatcgctaggcacccagcagttgccccaaacaatatcccttctggaagctcataccccagaagaagccagacctgcaagagtgagacaggtgatgccgaaagccatatggatgcgaaccaagctcggcagccaaagccatatgcagcgaacaaactacctgctaccgttgatagtcgtggtggtcactggtaggatttctgcggtgcaccagaaagccattccaaaccgtttcttaacatgttatcagtatcgattacttctgctgagtgctacattattctgacaaatccagaaatgtagttctgtacagatttgtgttctttttccggatacctgaataccgaaagactgtacaactgtagtttctgattcctactccttgtcgctattcaatcgctaaaggatctgtccctggtggagaagaaccggcagattcaatgcaatgttcttgactgacgtcatggattttgttcttcaacctggtagctctgaagacgaattgaatagctgctagtttctgctaatcatctacagtcaggtgcagagtgttctgggagctagttctgaatatcactgtcacgctgtaatctgcacgtttctgagctcctaacttctaagcatgccactaccgtatccctttgtaatttaatcagctgtaccatccagtactctgtttacatttgtagaaacgctctgcaaagaagctattatgtgggagtttctttgctattattataaatgttctgttgttataaa

SEQ ID NO: 18297 - DNA, 2740 bp, Zea Mays
ttattgttgaatggtacctggagtattgtccttttacagttttctcacttgaggatggcccatgtggaaatatctggagagccattggagtaccagtgagcatactacctgaggacacaaacttacctatttcagtagattggttagactatgatggcatacttgttaattctattgaggcaagaccagtattctcaaggccccccctcagaagcatttagttaccatgaagatgtgaggatcagtttgggcttgagtcccaaagattttttgattgctattgttggtactccgttttcatatggtgataatttgatggaagaggcacttgtcttgcaagcagtaagtcctttgttacggagatatcactctgagaatagcgcacaatctgaattgaaagtaaagatcttcactgggaacataactgagaagcataggatggcccttgagtctgttgctctaagtgttggcttcccaagaggtgcagcggagcatgttgctgctgaagataaggacatcctccttcgtacagctgaccttgttatatattattcttgtcttgaggagcaattattccccagtgtgctagtcgaagctatgagtcttgagaagctggttatagctccagaccttggaattattagaaaacatatcgatgatggagtaaacggacttctttttccaagaaagaatgttggcatgttagctcaagttcttcttcaagcagtgtcgaacggtaaagtgtctatttcagggcaaaaaattgcttcagctgggaaggcccatgccaagaatcttatggcttctgagaccattgaaggctatgctgtgctattggaaaatgttgtcaagttccccactgatgcattacaccctttaactgttgatgagatacctttagctctgaaaaaggagtggaaatggcacctatttgaggatgtgaagcatttacaccatatgaatacgagtttgtctagctacaagatactcaagaaactagagcaggagtggcatagaaaccaaatggagaactcttctttgagtacaacaaagatcagtgacacattctctgcaattgcctgggaagaacagagagcaaatgaggttatggacatcaaaagaaaaatggaggaagacgagttgaaggacaggaatgaccaacctcatggaacatgggaggaggtgtacagaaatgtgaaaagggtagataggttaaaaaatgaattgcatgaaagagatgacaaggagcttgagcggacaggtcagccactttgtatatatgagccttttttcggggaggggacctggccatttctgcaccagagctctctttatcgtggagttggcctgtcttcaaaaggtcgaagaccaggagcagatgatattgatgcttcttctcgtcttccacttctcaacaatgtttactacagagatattcttggtgaatttggagctttctttgctcttgccaacagaattgaccgaatacacaaaaattcttggatagggtttcagtcctggagaggtacagcaagaaaggcaaacttatcaaacaatgccgaatttgcaatcttagaagctgttcaatctcaaaagcatggagattccttctatttttgggttcggatggatcaagatccaagaaaccacacatataaagatttttggtccttctgtgatgcgatcaatgctgggaactgcaggttagctgttttggaggccttccaaaggatgtatggtgtacaccttgatcatgacctggattctctgttacatatgcctaatgatggagacacatggtctgtgatgcaaagttgggttttgcctacacggtcattcctagaatttgttatgttttcaagaatgtttgttgatgcactggatgcacaaatgtacgacaaacaccatcaaactgggcattgcatcttgagtcttcacaaggaccggcactgctactctcgtgtcctggagttgattgtgaatgtttgggcattccacagtgcacgacggatggtctatgttaatcctcagactggtgcaatgcaggagcagcaccatctcagtggcaggagaggtcaaatgtcagtgcagtttttctcctacaccactctgaagagcatggacgaggagcttgcagaagagtttgacttggatcatccggacaggaggtggctctggccacaaactggagaggtcttctggcagggtctctatcagagggagcggatcatgcggcagcaggagaaggagcggcggaagcagcagagcagagagaagatccagagaatcaagaatagagctcggcaaaagacgctgggaaagtatataaagccaccgcctgatgatacaggtggctcgaacgatacaacatcagtagatttgtagcattttgaccatgatgattcttaccgtggggaatttggttcattatttgtaacggctgtccttggtcctcactgagaacccccggacggttgtgaatattttgtcagttttgtcgtgccctctggtgtctgggtgctttacaggcgattttgtaacatatctaggccattgagttgtgaagctgccatcttaggtgtaaatttgggtttccgtagggttgtttttgtccatttcgcttatgagcttctctataacagacagttaacacttaacagctgctccgcatttgcagtctccttggtacaaaatgagtcgactgatggtatcaatctgtcaagatatatttgggtgaacc

SEQ ID NO: 18298 - DNA, 132 bp, Zea Mays
cacataaccctaactagggttacttaacatgtttatttccacgtgaaaatatggcatcatgagttttttttttctgtccgctgttagatggaagcacaaaaacacgtggaacaaaaatatgttcaatgtaaa

SEQ ID NO: 18299 - DNA, 2662 bp, Zea Mays
agcatgctggacagctgatagattagcaaaaataggttgttaggacatttagggagaaagacattccttgtgatgttgtctggatggatattgactatatggatggttttaggtgcttcacgtttgatagtatccgattccctgatccaatatcaatggtagatgatctccattccattggttgcaaagcaatctggatgcttgacccagggatcaagaaggaggagggttactttgtttatgatagtggctcaaaaagcgatgtttggattcaaaaggcagatggcagtccattcgttggggaggtgtggcctggtgattgtgttttccctgactatacatctgaaaaaacacgagcttggtgggctagtttggtaaaggacttcatctctattggtgttgatggaatatggaatgatatgaatgaacctgctgttttcaaaactaccacgaagacaatgcctgaaagcaatattcataggggagatgctgatattggtggtgttcaaaatcattcatactatcacaatgtctacggaatgctaatggcaagatctacttataaaggaatggaaatgggcaatgcagctaaacgaccatttgttcttacacgagctggttttattggaagtcagcgttatgctgcaacatggactggtgataatctttcaaattgggagcatctgcacatgagtctaccaatggttcttcagttgggtctcagtggtcaaccattgtcaggtcctgatattggtggttttgctggaaatgctactccaaaactttttggaagatggatgggtgtgggtgcattgtttccattttcacgtggccatacagaaactggaagcattgaccacgaaccatggtcctttggtaaagagtgtgaggaagtctgtcgccttgcgctactaagacggtaccggctactgccacatatctacactcttttttaccactcacatacaaagggtattccagttgctactccagttttctttgctgatacacaagaccctgaactgaggaaagttgagacttcctttctccttggaccactcttagtttgtgcaagcactttacctaataaaggagctcatgaatatgcacataagttaccgaagggcatatggttgtcttttgattttgcggattcacaccctgatctgccggtgctgtatctacaaggtaaagctgaaggtgttctctttgaagatgcaggagatggatatgcattcacacagggagactatcttttgacatattatattgctgaactccactcatcagtggttactgtcaaaatcttaaaatctgaagggtcatggaagagaccaaaacgaaatctgaaaataaatatattgcttggtggaggtgctatgataagtacagatggtgttgatggtgaagtaatacaccttacaatgccttctgaatctgtagtgtcaagcttagttgcaaccagcgaatttgagcacaagaaacgaatggagatgattcagcctatacctgatatagaagagccatcggggcaggaaggtgctgagctatcaaaaatacctgttgatttgaaaagtggagactggttccttaagattgtaccatggattggaggccgtattatatcgatggcccatattccttctgattcccagtggcttcacagcagaattgagataaatggttatgaagaatacagtggggctgaatataggtctgctggttgcacagaagagtacaaagtcatcaggaggcaccttgaacaatctggagaggaggaatctatttgtatggaaggagacattggtggtggtctggttctccagcgccagatatccattttgaaggacaacccaaagattgttcagatcgactccagcattcaggcaagaagtgtaggagctggttctggtgggttttcaaggttggtctgtttacgagttcatcctacattcaccctgctgcacccaactgaggtagtagttgctttcacggccatcaatggttcaaagcaagagatctccccggaggcaggagaaataacattcgagggagacctcaaacccaacggagaatggatgctagtggacaagtgtgtcgggctgagcttggtgaaccggtttaatcccagggaggttagcaaatgctttgtgcactggggaactggtgatgtgaacatggagctctggtcagaggaaagaccggtgtctaatgagacgccgttgaggatttgccaccagtatgaggtgcagcaaacaacctaaacacctgcccgaagagcagaaataaaaataccaatttggaggatacttcagttgcttgcacttgttttacggtctctgtattgacggtcgcgcaccataacttccatggtattttggagtcgtgtcgttagtcattaccctcttggaggactttgggtctgctgaaaacatggttactcagcaatatctgctactgttcacgactgacattcaaagggttactcagcaatatatggataaaatttgtgttaaagataagttgtgtcgtgtgggttgagttatgtgtgttgtgttgtgctgtaccttcttctatctattaatggaaagatacgtagatctcctgcgtattcgagaaaaaaaactatatggataaaattttatgaaacatcgtaagtgtg

SEQ ID NO: 18300 - DNA, 1557 bp, Zea Mays
cggttccccggtctcggactctcggtctcgcacgctccctccccatccccaattcggtttcgctccgccccggctgccgcacccatggcctcctcctcctcgctcttctcgccgtgcgccctcaccgccaagctcgggatagggcacgcgtcctatggctccggacgccgcgccaacttgcgccggcgcggccgcctctcggttgtggccgtacagacgggcccgcagaagccgtctccgtcgtcgtcccaggccgccgcggcggaggatgaggcggatgcgctgcagaagcttctgaagagggagtacaagtacgggttcgtatccgacttcgagtccttctccatccccaaggggctgtcggaggccaccgtccgccgcatctcggagcttaaggcggagccggcgtggatgctggacttccgcctcgccgcctaccgccgcttcctcaccatggtcgagcccacctggagcgacaacgagtacgcgcccgtggacctgcagtccatttgctactactccgcgcccaaaaccaagcccaagctcaatagcctcgacgaggtcgacccggagctgctcaagaccttcgaccgcctcggcatcccgctcaccgagcagaagcgcctctccaacgtcgccgttgacgccgtcatcgactccacctccatcgccaccacccaccgcgaagcgctcatggccaagggcgtcatcttctgctccatctccgaggccatccgcgagtacccggaccttatcaggcgttacctgggcagcgtcgtaccgccaggcgacaactactatgccgctctcaactcagcggtgttcagcgacgggtccttctgcttcgtgcccaaagacacagtctgccccatggaaatctcgacctacttcaggatcaacgacaaggagaccggtcagtttgagaggactctgattgtggccgatgagagaagcacagttagctatttggaaggctgcactgcaccagcttacgactcgaatcagctccatgctgcggttgtggagcttgtgtgtgaggagggggcagagatcaagtactccacggtgcagaattggtactctggtgatgaggagggcaaaggaggcatttataactttgtgacaaagaggggacggtgcaaagggcatggttcgaagatctcatggacacaggttgagactggatctgctattacatggaagtacccaagcgtcgagctcatcggggacgatagtgttggagaattctactcggttgcgcttacaaaggattgccaacaagcagacacagggacaaaaatgatccacaaggggaagaattcacgcagccggatcatatccaagggcatatctgcagggaagtcaaggaattgctaccgcggcttggtcctgatgaaccctagtgcggagaatgcttataattcttcacagtgtgactcattgctgatcggggataatgcggctgcgaacacctatcccaccattcaggttgtcttgtcaccggcaaactagtggtgtttcccctctagcgttctgatgaaccaagcactgagaata

SEQ ID NO: 18301 - DNA, 3935 bp, Zea Mays
gttcggagagtgcctgagcttaggcgctgcggatgaactggggcctcggcacggcgcctggtgtggtgctgcgcggcgaaggttcattggcgctcgccttgctcctccgctgatccgatccgagttttatactccgaattttcgtcgaaaggctgggtgtcagcaggccaccgctacactagtagttcgtaaaaggtggtggtggtaggagaaggtgggggtgaatattcgcgtattcggacgccggatttggttcaggatctcgtcgagatgaaggatcacggatcgggcggcgtcactcccagccccgcagaaggggaaaagaaacccatcaactcggagctgtggcacgcttgtgcggggcccctggtgtcgttgcccccggtgggcagtctcgtcgtatacttcccgcagggccatagtgaacaggttgctgcttcaatgcataaggagctggacaccgtccccagctacccatctctgccttctaagttgatctgcaagctcctaagtctcaccttacatgcagattctgaaactgatgaagtttatgcccagatgatgcttcagcctgtgaacaaatatgatcgagacgcaatgctggcatctgaactgggtctgaaacaaaacaagcaaccaacagaattcttttgcaagacgttgacagcaagcgacacaagtacgcatgggggattctcagtgccacgccgtgcagctgagaagatatttccaccgctagactttacgatgcaaccaccagcccaagaactcattgccaaggatctgcatgatatttcatggaaatttcgacatatctatcgaggtcaaccgaagaggcatcttttgacaactggttggagtgtcttcgtcagtacaaaaaggctgttagccggtgattcagttctctttataagggacgagaaatctcaacttctcttaggtataaggcgtgctagcagaccccaaccagctctgtcatcatcagttttatcaagtgacagcatgcacattggaatccttgcagcagcagcccatgctgccgcaaatagtagcccatttactattttctataacccaagggcaagcccatcagaatttgtcatccctttagcaaaatacaataaggctttgtatacacaagtgtcccttggaatgcgattcagaatgctctttgagacagaggattcaggggtaagaagatacatgggcacgatcacaggcattggcgacttagatccactgcgatggaagaattctcattggcgaaaccttcaggttggttgggatgaatcgactgcatctgagaggcgcacccgtgtttcgatatgggagattgaaccagttgctacaccattttatatatgcccaccaccatttttcaggccaaagcttcctaagcaagcaggaatgccagatgatgaaaacgaggttgagagtgctttcaaaagagcgatgccatggcttgctgatgacttcgctctgaaagatgtccaaaatgcattatttccaggcctgagcctagttcaatggatggctatgcagcaaaatcctcagatgctagcaactgcttcccctgctgtacagtcgcagtacttgacctctaatgcactgggtatgcaggatgggataggcagtgtcagtgaagatccaacaaaaagattgactatgcaggcccaaaatattggcttacctaatttacaggctggttcgaaagtggaccaccctgcaattaccccattagctcaacaccagcaacagcctcaccatgtattgcaacaacagcaggtccaaccactgcagcaaagttctgcgatcctacagcaacagcaagcccagttgttgcagcaaaatgccattcacttgcagcagcagcaagaacaactccaacggcaacaatcacagccgcagcaacagttcaaagctactgcatgtcttcagtcatcggatcagcacaagctgaaagagcaacagccttcaggtggacaagctgcctcacaagtacatttgttaaaccagattttgcaaccatcttcatctcagctacaacagctgggtttacccaagtcacctactcagcgcccagggttaccaagtctaacaacaatgggttctttgcagcagtcacaattacctcagactccacagccgcaacaaacagcagaataccaccaggcactcctacaaagtcaacaaccccaactacaacagctatcacaatcagaactgcagctgcagctgcttcaaaagattcaacaacaaaatctgctatctcaactgaacccacagcatcagtcccagctgatccaacaattgtctcagaaaagccaggaaattctccagcaacaagttcttcaacatcagtttggtggtgctgatgccatgggtcagctcaaacatttacagcaaacacctttgaaccataatacaggatccttgccaccccagcaacttgtaagatcacactcagcactcactgagagcgaagaaccttccagctcaacagttccatctggcagccgtatctccccaataaattcatttagtagagcaaaccaaggaaccagaaatttgcctgagatgccagcaacaccgcacattgagcacttacttcaggaaattcaaagtaagacagataatcgaatcaagaatgatatacaaggtagtaaggaaacggtccatgcacctaatcgtcatctagcttcagatcaacttgatgcgtcatctgctacctccttttgcttagatgagagcccacgagaaggcttttcctttcctccagtttgtttggataacaatgttcaagttgatccaagagagaattttcttattgcggaaaatgtggacacattaatgcctgacgccctgttgtcaagagggatgtcgtctggaaagggtatatgcaatctaccttctggacaaagggatcatagggatgtggaaaacgagctatcctctgctgcattcagctcccagtcatttggtgtgccggacatgtcttttaagcctggatgttcaagtgatgttgctgttgctgatggtggaatggcaagccaaggactgtggaatagtcaaacacagcggatgagaaccttcaccaaggttcaaaagcgtggatccgttgggagatcaattgatataacacggtaccgaggttacgaagatcttcggcatgatcttgcatgcatgttcggtattcaagggcagcttgaagatccctacaggacggactggaagctggtctatgttgaccacgaaaatgacatcctccttgttggcgacgacccatgggaggagtttgtaagctgtgtcaagagcattaaaatattgtcatctgttgaagtacagcaaatgagcttggatggtgaccttggctgcatccctcaaactcaagcctgtagtgcttctgatgacgcaaatgcatggagggcctgacgtaaatactaatatgttccttaccatttttaaacaatactgagagtcaggggtcaaagaagtgaaacacacgtctaacgtaatcacgaggtactgttacttagagccaactcactgacagagtcgatgagaagctcgtggcggaagttgttcagcaagctgccatattttggaggccttgacggctgacgctttgttccactgaaatcgggtaattactcaacacaatcatattagtttccttcttgtgtgtgtaagttgggtgggggtggggggtataatgaatttgagaagctactctgcttattagaacctacattcactgtaatcctcctacaaagttgttcgattatctcagtgtatatatgtgcgctgtagaaccgtgactgtcagttttgcaactcgcaatccccaatgtaattgttcctgtgtgctgctttaacagctgaagtactattataaattgtattatctgtaacagaaaaaagatttggtgtcgggat

SEQ ID NO: 18302 - DNA, 241 bp, Zea Mays
cggagacatccgataaaaatggaacgatatacagaagattagcatggcccctgcgcaaggatgacacgcacaaatcgagaaatggtccaaattgttttgacatttcgtgcctaggtcccttgtttttgcaatcagatttttactgcctttccccactatagaattgcataaagatccctgttacaatcaccacaaaagcaatacatttgcaacatgtgcatctttccatttttatttccta

SEQ ID NO: 18303 - DNA, 871 bp, Zea Mays
ccgaccagctccattgccaacgcaacagttccgatcctccacaccagcacccgccgccgccgcctcttcccttgcgcacctgctgctgtgcggatcggtgaggcggaggagtaggatggcgagcgcggccggaggcggagcggcgggggaaggggagtggcttaaggtatcccagctcaggcccatggtggaagcgcaggaccccaacgccaaggttttgttgtctacttcttcgacaagatctgtgccagaatccccagagggcaggagaaattcctctgcatcgttgatctcaagggctgggggtactcaaactgtgacgtccgggcatacattgccgctatagagatcttgcagaactactacccggagcggctcggcaaggcgctgatgatccacgtgccctacatcttcatgaaggcgtggaagatgatctaccccttcatcgacaccaacaccagggacaagttcgtgttcgtggaggacaagagcctgcaggagacgctgcggcgggagatcgacgaggggcagctcccggagttcctcggcggcaagatggacgtgatcccactcaaggactatggcgtgcagcagcagcctcaggccgtgtaatagccatgccatgcgtagcatacacgagttgtggctaggagcatagcatggcaataactgtgtagctgctgtgaaagtgaaaatgaaacgttgcgctgtttagccgggtcaattgaccagcccaactgcagatctctgggctaccactatgaacagcaagaactgtttcccttatccttttcagccaaactaatcaaaccagaaaatgtttcttgtatgactgctaattaaaatgtactcaatgattacaaatgtcgaa

SEQ ID NO: 18304 - DNA, 1086 bp, Zea Mays
gcacctcctgggcaggctgggagatgattaagttccatctagtgtcaaaatggacatactttgtgttcgacatgcaaggccagggtgcacaacaggtgccctacatgcagacaagagcttggtgatatcaggtgcttagcattggaaaaagtagcagagtcacttgagcttccctgtaagtactgctctttagggtgcccagagatcttcccatactacagcaagataaagcacgaagcacagtgcagcttcaggccatatacctgcccctatgctggttctgaatgtgctgtggctggtgatattccattccttgttgcacatttgagggatgatcacaaagtcgatatgcacagcggctgcacgttcaaccatagatatgtcaagtccaacccgcgagaggttgaaaacgccacctggatgcttacgtacttctgcctgcacttcgaggcattccagctcggaatggctccagtctacatggctttcctccggttcatgggtgatgagaatgatgcgaggaactacacatatagcctagaggttggtggtaacgggaggaagatggtgtgggaaggtactcctagaagcatccgtgacagccaccgcaaggtccgtgacagccatgatggcctcatcatccagaggaacatggcgctgttcttctcgggcggtgacaggaaggagctgaagctgagggtgactgggcggatctggaaggagcagaccaacccggacggggcctgcattcctaacctttgcagctgagcaagggagacgtttggaaagcaaaaaagaaagaaaatacggtgctgtttggctggcttgtctcaaaattgccacgttatgctttcatcatagtgtctgccgttgaaatgttgtagtagtaaaatcgtagggtgtaaaatgttttcttgtaaagtcattgtgtataccaaccaaattcaagaaagcttacaagttggcccataaatgcatgtgctacgttcttgtgtagtttgagttctgttatcaaggtattgggctcaggaaatgctcagtgttcatgtttatttgatagactattagtgttatcgcgaagaaaat

SEQ ID NO: 18305 - DNA, 1316 bp, Zea Mays
gatgtatggtcctgtggcataatcttgtttgttcttatggccggatacttacccttcgatgatgccaatctgatgagactgtacaaactgatctgccatgcaactttttcttgcccaccatggttttcttctggagcaaggaagtttattaagcgcattctcgatcctaaccctgataccaggataaaaattgcagaaattttggaagatgaatggttcaaaaaaggctataaaccaccacattttgaacaaggcgaagatgttaaccttgacgacgttgatgctgcattcaatgattcagaggaccgtcttgtagcagagaaaagagaaaagccagaatcaatgaatgcatttgctcttatttcgaggtcacagggcttcaaccttggaaatttgtttgagaaggagatgatgggaatggtaaagagggaaacatctttcacgtctcaatgtacagcacaggagatcatgtcaaaaatagaggatgcatgtgggccacttggtttcaacgtgcggaaacaaaattacaagatgaaattgaaaggtgacaaatccggaagaaaaggccacttatctgttgcaactgaggtttttgaggttgctccttcacttcacatggttgagcttcgtaaaaccggaggagacacattggaattccacaatgtacgttttcagaaataagttttttttttccaaatatgtgtgtttccaaataactagcgtgatctcatgggaattgcatgcagttctacaagaatttctcatcagagctgaaagatatcgtgtggaaagctgaatctgatgcaagtatgaaacagacgaagtgacacccagggaatctgtgtaacttatgatgtcacattgtgagatagaccaccacctcgggtgataccgcttgtttggtactgtatgttttttttactggtaccacattggcaatcaatctcgtgtacagagctccttctgaatgagcgcagctgtacacgagacatgaagaggccctccctgagatgctccaaacgttgcaatggaactaaaaatttgtataaatgggtccttggcgtcctaccaatcgggcctgctgcaggggcaaccactagcggaggagcggcaggtccccttctctattgtatagagcaccgactttctgtagtttctactgttgtcacttttacaaaaacaaattttttttctaatcgaccacggtcaagcttcccatcctgtctccctcgcattcccttataatgtgtttggttggatgtacatgaagggatggaatgaggcaggcacagtttatatagtgtttaaaagagtta

SEQ ID NO: 18306 - DNA, 3251 bp, Zea Mays
ccctttctttgcctctctctctctccctgggtattggggctctctccgttctcgcgtacgcacaccaccacctcgaatatgctgaccccagccgcgccggccgcgccctgacagcccccacccgatgcgccttccccgcctccgccgccgctgccacgccgctgccggatccgctcccgctcggccgccgtccgctctcggcggcgacgggtcccgctgacctcatcgtgcttgccccgcctccatctcgcgccggcgtgggttgcggcgacggccagtagggttccggggcttccgcctcgcggtcccctcccccgaggatccgcgccttcccctacggggcgcgcgttgcgcttagggtgtgggttgccttggtcttctcagcttggttgcggtcgcgcggtttcgaggagctccacggaagcttgatttgtcaggggggcttttcgaggcagaggcaccgatctgcggctgccggcgccgcggcattgggccacttcctaagcccccgagcgcccggagcttcgttcggatcggctggtctgggagctgggccgcaacaaatcagctcttcttcggcctcactgtaagcatttcttcgcagaggttctcgctcgtttctgggctagttgatattggagggaaacatgccggagaacattgatctggtgcttgagttcctgcggaagaaccggttcgccaaggcagaggcagctctccgtggggagctcaccggctgcgccgattcgaacggcatgaccgtgcagaggtgtgtcgctgagctgaaagaagacgacgagcaggaggacttggtgagctccaatggagggcccaacggtgctgtgacagagaggagtgcggactcatcgagggagttcatcgtgaaggaggttgatgttggagccctgccgaacggtttggatggaaagaagggctccgggattggccagcctcaggagaacaacgtgggggatctgtatccttggaccttcagcatagcaaacagcacggcagaacagctagctgagctgctggtgtcggaggaggtgccaagacataggcgtgctgcgatgttggcagagaagagggatcgaggcgttgggactgaacagcctggcccattgctggagcaaaaagtctcttctggaagagggaaaggaaaagttgatgctgctgggagaactgcaatcaatgaacagggtcattccagggataaaaatctagtaccagaaaaggaggagatgttaaatggttgcacagttaagacagtgcttccattccctggggaaaacccgtcatctagttacaatagcacgcaccatgaaaacgagaggaaagaggtaaggaggagcattaatgcagatggtgttggaaaaggggcaaaaggacatttcgacgaggggaacagacaaaattacttcgaaaaatccctagatacagatcaggtgtctgaccgatgcttcgatttacagcttgttggagataatcagcgtgaggagcttccaaagttacctcctgtgaggctcaagtccgaagataagctagtcaacatgaactgggaggacaagatcaatcaccatggatctggagccaagcaatctagtgctgatcatgcctttatgattgggtcttatctcgatgttcccattgggcaagacataacatcttcaggtggaaggcgtacaattggcagtagttggctgtctgtcagtcagggtattacagaagatacctcgggttttgcaagacttgatgatgattcacttgaatatccaattggtgaatactgggattccgatgagtatgatgacgatgacgatgtaggctacacccgacaaccaattgaggatgaaacctggtttttagcacatgagattgattatcctagcgacaatgagaaggcaaccgaccacacaagagggcctgatcgtcatgatcgccctacaaaggatgaagatgatgaccagtcatttgttgaggaagattcctacatatccggtgagcaatattttcatggaaagaatattgcacaaataggtacttctgagggtccaatggtcaatgggattcctgataatgatatgatagctcagtatgatgggcaacttttagatcctgaagagcttaatttgatgcattctgaaccagcctggcagggctttgtattgcagaacagtgaactaggtatgttagggaatgggaaattccttaatgattctgaacgacctcatcctgatgacccttttgtggaggatgatcagcatggctctgttaggtcaattggtgttgggataagcagtgatgctgctgacattggcagtgaggtgcgagaaagtctgattggaggtagtagtgagggggatattgaatatttcaatgagagcagcttgagtgttagtggaaagagacattctcagcaggatcctgaaaagaagagagtaggtgctaaaggagtaaaacatgaccaaatcaattacgctgctggtatccagaagggtaatctactgccaggagcggctgatggtggattttcttttcctccacctttgcattctgtgaaaaatcatgactctgatactaaaactttgtggtcaaagaaggatgaaatgtattgcattaacgatctggatgattgccaaaatggcgtggcatcagatgatatgcttgctacatggaagaaaaagaatagtgagtcttctcttaggagctctagagatgaaatgacatctgatgttgttagatcaagaaattcaagtccatcgtatggcgaaacagaggacacaacgaatgttcggcgtcacaaactagatgacgcacaagaagacactggaaccaacttggatgatgaggaagcagcagcattgcaagagcaagtcaggcagataaaggtgcaggaggaagagtttgaaactttcaatcttaagattgtgcatagaaaaaacagaactggctttgaagaagacaaaaatttccatgttgttctcaattctgtcattgctgggcgttatcatgtatcagagtatttggggtcagctgctttcagcaaagccatccaggcacatgatttgcacacaggaatggatgtatgtgttaaaattataaaaaataacaaagattttttcgaccagagccttgatgagatcaagcttctgaagtatgttaacaagcatgatcctggtgacaagtaccaccttttgcgtctgtatgattacttctactatcggcctattgggcttgtcatttggcctgtt

SEQ ID NO: 18307 - DNA, 869 bp, Zea Mays
ctcttcagtggcatggacttcttgtggtcttatatcaccaatcgtgaactgcttgattgcttcacaaggatgatgaagaatctctgttgcaaggagaacgcgaagctgaaatgatgattgtggaggcctatgcagctcttgtgctcgcctttctttcaacggaaagtatgaaggttcgaggagccatttctagttgccttccggacaacaacttgaaagttcttgtaccagtgctagagaaatttgtgtcatttcatctgcagctcaacatgatgacaagggaaacgcattcagctgtgactgaagtcatcgaaagatgtcggctatcatagaagtgggaagaggcgccctgtacagattagctgacctctttgcagccgaagcacacacaggtgttgctcatcacctggccagggcgcaacaaatggatgccagaggctggcctgcagtgggctttgggagctaacagtgattttattctttcttttgtccctagtttcttgttctccgcatcccccgaaatcacatgtttcattgtcgtaggaatagtccgtattatgaatgtacaataacaacataggccgtagggggaatgtagttgtgctgtttcagttcctgggctgtctgcctttcaggttgtatgctcgtgtcacatggaatcagtgaccgcatgcctaaatctgagttaagattgtatatcacataatagccgtgcaattcaactatgtagccctatgtacagaggcgccatatattgaagcatcttctggttgcaaaaaacatgaatgttgtataaatagtgtaactgaaggtatacaaatcttccaggcagttccttggtgctatataatgcacggcttagtggcgta

SEQ ID NO: 18308 - DNA, 5380 bp, Zea Mays
ctcgaacccaactcagccgccacttcgactgtcctcaccttcttgcgccggaagaagcaaacgccggcgattctaacccaaccaggcggagatggcggagccatcggcctcctcggcgtccaccgccgccgccgcggagcagacagacgcagagaggatggatgccctggatcggatgctcacgcggctggccctcgccgacgacgcgcacctcgcgccggtgctcgcccgcgtcctcccctacgccgtcacctcactggcgtcccccgcgccggccgtccgaaagctcgttatggaaattcttagtcacattaacaaaagggtgaaacacaggccagagatatcactgccaatgctggagttatggaagatctatactgaacccacttcctcaacaatggtccgaaacttttgtatcctatatattgagatggcgtttgaacgcctgccgactgaggagaaaggaaacatcgcgcctgatcttttaattaatatatcaaatattccacctcagcatcaagggatcatcttgcgacttgtaacaaaggctattggtgaatgtaacacacataaggtggatgagacgattgcatcaaaatatcgagtaataaccgaatccagtgatggtcttttatttgctgacttctgttttcacacattattgtatcaagcaccacctcaaggcagtggatgcccagcaggactgtcagttgtccaatcagaacgtgtcaccgggaaacaacccctaaaaattgacgtacttgcatcaagaaagctaggaatcttaaatgtcatcgaagctatgaacttcacacctgagattgtctaccctctttatttatctgcttcttcagatagccaagatgcagtttctaagaaaggagacgagttcttaaagcgcaaagcttcaacagtgaatttagaagatcccgaccttatcaagagactgttcacactgttcaacggcactgtgggtgcagaaaatatagctgcagagctgaaagtttctccagcacatgcttcattgcgtatgcggcttatgagtgttttctgccgatcagttgctgcagcaaatgcatttccacacacacttcaatgtatcttcggctgcatctacggaagtggaactacttcaaggctaaagcagttaggaatggagttcactgtctgggttttcaaacatgcagtaactgaccagctaaagttaatcggtccagttattcttagtggaatattgcgctcccttgatggttcttcaactgcagaaacagattctactggtagagataccaaaatatttgcatatcaggctatcggtttgcttgcatctcgcatgccaaatttattcagtgataaaactgacatggctatacgactttttactgctttgagattggaggatcaatctcttcgtttgacaattcaagaggcagctacttcccttgctacatcatataagcgtgcttccacgatagtactgaaggatcttgagtcacttcttctggaaaattgtgaagcggagcaaagtgaggttcgcttttctgctataagatgggcaacaacattgtacgatacacgacattgttcaagccggtacatttgcatgattggggcttcagatgttaaactggacataagggaaatggctctagctggtctaaatcttatgaatgatgggaggcaatcatctgcagggtctgttgatttcagctatcctgatataaaggagatgataaattatatctgttgtcagcgacctcagttgctgcattctgatgagcagacaaatggaaaattgcttttcccttcaaaaacatttgtttcaatgatcaagtttctgatgaagtgttttgagtctagtgataacttgaaacttttgcaagaagatccatctcattctgctgtagcaaaaatgtgtgtcatcttggaacatgccatgtcatatgaagggtctagtgaactgcatgcgctggccttgaagtcattggtggacctttcttctcgtgaaccaaagttggtgtcattgaggtatgcagaacgcataaattggctaagatctcttttgggtcatgttgattctgatgcccgtgaagctgtgtcacgcctgcttggtattgcttcttcagctctttcaacctcttctgcactaaatcttctgtctgagctcacttcaactctcagtcaaaaccgtccatcaagatttgaaaattaccatggtgttctttgtgcgatcgggtacctaacagctggtgctttgaagcaatcttgtataactgaggatatggtaaaaaatgtagttgatattcttgtaaaagtagttacttctgaaggttcggcattagcatctgttgcaatggaatctcttggtcacattggtctgcgttgtgcattgccttccatcaaccaaaactcttctacaggtacactattaagcgttctccgtgagaggctgactaagcttctttctgaaaatgatactaaagctcaacagaaaattcttgtatcattgggccacatatcttggaatgagatgtcctttcctcacctgaatgatgcgttagacttgatttttagtctttcacgttctaaggtagaagatgtactttttgctgcgggggaggctctatctttcatatggggagaagttcctgtgacagcagatgtgatattggagacgaactttgtttccctttcccaggccacaaactaccttactggtgatgcatctctagtctcgagtaactcctatgaaaaaagtggctgtgaagaagcacactcaattgcacgagaagaaattattaaaaagttgttcgaaacactaatttatagcagtagaaaagaagaacgctgtgcaggtactgtctggttggtgtcactgacgatgtactgtggccgacataaaaaaatcctagaactacttccacaaatccaggaagccctttcacatcttcttggtgatccaaatgagcttacacaagatttggcatctcaaggaatgagtattgtgtatgagcttggtgatgcatctatgaaagaagagctggttcatgctctagtgaacacactgactggtgctgcaagaaagaaaaaagccattaagttgatggaggattctgaggtctttcaagaaggcacaattggcaataatcctactggagggaaacttagcacgtacaaggagctgtgcagtcttgccaatgagatggggcaacctgacctgatatacaagttcatggatctagctaattatcaggctgctctcaattccaaaaggggtgctgcttttggattttccaagatagccaaacaagctggcgaggcacttcaaccttatctgaataccttaattcctaggcttgtccggtaccaacatgaccctgataaaaacatccaggcgtgttacggacgttttatgttattgggcctcccaaaggtttgtaaacatttgaggaatatatggacaaccaccttccgtgcgatggatgacataaaggaaactgtgcgaactgccggtgacagtttgtgccgagccgtaagctcattgacaattaggctctgtgatatatcactaacttctacttctgaggcaaacgaaacgatgaacattgtgctgccatacttgctttctgagggcatactcagtaaagtatcaagtgttcaaaaagctgctattagtttggtcatgaagcttgctaagggtgctggtcctgcccttcgtcctcatctgccagaacttgttagttgtatgcttgaatgtttgtcaagtctggaagatcaaaggttgaattatgttgagatgcatgcagggaatgctggcatcaaaacagataagcttgaaactttgcgcatagctgttgctaaagattctccaatgtgggaaactcttgatatctgtataaaagttgttgacaagaattcacttgatctattggttcctcgcctggctcaaatgattagatcagctgttggcttaaatacaagggttggtgttgctagtttcataactctattggtgcagaaggtcatggttgacatcaaaccattcgcagcagtcttaatgaagttattgcatagtgcagttctggaggaaaggagttctgccgctaaaaaggccttcgcgtcctcttgtgctactgttttgaaatacgctagtcctccccaggctcagaagcttatcgaagatactacgtctctgcattcaggtgggaaaaacgatcagttgtctggtgcaattcttattaaagcctacttgagcaatgcatcggatattcttggtggatataatgcggtggttatccctgtaatttttgtgtcgagatttgatgatgataaagacaccagtgctttatatgaagaactttgggaggatattcctagtagtgaaagagtaaccctaacactatatttaccagaaattgtatctcttttatgtgatggcatgtcattgtcatcatgggctggtaaaagaaagtcagccaaggctataaagaagctatgtgatgttctaggagaacccctttcagcacactaccagaatattctcaaatcacttctgaaagaattgccaggtcgattttgggagggaaaagatgctattctggatgcattggcttcattgtgtgcttgctgtcatgttgctataactgcagaagactcctgcttgccaagtgttatactaaattgtgtttgtgctgcatgcagtaggaaatcaaaattgtaccgtgaagcagctttcttgtgtttacacaaagtgattacggcattcagagatccaggatttttcaatagtgtgtttccaatgctgttcgaggtttctaaccaatctgccatctcgaagacaaagggctctgctgaactagatgaaagtgaaggtgcttctgtttctctggataaagtgctcaattgtgcaacatcttgcatcagtgttgcttttccacaggatattatcaaccaaaagaagaatgttgtagaattaatattgaattctctcttgcctgaggagagttggcaagttaaactatcatccttcttgtgtatcaaggagttgtgcctcaaatttgacaattctggtgatagtaacacatggcctcaagacacagcttacttggttgaggagctatttcatttggtatcaccgaaattagtagactccataagattagtaaagattgctcaggttcacgttgctgcatcggagtgccttcttgatttgagcaaactgtacagagacttcccgctgtcgaacagaacagaggccaagttcgaggatgaactcacagagctctgcgagtctgaaaaaagcgaacaagcaaaggcgattctgaaggaatgcctggccattcttaaagctctccctggagtaaccatgacgacggattag

SEQ ID NO: 18309 - DNA, 1244 bp, Zea Mays
gaggaagtgacaggcagggcagcgcgaaagccagccacggggacggagcggctagcgagcaagcgaaacagcactatacaagtcgtcttcttctccgtcccttgggccacctggtgttcttctataccacgcgtccacgccactgctaagctgctccccgttcgccaggtcggcgaccaggcgaaacgtgctgctgcaagaagaagaataggtacacagacagcatgtccggagttcaggcgatgccggcggccgtgggcgtggcggggctgagagggtcagggttggttagcagcagcagtaccggcttgttcgccggcgactgcaagaggaaggctcgtcgcccggcgtgctcggcctgggccctcaggcagagccggatcggcagcaggagcaggagcaagaggggcctcggcatcgtctgcaacctcgcgggacagtacgaggattccttcgacgacgtccagcggcaactgatgaactacttcacctacaaggccgtgaggaccgtgctgacccagctctacgagctgaacccgccgagctaccgctggttctacaacttcgtcgctgtcaacaagcctaccgacggcaagcatttcctccgtgctctcggcaagaaatgcgaccatgccaagacgtacgagaagatctccgacgagaacctggcgctgatgcgggagcggctgatggagacggtcatctggccaaccgacgacagcagcacggagaagatcggctgatgcctgatgcctgcggaggcgccgagtcctttcgggttgctgatcaagcttagctccttctattagcatgtagagcagcactctgggtttctctatcagtcagtcagtcagccagccagtcagtgggttgtatataatcggagttgtagtagacagtatacatttctctgggcaggcaatcactgtttgaggtgttaacagtgccgttttgccctcccaattaagcctctacagtcggtctaagtgaagcaaaaatgcttaccttgtagtagctaaatttacatgtgcggggatatacgttgtaatagaatatttctgcgccccgtacgtggctgtttgatgaaagcattctgtacggtagtcaggaaccctcttctacctgaaccagtcgcgagcgttcgatcgggcaaactggccaggatgacgttgctctcagttcttgttgctagttctgcttcttgcgttgatatatagggtcctgccctgcgtcgtcttcgtctc

SEQ ID NO: 18310 - DNA, 2314 bp, Zea Mays
acatcatcgccccccttccccgcggccccaccaaatagagaggcccagacaccgaggggaaaaaggagagagagtacacaggtgacagccgctgcaccgagggcacagagggacagctagacagggactgccagcggcgtaggcggtgtgggggatggagcgcgagatggcggacgcgcccgccgcggcgatccccgccgccgagccgctcgcggcggtggcggaggaaggggagggggaggcggccgccgaggcagtggggtccaccctcaccatggagcgcgtcgccgccgcgaagaagttcatcgagagccactaccgctcgcagatgaagaacatccaagagcgcaaggagaggcgctttagattggagagacagctagcttcttctcaagttcccaaggaacaacaaatcaatttaatgaaagatcttgagaggaaggaaactgaatacatgcgacttaaaaggcacaaaatttgtgttgatgattttgagctgctcactattattgggagaggtgcttttggagaggttcgattgtgtcgagagaggacctcaggcaacatttatgcaatgaaaaaactcaagaagtctgatatggttgtcaggggccaagtggaacatgttagagctgaaagaaacttgttggccgaagttgctagtcatcactgcattgtgaagctttactattctttccaagacactgagtatctttaccttattatggagtacctccctggtggtgatatcatgacccttctcatgagagaggataccttgactgaacatgtggcacgattctacgttgctgagactattcttgctatcgaatccatccataaacataactacatccacagagatattaagcctgataatttgcttctagataagaatggtcacatgaagctgtcagattttgggctgtgtaagccaattgattgttcaaagctctcaactttgaatgaagatgaacccatgagtgatgacaacttgagggaatcaatggatattgatagttctttgtctgatacagcaaatggtagaagatggagaagtcaacacgaacagcttcagcactggcagatgaacaggagaaaactggcattctcaactgttggaacaccggattatattgctccagaggttcttctaaagaagggatatggaatggaatgcgattggtggtctctgggcgcgatcatgtatgagatgctagttgggtatccaccattttatgctgatgatccaataactacatgcagaaagattgtgcactggagaaaccatttgaagtttcctgaggatgcaaagttgtcaaatgaagcaagagatctcattagccgattattatgtgatgttgaccacaggatcggcagtgcaggggcagatcaaataaaggcacatccttggttccgaggagttgcatgggataaactttatgaaatggaagcagcatttaagcctcaagtaaatgatgaactggacacacagaatttcatgaaattcgaggaattggaaaatcctccagccaaaacaggctctggaccttcaaggaagacgatgctgaactccaaagatctgagctttgtggggtatacgtacaaaaacttcgatgcggtgaaagcaataaaaatttcaggtccaccaggcatggattctcccatggaaccaaacgggaggggcacacatatgcacacagtttcatctggtgatccaatgattccctaacctgcagtgctgtttgtcctcggcaaatttctgaactaaatcagcatgcaaacgcctggatgatgtggctccagctggataacctgctcatttttagccaggtttctgctttctcaatcgtgggcaagcggtttgtagaaatccaccagagtttctagttgtaaaatagtattccacggactttaacaaaggtcccatgtactaagggctcatcatcagacaccgggacagtttttttctggagaaattgcaccttgcggctggctgcccaggttggtagagcaaattgcggccttctcttgtggcagttcccggtccgctaacatttgatcagggaagggaaataagatggtgttgttgcggcaggaattctcatgggggggagttagtgttgttgtttgatatgtatcaggaattttcacatttgtagtagggtttctgttagcatattttagaaacatcctttttgcagagttgctatttctcattgatgtatggaaaacaacataatttggagatcgaagctcgatctaacttttatgctgcatatctgatctagattacatcaaacatgattcatcc

SEQ ID NO: 18311 - DNA, 1403 bp, Zea Mays
cgtcccacccctcctgcatttcaaaataatatctccctgcgcttttcctagccctttgtcatccaaggatacaataaacaaccggcgcttttacacccccgccaagaacaggagcaacaacaataaggctcctcgcaacaatccattctcatccatggcgaagctcatgaacaagctggtcgattcgttcgagcacgacgagatactggacgtcggctgcgtgcgcgccgtgctggccgagctcgtcctcaccttcctcttcgtcttcaccggcgtctccgccgccatggccgccggatccgacgggaagcccggcgacgctatgccgatggcgacgctggcggcggtggcaatcgcgcacgcgctggccgctggcgtcctggtgacggccgggttccacgtctccggcggccacctgaaccccgcggtgacggtggggctcatggtgcgcggccacatcaccaagctccgggcggtgctgtacgtcgccgcccagctgctggcctcctccgccgcctgcgtcctcctccgcttcctcagcggcggcatggtacgctccacttccaccgtacccgcgcagattcatggatctaggagtaccacgtgattttactccaagtgaccccggtgcacgccctgggcaggggcatcagcccgatgcagggcctggtgatggaggtcatcctcaccttctccctgctcttcgtcacctacgccatgatcctggacccgcggagccaggtccgcgccatcggcccgctgctgacgggcctcatcgtcggcgccaacagcctcgccggcggcaacttcaccggcgcgtccatgaacccggcacgctccttcggcccggccctggccaccggggactggacaaaccactgggtctactggatcggcccgctgctcggcgggcccctggcaggcttcgtgtacgagtcgctgttcctggtgcagaagatgcacgagccgctgctcaatggggaagtctgacgaccatcagcccctgtgttgtggcgcatgcttcatgcttgtttctgtaaaacaggtcattctctgcaagcatggtacatacattggccaaggtaattagagaggcttgctgtaaagcagtaggattgctggctgtagaaattgttgatgggctttttttgggggtttcctgccaaggaattctttcttttatataatctcaaaaaagttttttttttttggtatgggctgggttctatcaagggtttgttaaggctattagtttaccatgtagcagaaaaactagtgggacgtgaagttttttcacgtacattgtaatactttggtatttttgtctaccagatgaaactggaagtacagagcaaaaacttctctatcaaacagtatttatgcctaccgcattttagtagaaa

SEQ ID NO: 18312 - DNA, 545 bp, Zea Mays
acttcctctcccgagtcccgacctctcgtatctctcgctcgcctccctcgtccgcggtccgccgccgctccagatccagccgtgggagcggggacggggcagggcttgagcacgctctctgcagcttcaggctctgctcgtcggggtggaaggagaactcgagtgctcccaggctctcaacctccacgctctgaaccgctggtacccgagatgacatgtccttgggcttgggcttgagctgggcgcagaacgagcccgtcgtcggaagggacgatgtggacaacctcgtccctggctccatgttgaggccatagagcttgaaccccgaggcggagcccttctgccagagcgcggccccgcggttgaactgctcgacgaatgcgccgaattgctccctcccggaattggagcggacgacggagtgagagaacttcttgttcctgttgtatggtttatgatgtgcgtgagtgataaaatctatgtatttgattcttctgagtgtctctgtgttaataacaagttgtcttgttcctgttaaaaaagaa

SEQ ID NO: 18313 - DNA, 1826 bp, Zea Mays
tgtgttttttttttctttccgattttcgtttctctctcttttcctttccccccgtccctctctttctttctctcttggaattgtaattggactcaaaagtttcggcggccttctccatgaacacggtggcttcgctgcctttggcgccgcgcctgctcattaagccctccctcgcctgcttctccagaaaggacgtcggccgctatggcgggatcaaggtgtacgccgtgctcagggaagacggggccgagttcgcccggaacaacaacctggaggccctgttccaggtggacgaccccgggccgcgggcccccgtcaagaagttcctggacgtgaacgaggctctggaggtggtccgcttcgacatccagtactgcgactggagggcgcgccaggatctcctcaccatcatgcttctccacagcaaggtggtggaggtcctcaaccctctggcgagggagttcaagtccatcgggaccttgaggaaagagctcgccgagctacagcaggagctggaaaaagctcacaatcaggtccatctctcggaagccagagtctcatcggcgctcgacaagctagcgcatatggagaccctggtgagcgcaccatccacagccgagccgcccacttcttcctccctgtctgcaactgcaagcagcaccgcccgtgtccgagccaagaacaaacagccacgtcggaggcttgacgtgtccggcccagtgaagccttacaaccccagcctcaagaacttctggtacccagtcgccttctctgctgcctccttcaggatttacggtccacgcagagatagtgatggagctaccagttgaacatggactcctcctggacaatctcctggaccttgctcacgctcctttcacacacacgtccacctttgccaagggctggagtgtgccaagtttggtcaagttcctgacacccgcgtctgggctccaagggtactgggacccgtacccgatcgacatggagttccggccaccgtgcatggtcctatcgaccatcggcatctccaagcccgggaagctacaagggaagagcacgaggcagtgctccacgcacctccaccagctccacgtctgcctgccctcctcccggaacaagaccaggctgctgtaccggatgtcgctggacttcgcgccgtggctcaagcacgtgccgctcatgcacctgctgtggtcgcatttcgcagagaaggtgttgaacgaggacctacggctcgttcttggccagcaagaggggatgatcgacggcgccaacgtctggaactggccggtgtcgtacgacaaactcgggatccggtaccggctgtggagggacgccgtcgagaggggcgccgacgaccggttgccgttcagcagcacccaagctgagagtttgtcgtagcgaccggaacgggacgggacctcttcctcgtcgcatttctccgcaagacgacggacggacagccagagttaatgtgacctaggcgtacgtgcgtctctctctctctctctgcgcggttcatcgttcacctcgggctgctgcgcactgaaggattctggaagggtgaaggttgacggccggagacgatgatgggcagcatcatggtctatggtgtccacatgcatgtacactactagcgacgacggcatcatgggatgcaattgtaatctgagattgatctcttttttttttcaccctttctgtgtaaagattcagcaaattgttgcgttactcttccaaagcatgtataatcaactacggagaagtgttcatatatataaatatgagaaattgcagctattgctacagttcatctgccccgt

SEQ ID NO: 18314 - DNA, 979 bp, Zea Mays
acccgtccgggtgtaccggtgtactatcatccctcggctccaggccgcatcgcgatcagtcatctctttccctcccagccttcctcctgcgtctcgctctcgccggaggtcaggcgcaccgccgccgggcgatggacgcctcctaccgccgcgccggcaccgggagcggctccgctccccgctccgtcgaggacatctacaaggactaccgctcccgccgctccgccatcctccgcgccctcacccacgacgttgaggagttctacgcgctgtgcgatccagagaaggagaacctgtgcctgtacggctacgcgaacgaagcgtgggaggtagcgctgccggcggaggaggtgcccacggagcttccggagccggcgctcgggatcaacttcgcgcgcgacgggatgaaccgtggcgactggctcgcgctcgtcgccgtacactctgactcgtggctcgtctccgtcgcattctactacgccgcgcggctcaaccgcagtgatcggaagcgtttgttcggcatgatgaatgatctgccaactgtttttgaagtcgtctccagtggtgtgaagcaatcaaaagagagggatagatccggtactgacaatggtggtagaaataaactgtcggtaaagcaaacaagcgagccacgattagaaaataacgccagggagcctgatgagggctacgatgaagatgacagcaaccacagcgaaaccttgtgcgggacatgtggtggaatatacagcgctgatgagttctggatcgggtgcgacgtgtgcgagaagtggtaccatggcaagtgcgtgaagatcacacctgcaaaggcggagagcataaagcagtacaagtgcccaagctgctgcaattcaaaaagacctaggccgatttaggcctatagcatcgccctcctcccgggaggacggccatggatggaagaagactggacaagcaggcggacggtcgaggcgacataatg

SEQ ID NO: 18315 - DNA, 74 bp, Zea Mays
cattctccatgcggccggatgagcctcctctcggcaggtctcggaccaagcgcattgctcttcttatacctaaa

SEQ ID NO: 18316 - DNA, 601 bp, Zea Mays
cacaacccggaaacgcgcaaagcgaagagggaaggggggatatcggggaaaaaaacgcaaggtaccaccgtaccagcagcgcaaagaacaacgtgatcatcgaggaggtgaacaagggactgaacccaggaatggtggttctgctcgtggttgccagcttcctgctgctcttctttgccgggaactacgcgctgtatgtgtacgcgcagaagacgctcccgccgaagaagaagaagccggtctccaagaagaagctgaagagggaaaagctgaagcagggtgtctccgcgccaggggagtgaacagacagggatgccgccgatcggcccgtcctgagcccgccccctatttacatgattgtcgaagaaaaaagatacacctgctggagccgcggtgttcgtagtaattttgttctgtagatgctttttgttgtcttcgatggtagtgcatttgtattggacaccttgtttcagcaactgatgaatctttagcctaaaccgagttactcttttgttcctgtaaactacaagtacttcaaatgacgctggtgatggtgaacctgagtaaaattggcgagtcccagctcccgcctactcttctg

SEQ ID NO: 18317 - DNA, 1441 bp, Zea Mays
cctggagtgagtcgagcagaagcagagtttgcagtctgagaagacccctgtgctgtccagccaacttttccacctcagtcttggatgccccccctccgccgtctagatctccccaactcctccgtcctcttgcttcctgtcgtcgacctcggtggccgccgcgagctgcgggtggttcatcgccgtcgacctcgcctctccgctccttctgcactgcctgttaccggcttcctggtggtcgaccggtgcggcgcgggtcgtcagtgaagctccgactatccggattgactcggatcgacctctcctctcgtggggacatgaagaccgatacaccatatatgtgcatgcatcaagagatagaccaattcatgcaagtccagtattctctggcagggatattcgaagtgaaaaggtgatctggggcacaatttctatggttgatgctgaaaagcggctcttggcccatgccctacaagaccctgaaaaccagcattttgtcttgctttctgagagctgtgtctgtgtgccacttcataactttgattatatatatagttatctcatggagacaaacgtcagttttgttgactgttttgatgatcctggtccacatggagcaggtagatattctgaccatatgttacctgaaattgtgaagaaagattggagaaagggtgcacagtggtttacagtgaaacggcagcatgcagttcttattcttgctgacaccctttactatgggaagttcaagcgttactgtaagccaggaaatgagtggcataactgctattcagatgagcactacttgccaactctcttcaatatggctgacccgactggaattgcaaactggtcagtgacgcacgtagattggtccgaagggaaatggcatcccaaagtctacagggctgtggatacgagcttcgagctgctcaagaacatctcgtccattgatgagagcgtccatgtcagcagcaacgcgaagcatgtagcgcagaggaggccgtgcgtgtggaacggcatgaagcggccctgctacctgttcgcgcgcaagttctaccccgaggcgcttggcaacctgatgaacatattctcgaacttcaccgtcatctgagcagctgaatggaggcaggaacacagctaagcaactctgtcggatcagagtccagacgtcgccaactacctgctgccgcaactctagtagatagattgctggtgatggctgctgagctaaggttatttgccagctcttgagacggcaagttttgctggtgtggaacgatggctaggttggtgcgatttgcgaatgtgacgtgtggacttctgttgttgatactgctgcagatgaattgtgattaaattttatgatctttcatctaaaatccaatgtctcacgcacatattaaatcatgctctttcatctaagatccaatgtctcacg

SEQ ID NO: 18318 - DNA, 878 bp, Zea Mays
gccttattgcttaggaaccacctacatgtccatgcgaacccaacactcaccttgatacctattcgtctctgaaaccatgacattcatcttattgatgcaatatgcgttgaccttgcttgtcatatcacctacccttttcaaattagaatcgaaaatctgtctggatttccttcaatgcatatttgaggtgtcagaactcaggaacttgcaaataaacctaaaaatatcaattttctgaatataaattttatgctgtcattgcttttctattaagatatggtactgtgtccctacctcgttcatgccctatgatatgcaggttccatccatcttgtgtggctatgaccattgaacaggccaaaaagctagatcactttgtttgctcagactgtttcaaagaaaatggttcaaagagactttcaaatgcatatgccacttcaccaaattttgagcctaaggctgaaccaaaaaggcagaggaggtaacaaactgtgagtggtaacatccatatgggtaaggggagatgtgctgcttctgtggtgaatcagcccttgccctttgctgtggtgagagcagaggtgtacagtgtactagaccagtgtttgctgttaggggaacgggttttgttcgatgtgtagaccgtgtggcatggcatgcagttgttggtagaggtcaaaagaacagtcgttgtgttcacttggtcagcttagcgccttagcccttgttaatgtgttaatgcactgtgttaactcagcgagccccccttgtggctgataatgcaagtcatgcagttgttgatacaaatgttgctgcggccatttcatcgactgtcattgttcagtggtactggagtttcggttttgccagctcagtgcagg

SEQ ID NO: 18319 - DNA, 1578 bp, Zea Mays
tgaatagttacaccaactcccttcaggtaagtcttcaaggacccttagttggtggtgtttcaacccggggctggcgatggaagaatttctcaagttgggtgtgcgctctatcatattaacctcaggcaccttgtctccgttggattcactagccatggaactaaaccttgaattcccagttagactagaaaatccgcatgtcatttcttcagaccaagtctgggttggagttgtgcctgtcggcccttcgggacatgctcttaattcttcttatcgtacgcgtaatactatacaatataaacaagagttgggcactgcaatagtaaatttcgcacgcattgtgccagacggactccttgttttcttcccttcatattctatgatggacatgtgtgttgacttctggaaaaataggaaccattcaaattcagcgtctgagaacacaatttggcagcggatctgtaagcacaagcagccagttatagagcctaggcagtcatcaaactttcagagtgcaattgaggattatagagccaaattacacgattcttcttctggggcaatattttttgcagtttgtcgtggcaaagttagtgagggtcttgattttgctgatcgtgctgggagggcagtaatagttactggaatgccctttgctactccaactgatgccaaggttcggctcaagcgcgagtatttggataagcaggggacaccatctaataaaaacacaaagatgttgacaggagaagaatggtatgtgcaacaagcagcacgggctgtcaatcaggctgttggacgtgttatcagacatcgccatgactatggagctattatttattgtgatgaaaggtttgtgtggccaaattatcaatctcagatgtcatattggctccgacctcatataaagtgctactcaaagtatggggaagtagtccaaggattgacccgattttttcgagataaagcttcttcagatcctttgacactagagccaacagattgtaataattgtatagcaccaccagcaaacaaacacatgcttaaagagaagctatcagatttggctgccagtgcacaagatgagtgcccacaaatcacattatcaggaaattcaaccatgagaagaagtaacttcatgaagttggctcagatcactcctgctaatcgttcaacccttactacaaaacacaactttgtgtctacatctacgaagcacaacctcccagaagaccagctgtcacaggataccaatgttgatattactgttgacttggcaatacaagggcatttgaaggaacataccttcaagtctttagggcttaagaaagctaaaacaatggacagatccaaagatgctgttgttttagatgacgtctcttcaaaattgcctcaaaatatagggtcaagagctttggccagataccaatgtggtggacctacacctgaatcaaagaaaagcactatagcaacagcatgcggaaagaatgatggggcctgtgaaaaaactgaaggccaggaatctaactcagggccagccttcttgaagctggttcaagaaaagcttagtcctgcaga

SEQ ID NO: 18320 - DNA, 813 bp, Zea Mays
ttttaaaccggagcgtggcatggaagtggacttgtgtacaggagaactatgcaaccgagcaagaggctgcagaggcgtacgacatcgcggcactgaagttcaggggcgagaatgccgtgaccaacttcgagcccagccggtacaacctgctagcgatcgctcaacgagacatccccatcctggggaggaagctgattcagaagccagctccggaggcagaagaccaggccgctctgagcgctcgttcgttctcccagtcccagcagtcgagcaacagcttgccaccgtatttcctcaccaacctcctgcagccgctgccgtcgcagcactcactagctcaggctctgccgagctacaacaacttggggttcggggagcccagcttgtactggccctgcccctgcggtgacccgggggagcagaaggtgcagcttggcagcaagctggaaatcgtggacggtctcgtgcagctggccaactctgctgcgaactgacagtgctatctgaaatgctggttgttttgcttgtgtggctcggggtcgggggtacgttcatggaactgatagcctgagccctgaagatagcggggtataacatacattgtgccgtttgtttgtcgtattttggtgtatcgtattttggtgtacaaaggcatccaagagtctagtcaagctaactagatgatattatcgggtgtatgatctctctaccggaatggcttaaggcattcaccacagacgaagtgctacattgttaatgagaaacaacactggatgtgtggttagtctctcccgtaatgagcattcacctccg

SEQ ID NO: 18321 - DNA, 2911 bp, Zea Mays
aaatggcagagtggcaggcaaggcaggcggggcttttgcacaaaccccctccgatgtcgggcggaaacgccaaggagcagaaccttctcctgcccggttgcccgccgtcgtcgcgacgtcgagcgtataattagcaggcgcagcgcgacggggcaacggccgacgacgaggaatagactataggacacgctgtcgccctcttgcaacccccccttccatgccccttggcccagcaaccccgcccccgaccccgacccaagataaaggccctcctcctcccctcgtcgtcgcgcttgcgtgcgcgcttggccggaggctggctgggaggaggatctgactccgagccgcgtcgccgtgctgggcgctgcggcgagggatcgggggccgacccgcctcccgccaccgctcggaactcgatcgtcctggaggagctgtacctgtagacttccagtcctctgcaacctacaaaatgtcagtgcgtcgtcggtcaaccagcatggaagggctgctcacgcttgatgactggaaagaacggagatcagatgtggacaactcagaggacgagcgaaggcggctatccatagggtcactgaagaaaaaggcattgaatgcatcaaacaagctcacacattcactcaagaagaggggaaaaagaaaggtggagcatcgggcatcgtccttcacaatcgaagatgttagggatgagcaagaggagcgagccgtcttcaccttccagcaaaaacttctggacatgaacttgctgcctgacaaacacaacgattatcactcgttgctgaggtttttgaaggctagaaaatttgacacagagaaagcgatccatatgtgggctgagatgctccagtggaggaaagaatctggagcagatacaatactagaggacttcagttttgaagagctagatgatgtgctatgctattatcctcagggctaccatggagttgacaggcagggaagaccagtatacattgagagattagggaaagtggaaccaaataaattgatgcacattactacagttgatcgctacatgaagtatcacgtgcaagagtttgagagagccttcagggacaggtttcctgcatgctctgttgcagcaaaaaggcatattgattctacaactactatactagatgtcgatggcgtgggtctcaagaacttcagcaaaacagcaagagatatgttaagtagaatgcagaagattgacagtgactattatccagagacgctgcatcagatgtttgttgtgaatgctggtagtggtttcaagctactatggagttctgtgaaaggctttcttgaccctaaaactgcctcgaagatacatgttttgggaacaaagtttcagaacaagcttcttgaagtaatagatgcaagtcaacttcctgaatttttgggggggacatgcacttgtgctgctgtgggaggatgtatgaggtctaacaaaggtccatggaatgatccagatattatgaagcttgcacataataaggaagcaaagtttacaagacataccagacgtttatccgagattgagcaagggcggagttcatttgctaggttacatcttttgaagggtagaaacagtgacacgtcaactgtggagtcaggatctgaaattgatgatcttggtgctccgatcatgagaagcacagtggggtgtagtcgattggccccagttcgcgaagagatgcagatgagagcacgagactctgcagcttattacagctgtgacgatcactttgttgtggtggacaaaacagttgactatggtcgaggaggatcaccgtcagataaaagcagtgcttcagaagtaagaactcatgttcggccactggatgctagcacagcagcccacgtggcaggtccctcaagtaacaggcgagctacagttgtgcctgaagaggtttcagatgaaggagtgttccgtcgctttgtcagactacttctggccttcattgtcaaagtctttgccttctttcacatagtacgtagtcagcaggaaacgagggtcaacaacctactacctcctgccgaaccagaactgatttctgacgatcatccggcagtagagactttcaatgtagaccacatcagtcctgtcatagagcgccttcagagacttgaagggaaggtcgatgagcttggcagcaagcctccagcgattcctgtggagaaagaacgatccctcttggagtcatgggataggataaaatgcatcgaatctgacctggagcgaacaaagaaggtgctgcaagccactgtgaggaagcaactggaaagcgctgagtccctagaggaagtgattagatcaagcctacctagacgaagattttgtttataacaaggaaccagtactgctgaaatcaagatacatcctgtcgcggagaaaaatatgcacaggaattcgattggtgatgtgatgaaggccgtgcattcagttgtccacattactggcagaaaagatggtgaccacggatagtgaaaaacacggtccacttatttatttttttcttgtgaccctaagaggcctgtgcatttttcatgttaacagaggatgttaggatggatggcattgcaagggctagaaaaataggagatagaaatgtggaaagtggggtggtacccgaacaactgaacaagtgcgcatattgtgatatacaggtccgcgtctatgttatctttgcaaagaattgtgcgatattactaatgttagggaaggggataaaatagacacaaatatttacgtgaaataatctcctccaatattaagaagcaaacaaccacgaggaaacagatttactatttatcgtcgagtacaagttacagggaggtcctatatttataggcgtatagaaaaaaatatttcaaaacatattctaaatatataaaa

SEQ ID NO: 18322 - DNA, 1111 bp, Zea Mays
gacttccacaataatatgattgatccaactgctgtctttggaatgctttttgggagcgactattttgaagattatgttggccaacttgcgctagcatctgttgcctctgtagagattgaggaagaatcaaacacacctgaggcaaggacaaggattcaagagaagataaaggacgtgcaaaccgaaagagagcaaatacttactcaaagtctaagggatcggctgcaaccatatgttgatgggaagcaagatgagtttggtgattgggcaagtgcagaagctcagcgtttgtctcaagctgcttttggtgaggctatgcttcacacgattggctacatctatgttcggcaagcagcacgagaacttggaaaaagcaaactgtatatgggtgtaccttttattgctgagtgggtaagggacaagggccaccacgtaaaatcacaggttaatgctgccgcaggtgcaatttctctgatacagctacaagaagggataaaaaagattgaagagggtgacaaggaagagcagcttattaagagtatcgaagagaaaaaagatgcaatgctgaattctttatggaaaattaatgtggtcgatattgagtcaacgctttcacgggtctgccaagcagttttaagagaaaatgatattcccagagacgtactcaagttgcgagcaagaggactgaaaaagctagggacgatatttcaaggcgcaaaatcaaactaccgtcgtgaaaacagcctgcgtgttgaagatgacgcggcagaagccacaccgtcgcactgaggatggtggacaaatctggatatgatgtcatatactgcgtcaccggctcaccgagactgagcccgaaagccgaccactgtggaaggagacaaacgatgctgtttttccaaagatttttgtacggtataagcgcaaggtattgctaccatgccatactttatcgctgtccgcactgcatatagttctgttggacgaaaaatgtaatatttgaagtcaaaatgtgatgcgtaatgatttaagcgcatgatcataggctttgaatgtcatttgcgatcggactcagatccttggtggatctttaaaaaaaacgagaataagttct

SEQ ID NO: 18323 - DNA, 1653 bp, Zea Mays
gtgaaggggcaagatgttgcttttgagccagcaaagcttctctggcttatccagagggatttcctccaaggaaaatctgttcaacaaatggtcaatgaagccctccaacgggtgcctaatgataatggtgacagatatattaatgaggtcaatcaaatacgagattctttggcagttatgggcaaccacagcactgcttttagcttgccccagccacatcttcaaagaacaaaattatgtgatatggaggacaaagagcttgaacccttatatgtaaaacggcgggagcaactaaagcagcttgtttcgtccattgtaaaaccaaaaatcgtgcagggtagaactctaaatgggaaggactttgtgtctttcttgcagcagattcttgaggctttgaataaaggcgaaattccatcaactggatctctggttgaaatttttaacaaagccattcttgatcgctgtctgaaggtgtacagggagaaaatggatagcttaaacctaccagtgccggtagacgaactgcagaaacttcatgagatgacaaatggtgaagctagaattctctttgataagcagcactttggcaaacatcatgctgctcagtcggccctcaagcttgaagatgagattaaagaggatgtactttgtaggtgtacagaaacttccttctagctaatgaatatcaatcgtcaaagctatgtgaagctcgcttttctgagtgtgaagataagatggatcaccttcaagtcttgaaacttccttcaatggcaaaattcaatgcaggctttactcactgcaaccaaagtttcgtaaaggactgcgtgggacctgcaaaagaaagctacgaacgtagaatgtcaaagatgcttgccaagtctcgtgctcttttcatcaaggagtacaataacaagcttttcaattggttggcgacattctctttggtcatggtggtgatcgggcgctttgtcatcaagttcttcctacttgaaattgttgcttgggtgatgtttatcttcctagagacgtacacgagaatgttctggtcagcggaatcactgtattataatccagcttggcacatcattgtttcttcctgggagatgatcgtgtacagccctattcttgatctggacagatgggccatcccaattgtcataatgctatcattgggggttctttactggaggtgcttcggccgcagaaggaagcgggatggtacaaaacatctgcttatagaagaggctacactgcccgtgcttttggatgggcatgttttgatgctgccttgcctatggatctccaattgttttttggtggacgaagagagacagtgaagctgctagcgatggccgatggggcacctgcacaagcctccgttgtaattgtaattctacttctctgccttctgtagctaggctatccttacatgtcacggtctcaattctttgcttattgtttacatccactgcaatttttgcaaggattttgtttttatcgggtcatatacaatgtagttgttatttagagcgtgcaccgtgacattcatatgctcgaagtctggcggtggaatttggaaacgtgccttttttatactgctattatacagttaatgtactcatgctatccttttggccaggagctgtgtttttg

SEQ ID NO: 18324 - DNA, 649 bp, Zea Mays
ggtccaggtagctgaacaccgcagcttcactagccggcaatccttctgagcctgagcccacagcaccaagcttcctttggttgaagttctctacctcctgcaccaactcatccttggttctgctgcatgatgtgatgacctaagaaaatagttttagtaacatcagaggattgaatggctataatactcttgcaggcatatgctatactacttctgccattactaataggtgaaagcaaaatagatacaatagggatacatcaaatttcactgtcaatgtaaaactggccttccataattatgccataataaatgtataaagaaaaagagaactccaggtccaatttggatggaagaactgaccaatataccaccacgggaaaccaagctatcaacggactgccaatacatcattctgaaatgcaggaggcgaacataaattagaggcttagacatgtgcaaacaaatcatctcttcctttccgcattaaaaagtttcagcaattgaaaacatgtccatcaggatggagcccaatcgcatcaagagtcccttcatccatgacaagttcaaatcttctctccaacttcgactccaaaacatcatcaacctgcaaaaggaccattccaagaaattaatgtgctcaaaccca

SEQ ID NO: 18325 - DNA, 4230 bp, Zea Mays
gaacgaacaccagccactactcaactaggaaaatcttagactactcattgcaccatctccatagcagcattaaacgaccatcaccactgccctgaagacgacatttcatccacttttatgttctcaggtattcattgctcaagagcaaagatgtctaaggaggctttggattagtgaccgaccttgctggactatctcttttatgtctgaaatcaagcgtagacgtatatatattaaactagttgaatctacaaggagtgaagatttcagtgagagcaaaatcattaccatttcctttttgtatgcgacaatgccagtttggttgttgttctttgcacttggaatatcatcagataaggaagtgtttgatatgatagatatgcaagattgtgatgcttctgttatcaacacgatatctgcaactatcaaagaatctgataaactgtgtgaagacttccgtaaatcagataaagctcgtcaatatgttgatgagttggtaaaaagttcgagatttcctccagcggagtcctttgatgactatattgctaggtttctctttcctgatattagtggaaatagaaacaaagcacttttcttagggtacatggttaaatgtctgctaatggcttttactgggaagcgtaaatgtgataataaggatgatttcaggaacaaaaggctggacctacctggtgaattgcttggaagggaacttagggcacagcttaggctggcagagaaacgcatggttaaggccatccaaagagatttgaatagtgaccgtgagttacaagatcttgaacgttatatagatgcatcaattgttactaatggtctaaatcgtgccttttccactggttcttggtgccatccgtacaaaagagctgaacgatgctcaggaattgttgcgactctaaggagaactaatcctcttcaaatgatgtctgacttgaggaaaacccggcagcgggttgcttacgctgggaaagctggtgatgcaagatatccgaatccatcctattggggaaagctatgctttatgtccactccggatggtgaaaactgtggacttgtaaaaaatctagctgttactgctattgttagctcaagggtgatgcagcccttgattgagagcttcatttcttgtggaatgagtaagctgaatgacattcctactgaacacattcaaagaatggataagatctttttgaatggcaattgggtgggatcttgtgaaaattcagcttcatttgtatttcgattgaggtgcatgagacgcagcagtctgattgatcctcaggttgaaattaaaagggacaagcaccacaatgaggttcgcgtgtttactgatgcagggcgaatcctcagaccccttcttgtggttgagaatctgaataaaatcagaaaacctaaggggcgctcattctctttccatgaattaatgcaacaagaaataattgagttcattggtgttgaagaggaggaagatatacaatgtgcgtggggaatcaggcatttgtttgagagtgaaggtgcgatatctagttatactcactgtgaactggatccttcctttcttctgggattaagctgtggtatcattccttttgcaaaccacaattttgctcggagggtattgtaccaatctgaaaaacactcgcaacaagctattgggtactcaacgacaaatccacacatcagagttgatactctttctcatcaactatattatcctcagaggcctcttttcaaaacagttatagccgactgtcttggcagatcagattatgcttcttttggaagaaaaaatgatttcgcgagaccagaatattttaatggacaaaatgcaattgtagcagtcaatgttcatcaggggtttaaccaagaggattccctggttatgaatagggcttctcttgaacgaggtatgtttaggactgaacacctcaggagctataaggcagatgtagaaaacaaggatggaaccaaacgactgaaattgaaggaaaaaatagactttggaaaaacagaaagcaaaagaggacgtgttgacaatcttgatgatgatggcttaccttacgttggtgcaagtcttcagaccaatgacattgttattggcaaagtctcagaatctggagaagaccacagtattaagctgaagcatacagaaaagggaatggttcagaaagtattgctttcagcaaatgatgaagggaagaattttgctgtggttactctaagacaggttcggacaccttgccttggagataagttttccagcatgcatggccaaaaaggtgttgttggttttctagaatctcaagagaacttcccatttactcacgaaggtatagtcccggatattgtgataaatccacatgccttcccaacacgtcaaactcccggacagctgcttgaagctgctctggggaagggaatagcttgcaaaggtacaatgagatatgcaacaccattcaccacagcatcagttgacgttattgcagaacagttgcacagggctggttattcacgatggggatctgagaacgttctaaatgggcgaacaggtgaaagagtgcaatccttggttttcatgggccctaccttttaccagaggctgattcatatgtccgaagataaggtgaaattccgtaacactgggccggtgcaccccctcacgaggcagcctgttgccgacaggaaaaggtttggtggagttaagtttggagaaatggagcgtgactgcctcctcgcccatgggtcagctgccaacctgcatgaacgcctcttcctgcttagtgacttctcccagatgcacatctgccagacatgcgagcgcgtggctaatgttgtcatgaggtctgtccccggaggcaagaagatccgtggcccctactgcggcttctgcaagtcttcggagaacatagtgagaatcaatgtgccctatggcgcgaagctgctctaccaggaactcttcagcatggggatctgcctcaagtttgagacccaagtctgctagaacttgtagacctgcttgcatccagttattacatatgtacatacagctagcctatgaggatctccaagctggtgtgccggtgtgtgatgctggcatagtaaggatgggcgagctagaaaccctgttgtgtttatgtgctgttttctccctgctcatgtggtaaactatgctaaagtgaatgaacactcgtttcctgttccctctttgaatgcgctgtgttagcatgcccttttgtttgaagattgcgtcttttgtggagcaccttgtattgctccgtagggatcacaccccttaccgccggcgatggccgacgatttgagataagatataatatttctggtcgtccttgttaaagagttcatgcatatacagtacacaagaaatgtcgatcgaatatagctagtaaaacaacttcaagaaacatgtacatgcggttggatggatcctttctcatcgatgatttgtctgcattgattcatccaaatcaagatacaagaggcagcatgagatgatctgtctgtgtctgcattgatccaaatcaagacacaatagagggacagcatgaggacgaacagagacaaatccatcgccccgtgcttgagtttctccacgagctagtaagagatcagcaagatcctctctagctaactacctgagggaaacgaacagcaggggaggaccaagaagtgatgagtgggggaactccatgcgagccctctggcctctcctcccacaggctacatcttgaggacgaagaagaacagtcctcgatgcgtcttcacctagctgctgcttaatttacgagtgatgctcttcgatccaaaggtacttatactacaaatacccctccccctctctctctctgtctccatcgccccaatgcaaagccggtctttctatagctcatagctgctggaatttggacctggctttgaaacatgtcgtgcactcgcgttgggtttgaaagagatgacttgcgttgcagcgagcgagcgacacaggtcaggtcacactgcaggggggaagcgaagcacgagtgtacatgcattgaacctggacgccctctttagcttttgcgtttgggcatacagtatttttattttggccttctgggatttgggaatacgagtcatcgattccctcagtgtcgtcccgtcacagctttttttttccgttgcctttatgctgcatgcccattcagcagtcacgca

SEQ ID NO: 18326 - DNA, 2924 bp, Zea Mays
caatctgttgaaaccgagctcacgggctaggccaactggactcccgacaccgccgacgcaacccaaggatcacccaaaacttccacctcagaccccaaccccctccatggccccataactagagaaacaacaacactacgtccctacgaaacgcaagcaagccatagaaaggatggaacttgcttttctctttttttgaaacatgggattcctgcagtctgctctttaccgtgtccacggcaccatcctccgccgtcgggtgtagccgtctagcctatgcttacctttcagctgagtgaccaaacactgcaccctttcgatcatgcttccttccaaggcacagcccgactgtcagctgtccgctgcccaccgcgtgcgctgcgctcccgtgcggcactgccggcggcgcgaccccgcgcccattggacgagcttccgccccgccccgatcgatcccgccgccatgtcgtcggcggccgtgtcgtcctcttcctccaccttcttcctcgcgctcgcctccgcctcccccgggggccgcaggcgggctagggtcggctcctcgccgttccacaccggcgccagcctgagtttcgcgttctgggcgccaccgtcgccgccgcgcgcgccccgggacgcagcgctggtgcgcgctgaggctgaggccgggggcaaggacgcgccgccggagaggagcggcgacgccgccaggttgccccgcgctcggcgcaatgcggtctccaaacggagggatcctcttcagccggtcggccggtacggctccgcgacgggaaacacggccaggaccggcgccgcgtcctgccagaacgccgcattggcggacgttgagatcaagtccatcgtcgccgcgccgccgacgagcatagtgaagttcccagcgccgggctacaggatgatccttccctctggggacatagcgccggagactgtcctcccagccccgaagccactgcatgaatcgcctgcggttgacggagattcaaatggaattgcacctcctacagttgagccattagtacaggaggccacttgggatttcaagaaatacatcggttttgacgagcctgacgaagcgaaggatgattccagggttggtgcagatgatgctggttcttttgaacattatggggacaatgattctgggcctttggccggggagaatgttatgaacgtgatcgtggtggctgctgaatgttctccatggtgcaaaacaggcaagaacattactcttagcggattctttcagaactgcttttcgtttgagtttgatggagttactgatgttgtggtaccaaggtatggggactatgtggaagcctttgatatgggaatccggaaatactacaaagctgcaggacaggacctagaagtgaactatttccatgcatttattgatggagtcgactttgtgttcattgatgcccctcttttccggcaccgtcaagatgacatatatgggggaagtaggcaggaaatcatgaagcgcatgattttgttttgcaaggttgctgttgagggccgtggtcctgtagatgaattcccgtacatggacttgcctgaacactaccttcaacatttcgagctgtacgatcccgtcggtggcgagcacgccaacatctttgccgcgggtctgaagatggcagaccgggtggtgactgtcagccgcggctacctgtgggagctgaagacagtggaaggcggctggggcctccacgacatcatccgttctaacgactggaagatcaatggcatcgtgaacggcatcgaccaccaggagtggaaccccaaggtggacgtgcacctgcggtcggacggctacaccaactactccctcgagacactcgacgctggaaagcggcagtgcaaggcggccctgcagcgggagctgggcctggaagtgcgcgacgacgtgccgctgctcggcttcatcgggcgtctggatggacagaagggcgtggacatcatcggggacgcgatgccgtggatcgcggggcaggacgtgcagctggtgatgctgggcaccgggcgcgccgacctggaacgaatgctgcagcacttggagcgggagcatcccaacaaggtgcgcgggtgggtcgggttctcggtgcctatggcgcatcgcatcacggcgggcgccgacgtgctggtgatgccctcccgcttcgagccctgcgggctgaaccagctctacgcgatggcatacggcaccgtccctgtggtgcacgccgtgggcgggctcagggacaccgtggcgccgttcgacccgttcagcgacgccgggctcgggtggacttttgaccgcgccgaggccaacaagctgatcgaggcgctcaggcactgcctcgacacgtaccggaactacgaggagagctggaagagtctccaggcgcgcggcatgtcgcaggacctcagctgggaccacgcggctgagctctacgaggacgtccttgtcaaggccaagtaccagtggtgaaccctccgccctccgcatcaatatcttcggtttgatcccattgtacatcgcgcgtttgacggtctcggtgaagaacttcatatgcagtgacgcgccgctggggtcggtagcagtactatgggattgcattgagctgtgtcactatgtgctttcgacaggacagtagtgaaggttgtatgcaagtttattttttttttcattactgatatttggaatgtcaacacaataaatgaagctactatgtgtttcgtaagtataatgttacttatttaggtgatacttcattcaagttcagagatttttttattgttagatcaaattacagcagtgaaggttgtatgcaagtttagttttttttttcattactgatatttggaatgtcaacacaataaatgaagttactatgtcttttgtaagtataatgttacttattt

SEQ ID NO: 18327 - DNA, 1208 bp, Zea Mays
cagcagcggcagcagcacacggcgagcattccgtccgcccgtccgtccgcttgccccctcctcagagctagcctccaagctcgcaattatataagcatcgtcccttgcaactttccagaacttttgtccccctccctcctccacacctctcgttctctccccctccgcctgctccctctcaggagcgcgcgcgcgcgcgcccagatctagggtttcgtccgcggcaagatgagcagcccgcatggcggtctcgacgaccagatcgagcggctcatgcagtgcaagccgctcgctgagcctgaggttagagctctttgtgagaaggcaaaggagattctgatggaggaaagcaatgttcagcctgtaaagagtcctgttactatatgcggtgatattcatggacaatttcatgatcttgctgaactcttccgaatcggtggaaagtgtccagatacgaactacttgtttatgggagattatgttgaccgtggttactactctgtcgaaactgtcacacttttggtggctttaaaagttcgatatcctcagaggatcaccattctcagaggaaaccatgaaagccggcagattactcaagtgtatgggttctatgacgaatgcttaaggaagtatggaaatgcaaatgtctggaaaacctttacagatctatttgattacttccccttgactgcattggtcgagtcagaaatattttgcttgcatggtggattatcgccatccattgagaccctcgacaacatccgcaactttgaccgcgtccaagaagttcctcacgaaggtccaatgtgtgatcttctgtggtctgatccagatgatcggtgtggctggggtatttctcctcgtggtgctggttataccttcggacaggatatatcagagcagttcaaccataccaatagtctaaggctaattgctagagctcaccagttggttatggagggattcaattgggctcatgagcaaaaagtcgtgactatatttagtgcacctaattattgctaccgctgtgggaacatggcatcaatcttagaagtggatgattgcagagagcatactttcatccagtttgagccagccccaagaaggggagagccagatgtaactcgtaggacacctgactatttcctgtgacgcaaaagtgatgtggatcatgcagagcgaagctttgttgattttttattcataac

SEQ ID NO: 18328 - DNA, 1264 bp, Zea Mays
agcagacaatccatactttgttcacatctctgaaaccaccaaagtcctgctgtgtttgtgagcaaatgagaaaagtttgattctcagttgtctattgtcttaaggattcatgttggttataataatgccaggacaatggttagctccccaggtgagggaggtgctggccagggatcaaatcctagtggccaaaagaaaaaccccttgctgccaatccccaaaagactggaaggaatggtcatgttactggtccctgcaataatttgagaacaaatgaagaaaaaacaggtatatcggggaagtttgattcaggagacaactcttgtttggttcccttctctgaagtcatcaatgtgcctacgcgattgccacacaactttgagatgaggaagatggaatcaactagaagtcctgcgaggctacacaataaaggagggttcctgtctgcaacagtccaaattaaggagagtacgttgttacccacaggcaagccttgttggcagtcagaaatgagccatccaacaactaatgaagtgagcacttcagcgcaagctactacttggatcgacgcgggggcgtgtgccgaggagcaagaacctactccttgggtggacatcggggtctcagactaccagcctttcctggatgtgatcgacgacatgtgcggacttgagtggaggctgcagagactgaaggagaacatgctctcatctagcatagacggccaaaccgccgccagtgagagtgacaaaagaaaccagaccgtggtgctagtgccaaccgccgagctcaaggaaaagctgccgcatgacggtttattcgggcattattgcccataggtcttatatacatagcggataaactgtacagagaaccaagaagaagaagaaaacaaaagggaaacagcaaacagacaggtgcccgcttacataccggtccatactgtcaggcactactctcctttcttgggcctcgacacgactaatactgtgctagtccagaacagatgagccatagccattacctgtgtgcctcccaggttcagttcatatgttgtatgtattaatgtatatcagaagagtcgtgcttagtagtagcaagaacctagtcctgatccagaccgtgaatctggatcatcttgtcctgtggttgtaccgtgcagaacagacagatgtcggctagtcgtttggttctgaagtaagaaactataagcatgcgtgattttggcccgttgcgtgacaaaaaaaaaagaggtggtgaggcg

SEQ ID NO: 18329 - DNA, 995 bp, Zea Mays
tgacgcacccaactgccactacccatgcttgctttttaagctctcctcctggcgctgcctctcggcgccatcgttccctcctctgcaccccccatcctcggacatcctcgcctgcagcagaccctcctctggtgcgcgtgcgccaccggcgagatgtcgaagaaaatcgtggtgaagctgcacctgcaggacaacaaggacaagcagaaggccatgaaggctgtctcggcgctcaccggcatcgacgagatatccgcggacatggcgtcgcacaagatgacggtggtcggcatggtggaccccgtgagcgtggtgagcaagctgcgcaaggcgtcgtggtcggcgaccatcgagtccgtcggcccggccaaggagccggagaagaaggacggggaggcagccaagaaggacggcggcgagggggagaataagaaggaagcaggcggcgagaaagacaaggacggcaagaaggcggcgccgccgacggagcagcaggtccagctggccgagctgttgaaccagtattaccgggcctcctcctactacccgtacccgcccgtggccacgcactaccacgtccagagcatggaggaggaccccaactcctgcaccgtctgctaaggcgactcatggcatggagaatgatctacgaaggtgaagaaggtagtgttgaaccagcatgcagtttctttttttttttttcacttctagatcgcgttctggctgctcatggaggatacgcagcgtgtctgtatgtacagtacatatagaataacacgtacgtacgtgtggcggtatatgtgtaaatgggacttcgctttctgggataaccagagctgtatgtagctaatacagttttggattttatacgagtactattgatacatgcatgttcgtgtggttactctagtattcacctcctcctcctcggtacatgtggattaagatgaatactagaatatcaaaacaaaaccttaatgttaagaacaagttta

SEQ ID NO: 18330 - DNA, 3888 bp, Zea Mays
ggcccatctcgcctagcgattattgtgcctgctgagccagctgctactgtggaaaaccaacagatagaggatccaccaatatcgagatttacttggaccattgagaacctatcaagagttagcacgaagaagctgtactccgaaatctttgttgtcggaggctacaagtggcgaatcttgattttcccaaggggaaataatgttgaattcttatctatgtatttggatgtggctgattctggggtattgccctatgggtggactagatatgcacaattcagcctctctgtggttaatcaaattcacaacaaattcacaataagaaaagaaacacaacatcagttctctgctcgagaaagtgattggggtttcacttcatttatgccgttgggtgaactctacaaccacagtagaggttatcttgtaaatgatacttgtatagtggaagctgaagttgctgtatgtaaagttgttgactattggagttatgactctaaaaaggaaactggctatgttggtcttaaaaatcaaggtgctacctgctatatgaattctcttcttcagacgctgtaccacatcccatatttcagaaaggctgtttatcacatgcccaccactgagaatgatatgccctcaggaagcatccctttagctctacagtcactcttctataagttgcagtataatgacagcagtgtctctacaaaggagctcacaaaatcattcgggtgggacatgcatgattcatttatgcaacatgatgttcaagaattgaacagagttctttctgagaagttggaagataagatgaagggaactgttgtagagggcacaatacaacaattgtttgaagggcaccacatgaactacattgagtgcatcaatgtagatttcaaatcaacaagaaaggaatccttctatgatctccagcttgatgtcaaaggttgtcaggatgtctacgcttcatttgacaagtacgtagaagtggagcaattggaaggtgacaacaagtatcatgccgataagcatggtctgcaggatgcaaagaaaggagttctttttatcgacttccctcctgttctgcagcttcagctaaaacgttttgaatatgatttcatgcgtgacacgatggtgaagataaatgatcgctatgaattcccacttcaattggaccttgatagagatgatggaaaatatttatctcctgatgctgacaggaatgtgcgtaacctttatacccttcacagcgttcttgtccatagcggtggtgttcatggtggacattattatgctttcatacgacctaccctttctgatcaatggttcaagtttgatgatgagcgtgtgacaaaagaagatgcaaagagggcactggaagaacaatatggtggtgaggaggagctacctcagacaaatcctggcttgaacaacactcccttcaagtttactaaatattcaaatgcatacatgcttgtgtacattcgtgaaagcgacaaggacaaaattatttgtaatgtggatgagaaagatatagcagagcatcttcggattagattggaaaaggaccgtgaagagaaggaacgtcggaagaaggaaaaagctgaggcacacctctataccataatcaaggttgcaagggatgatgacttaaaaactcagatagggaaagacatatattttgatcttgttgaccatgataaagtcccaagcttccgtatccaaaagcagatggcctttgctcaattcaaggaggaggtagcaaaagagtttggtattcccacacagttccaacgattttggctgtgggccaagcgacaaaaccatacttaccgacctaacaggccattgtgtcctcaagacgaagcgcatactgttggacagctaaaggaattggtgaacaaggcccacaacgctgaattgaaattgttcttggaagttgaacttggactggaccttaaacctcttcctcttccagacaagactagagaagatatatttcttctcttcaaactctatgaacctgaaaaggaacagctacggtatgttggtaggctctttgtaaaggcttcaggaagaccacaggacattctgccgaagctaaagatgttggcaggtttttcacaagatgatgatattgaactttatgaggaaattaagttcgaacccaatgtgatgtgtgaatacattgataacaggcttctgttccgatcttgccagcttgaagatggggacataatctgttttcaaaaatcttcaaaggcagatagtgctgaccgatatcgatttcctgacgtaccatcctttttgacgtatatacgtaaccgacaggtggtccactttcgttcactggagaagcccaaggaggacgattttttcctcgagatgtcaaagattttcacatatgatcaagtcgtggaaaaagtagctgaaaaacttggcgtggatgacccatcgaaaattcggcttacatcacataattgttattcgcagcagcctaagcctcagccaataaagtacagaggcgttgaacgtctactggacatgctgattcattataaccagacttctgatattctgtactatgaagtattggacataccacttccagaattacaagcgctgaagacattaaaagttacataccatcatgccacaaaagatgaggtgtcagttcacagtataagattgccaaaaaacagcactgttggcgatgtgctaaacgatatcaaaacaaaggttgagttatctcatcccaatgctgaactgagattacttgaggtcttttatcacaagatatacaaggtgtttgcaccaaatgaaaagattgaaaacattaatgatcagtactggacactgcgtgcggaggaggttccagatgaggaaaaaaaccttggtccctttgatcgattgattcatgtatatcattttacaaaagatactcaaaaccaaacgcaagttcagaactttggagaacctttttttatggttattcgtgaggatgagaccctatcttctatcaaagagcgtatacagagaaagcttaaggttccagatgaggatttctcaaagtggaagtttgcatacatttcacttggtcgtccagactattttgaagattcagatactgtagctttaaaatttcagagaaacatgtatggagcttgggagcagtatcttggactggaacatccagacacagctcctaggaaggcacacacaattaatcagaaccggcattcatttgagagacctgtaaaaatttataactaggcatgatagaaatttgagcaatgagctgccaagcaagggctaaaattgctgtcctgaaataaagcgtgccggggcatgttgctcaggtttttcgtggagctggtgagctagttcatgagactccaagtatgatcggggcggcttctcatctttccctgcttttccccggatacatataaagttgtgcagagatgaccccaccgaacaattgtctttagtagataagccagtacttcccgttagatgactttatacagtcgaatagccggcattttagtcgatctttccgttctccagttgctgttggtgctaggaggccttgagctgttgagggtacttgccctgctgtatattatgacgtagagtgtacaagtctttgttgttgacaattacacggtgttttgtaatttcagtgatacacttccaggtccttcagtacgtacttgcctggatggtgtcaatttggcattctatgttagatattgatccatctgttctaaattaaaattataaggcagtttgacttttttaagatatactgcctccgattttctattagttgtcgtttagaatagtgacacggtctccatattataacgtgtctccatattataactt

SEQ ID NO: 18331 - DNA, 2314 bp, Zea Mays
agacggtgtaccctgctcataggactaggagagacggtgtaccctgataattgcagtagcatcggtaatttcgaggaaataatggcattcataagatcatatgtggtgcctgaagggtttccagacagtgttactccttcatatgtaccttacatgacctggagggctctgaagcatttctttggtggagcgatgggagtgtttacgacaagaaccttgctgagttctgttggagtctctcaaagcaaggtaacaccaggtgccattgctatcaactggatcctcaaggatggtgctgggcgtgtcgggaaaatgctttttgcacgtcaaggaaagaagtttgactatgacctaaagcagttgcggttttctagtgatctcttgttggaaataggagctgggatagaattaactactgctgcattccctcagtttttcttgcctatggcttgcgtagccaatgttgtaaagaacgtcgctgctgttacatcaacttcaactcgcactccaatctataaggcctatgctagaggagaaaatattggagatgtcactgctaaaggcgaatctgttgggaacattgcagatctgctcggtactggtttgagtatctttatctcaaaaaggaatccctcactggtgacttcgtttgccttcctttcctgtggatatctcctgagttcatatcaagaggtgaggtctgttgtgctgaataccctaaacagggcaaggtttaccgtcgcagtggattccttcattaaaactggtcacattccctccttgaaggaaggaaactcacaggagacgatatttaatccaccttggcggcatgagccagtcgcaataggttcaaggtttggagaagcatttcaagagccagcttcatttcttgccatacgacctctgtttgaggacgagagatacatggtaacatataacccaacaaaggataaagtatatgctttgctcaaggaccaggcaaaatcagacgacattattaaagctgctttccatgctcatgtgctattgcattttattaatgcatcacatgctcggagactgaagcagaagcagaagcaggcaaaccctgaccgatcagagtatctgtactctagaaacatggatttcctggcacacatcgctgaatcttgcaaaatagtttcctcatcatatggaacattcaagaagaaagctagggaacagggttggataatgtcagaatctctgctcaaccctggcaaggctcgattatgtgcagcaaaaccacaatgaatgtactgtttcagtttagtatcgatgagatgataccaatctcatgtttgtaagaccaacttttctaacgagacgggatggctaagttcttaggagctgaactaacatatgttggtgcctagcactaggcgtgaacctttgatctgaagcttgccaaattccaggaagaggaagagttttacgatttgtaagttccatctctttcgtgtctatgcgttgtagggtgcacttctagtttctgatcgtttttgtgtttgaaattatgggcatataaacaggaagaatgcctgaacatgtaataaaacatgcagtggataagtggtgcgctggttcgcgactcgcgagtaaagggctcaacgagggtgacttcaaacttctaactgcagagactagagcttgtatttatgtttgctgcggtatcagatttggtgtagccattcctgatgtaacctgtttcccttccgtgttggtcggctgcggggcttcttgtttggaagtctttggagttgctacgttttttacccgccacttggccgacttgtggcacttgagtgttcatctccttggcttctagaccccgttagagcatcaccagcagctgcgggagatgctcttagcaagttccagtttatcagtgaagagtcaatcactgatgtcgtccatagctccttcaaaccttgtacatacatgatcggtaataactgcaagccttctttctgttgatatggcgtgctggtgtggacctgtagtatggtatccactgctgtgttattgtgtatgctcttttttacaaaaaaaagaagaagttattgttgtgtatttgtgtttgtcagatgagtgagccccaccgttactgatcagtgtgtgtcggtactgattagtgtatttgtgtttcttacatgcatgctgaggaaagtacgccgaagtttctgttatagtctactcagtggtaacgagattgagagagagacaaaatgacagaaccgttgtctttattgcagagtgtcatgtatttatacagggaatataaagtctcccaagg

SEQ ID NO: 18332 - DNA, 637 bp, Zea Mays
atggtcatggcgtgtataaatggcgcgcccggcgatcggctccggcacccgcactcgccgagccaagcaatacacagtagtgagcaatagtaggcagcgcagcaggatacatagcagttagcaccacagcgagcagctgcccgtacgcacgcttgatggcgatggcgatggcgagcttcgtcgctcagctcaaggacatgttcctcggcctcgtcgaccgcgtcaccggctgccgcggctgtggcggagacaagcaggacgtgccggaggcaaccaacccgttgagatcaggtcgagagaccccgttgtgggcggaggatccgtggctggggccaattgattgctaatactgccagacaagctgcacgagattgctgtggcgttccagcaaattccaagctttttttttatttgttatttttcgtcaaaggaagctgttctttccacacacaaaaaagcgcataatgcgtgtgcagtgttattgattgatttctcctctatgattgtaattgaacccggtatttttttttctttttcgtttgtttcttttggcgttaccattgtgattccgagtttacgtacatgctgtatcttgctatcttcaagtaaacaataaacagtaatggtttgaccaata

SEQ ID NO: 18333 - DNA, 2579 bp, Zea Mays
cgtccgccccgggatttcgcctccagtggtagcgggagtgccgcgtcgtctttcgctcccaagtgcgacgggaaataaggcacctgtgttcctacttgcaagatctaaagaaggcttctgctgaagagatgcgcagaagtgtttatgcaaattatgctgcattcatcaaaacatcaaaggagatatcagaccttgaaggggagctactatcagttagaaatttgctaagtacacagtcagctttaattcatggtctgtctgaaggggttcagatagattcgttggccacagggcctgaaggttctgctgaacaagacatatccagtgttgaagatcaggagccatcagaaatatggaaatggtccacagatttccctgacatgcttgatgttctgctagccgaaagaagagtggatgaagcactggatgccttggatgaggcagaacggatcgctgctgatgccaaacaaaagggaactctatccacgactgacattctggctttaaagagggttatatctgaaaaccgtcagaagttggctgatcagctagctgaagctgcttgccagtcttctatttgtggtgttgagcttcgagctgcagcttctgctctcaagagacttggtgatggacctcgtgctcatagtttgttgctcagtgcacacaatcagagacttcagttaaacattcaaacaatacaaccatctagcacatcatatggcggggaatacactgcttctcttgcgcaacaattttttcctgttatagctcaggctctcagtgactcagttgaggtcttcagtgaaaaatcagcttacacatctgaactagttacttgggctactaagcaggcaatgtcattttcgcttcttgtaaagaggcatactttagcctcttgtgctgctggtggggggttaagaactgctgcagaatgtgttaagatagcgattggttattcagacttgctggaagctcgtggtctatcactttcgtcagttctgatgaagcaactcagaccctctgttgagcaagcattagattccaatttgaggagaattgaagagagtactgctgctttagctgcagctgatgactggatactcacctatcctccaactggtatacgtccactggctagatcatctggtaatctggcactccagccgaagctctcaagcagtgctcaccgtttcaattcaatggttcaggatttctttgaggatgttggaccactggttagcttacagctaggtggttccgcgatggatgggcttctgaaaatattcaactcgtatgtaaacttgctgataagtgctctaccagggtcagtggatgatgaagttaacttggaaggtttggggaataagattgttagaatggcagagacagaggaccagcagttagctttgttagctaatgcatctttactagctgaagagttgctaccgagagcagcgatgaagctgtactctatgaacccggtcagcaaagatagcttgcgtagaagaggtcctgaaaaccaaaatcgtgcggcagagcagcgggcatggaaaaggaagctgaaccgcatggtagagaaacttagagatagtttctgcagacagcatgctctagatcttatattcacagaagaaggtgacacccgtctgagcgcagagatgtacatcgatatggataatactgttgaagatcccgaatgggttccatctgcgattttccaggaattgtatgcgaaattgaataagatggcaagcgttgcggcagacatgtttgttggtagggaaaggtttgccacgctgcttatgatgagacttacggaggcagtcatgctttggctctcagacgaccagagcttttgggaagaggttgaagaaggaccaagggctctgggtccggttggacttcagcagttctacctcgatatgcaatttgtgatccttttcgggcaaggtcgtttcttatctcggcatgtgcatcaagtcatattggacatcattgatagagcgatgagagcgttttctgccacggggatggaccctgataggatccttccaagcgacgactggttcatcgacgttgcccaggagagtattagtaggatcggcggcgggagggcacgagtcgccaatggggacagggaggtgaacagccccacagcctccgtgtcagcgcagtccgtgtcgtcagttagatctctcggcagctcctagcgtgcacagtttctgtatcaatattactgtagggatttgtttggatgtgtttgtgctggtacatatgtgtgagtaattaattgtatgcctaggccaagaaaatccttgaagctggtcttgttcacctgttctgagactttgggccggtccacgcatcggcattccctacggtagtggtaggtattgatggaccaaatgtaccggctggtacagccacgggcacaacacgaatcggctatgctattgctagctacgacacggttatagttccgtgacaggtattgtctgctcttataaagctctagtttttttttttgtttgcacgtgatctcttttggaagaaaaaaaggttttatacttctttctaat

SEQ ID NO: 18334 - DNA, 1292 bp, Zea Mays
tctactgatcctttgaagtcagcatgtccccaaaattaatggagaaatcccatcaattgatgaagccactatggaccatgaaaggctgacagaaaggttgaggctgtatgagctggttgaaaacaaggtgaaaggagatggcaactgtcagttccgagcactatcagatcagctttaccaaagtccggatcaccatgaatttgtgaggtcgcagataattaaccagcttaaaactaaccgtgacgcctatgatggatacgttcccatggcatatgatgattacttggagaaagttgcacggaacggtgaatggggtgaccatgtgacgctgcaggctgctgctgacaagtatggagtaaaaatcttcgtgatgacatcgttcaaggatacttgctacatcgagatcctgcctaaggttcagaagtccaacaaagtgatactgttgagcttctgggcggaggtgcactacaactccatacatccgcagaacggtgagtaggcgtgccgttggcatgccgggccttcaccgccaacatgctccgaggtcgcagacgaccaagaggagaagatggtggccgttctcgcagcaccaccaccattgatggcgggttcagctctcttggggctggatggatgttcaggatcaggtggtggtcccggtcccggccatcgtccagatgatactacaagggacgtacgacattatgattaatatatatatacccagagcggagcagaaagacctgataagggaattagttgggatgaatgaaatggaataaacatgggatgggatgggaatcgtcgtcccgtatatagtttagagtggaggccggtgagcgccaactcaaactctttgtattgttgtttatatctacaaattttgccggaacgaggctagaattattggggaacaattatggtaataataaatcggttaagaattgagatgacccagctgttggcagagctcggatcatcatatgaccagaatcagaatggattccccagtgcatctagttttcctctggaagaacagaacaacataaaagaaaaacgttgaacactgaagtgggaagctgtaaccagaaatcttagatttgagcccaactgctctttttggaaggcaatatctagtttttggcccatgagtccaggacattttcagagggcccatgagtcatttcacaggtgaacaaccattgtagccattatacatacagagtaggctggtgtcttattttcgggttcaattgtaaatgattagtcaatgccatacagtcatttttggc

SEQ ID NO: 18335 - DNA, 1055 bp, Zea Mays
tcataaaatcaagatcgctgtagtacatatactgtagagttcatataggatgatgattgtgaaagaggaaacctgggaagcagtaattgctgactcgttgctttatgcgaagggtttattgctggcagttactttggttattgattggtggctggcctttgcctactttctgggatttcttgttatatatgctgtagctcaacagccaccttatgatggcctaggccattcaaatcacttgaccccattgcaacttgaaagtttgctaactgaagagccaacatcacgattttggctggtagaattccgaacttcattttcagcaaaatgtgtacaagcaagcagcattctgcctgaactttctatcgtgtactccaacaagaacatctcttttggaacaattgaccttgggcatttcccaaatgctgcagcaaagtttgggatatccatgtgggatcatctccccacttacatattgtttgacaaggtgactgaagtttctcggtttccagaaatcacaagtgaatcaaaagtatttgtgccaaaagttactaagaaacttctttgccagcattttgatctcgacagacgattgattggatacctatccacctgatctgacaccgatcccatatgcctcaaaggatggggacatctcccttttttgtcgctgaaccggacatctgtgtgtcagcagcaatcacttcaggggggtatcgtgagccttgtattattcggcgaactgcttattcccttttaattaaggcccagtaaactttgtggcggaaaaacacacacacacacacacaaccaatttctgtctaatctgtctgatactgaattatagaatttcactaccatgcagaggtttctgtaatgatttgccgactatgttttgtcacattgtgactgcagcagcagtcaattcagacagcatccacttccactgagccaggggtgtcccggaatttgttcgcctccgctcctttttctcttgtgttagtggcctgcacggtaggtcttcctggctcccctccgttccatttcgttgtctg

SEQ ID NO: 18336 - DNA, 171 bp, Zea Mays
attaattcgattgataatgtttaatcggtcgtattcctctatatttatagaggagggggctgaacccattacatacaaatctcccaagttaattccgcgaatctagccaacaactgtagcaagaaactcagaaccctaactgactacgcgcgcggaccgtctagactcggg

SEQ ID NO: 18337 - DNA, 170 bp, Zea Mays
caggtcaagaactagtaccgcaggatgaggtgcatgaaggatgttgtgacgagttcgtgagtggtctcggccgttgtctcccagtcaactatggttgctggatcattgtcttcatatgatgtaattattttactattttgtatagaattctgttatatattgatgatgtg

SEQ ID NO: 18338 - DNA, 1252 bp, Zea Mays
ccggtgacgggggatacggcggcatcgtccccctcggcccctcctccatccccggcgcggcggcgccagcagccggcctgcaggttttgcaggtttcacacttcttatcatggatgataagaacaaagtcaagaaggaaatagatggcccccttggacccccacctcgcaaggggggacttaaattcgcaccaaaagtacctcagaagaaacctgccaaggttgtcccaaagaaggaaccggttgaagagagaaaggaggatgctttggataaggagttattgatgaaacttaagatgtcgcaaaacaagtatccctcaagaattaagtccgacgaaaagccaagaagtggtacacaggttgcatttggacaaggaaactcttattatgcaagaaattttcccatgcccaaaaaggattcttcagcaggtggagcttcgaagttaccaaaagaatatgcagaaccatgggactatagccatgattatcctgttactctcccactaaggaagccctactctggaaatcctgaaattctggatgaggaagaatttggagaatcttctgccagcaggacccaagatgatgaattatctgcagcagagcagcttggattaatggatatgtcgtcggaatcacagttcctcttcttccagttgccatcctctcttcctttaccgaggcagccacaatcaggtgctgaccctaacgaagtccgcgatgagaaacgtgaggacatgaggccatcatcgcacaatggctcgaaactcaaagaggttcctgaaggctatatggggaaaatgctcgtatataagagtggtaaagtgaagatgaagataggagacactctctttgatgtttcatttggctcgaattgcatgttttcccaggaggttgcagcaatcaacatcagagaaaaacattgctgtacggtgggagagatcagcaagcgtgctatcatcaccccagatattaactacatgttgggttctgttgacaagatggaagaatagtccattggtttctttcgcgcaaaccatatagaccatattatgccattacaagatagttttgctttcttatagagaacgacctgtgataccctctcagacttcttcaagaaaagatgcctcaaacaaaggaatgtgcctaatttgacactgccgttagtttccacagcaaacgcataacacaactagactagacaggtctgcggacctttctcgatgccaacgtcggtagttcggatatgc

SEQ ID NO: 18339 - DNA, 325 bp, Zea Mays
gttgatcctgccagtagtcatatgcttgtctcaaatattaagccatgcatgtgcaagtatgaactaattcgaactgtgaaactgcgaatggctcattaaatcagttatagtttgtttgatggtacgtgctactaggataaccgtagtaattctagagctaatacgtgcaacaaaccccaacttccgggaggggcgcatttattagataaaaggctgacgcgggctctgcccgccgatccgatgattcatgataacttgacggatcgcacggccttcgtgccggcgacgcatcattcaaatttctgccctatcaactttcgatggt

SEQ ID NO: 18340 - DNA, 2866 bp, Zea Mays
aaactattatgatggttttccttaatttaggttaatgataaaactggtggatacaataataaacttgttattacatgcttaagaagtgggctaaatcgctcattccgtgtgctccaaaagcctgaacgtgcaccgattagagcattgagggcttcttcatctggacggtaccttctgattctgtttcgcgatgctcctgttgaagtgtgggctatgacaaagaaccccatgatgcttaggtccttggcgcttccttttacagtattagaatggacactgccagctgcacctcggccaggtcaaaatgcatcatctaaacagtcttcaacctccaaggagcgatcagcagaggcttctggtgcagaaagttctgatgaaacatgtgaaagttttgcttttgcattagtcaatggcgctcttggtgtgtttgaagtgcatgggcggcgaatacgagattttaggccaaagtggccctcgtcatcatttgcatcttcagatggtttggttactgctatggcttaccgccttccccatgttgtaatgggggatcgatcaggcaacattagatggtgggatgttacaagtggcctttcttcttcttttagcactcacagggaaggcatcaggaggataaagttttctcctgttgttcatggtgatcgaagcagagggcgcatcgctgtgcttttctatgataatacattttcgatatttgacttggatagtccagatcccttggcaaatgcccttcttcagccgcagtctcctggtacccttgtcttggagcttgattggttgtcaacccgaacaaggaaggatgaaccacttatgttatgcattgccggagctgatagtagcttccgactgattgaggttaacattgatgctaagggcagttctatttcgaagccagtagctacgaaagagaggtttaggccaatgccattttgtttgccagtattatttccaacggcccatgctttggctttgcgaatgatacttcaacttggggtgaagccttcttggtttgaatgcaatagtagtgataaattaactggggacagctttaaggtagcaccaacatttggagatcttcgtagttacatgattgagacaacactccctcctattggtgacgccgttgtggctgaattgctccttaaagtgttggaaccatacagaaaggagggttgcattcttgatgatggaagagccagcctatattcagctatagtgaacaagggagcttgtgcaagatttgcatttgctgctgcgatttttggtgatttccaagaagcacttttctggctacagctgcctcaagctcttcgccacttcctgggtaaatccacaagtagatcaagagagaagatctcacaatcaagtttacatcctgattctgaacaaagctccagatttaatcggatagcttcaagagagagatctgcttctgaaaaaagttcaatctttgtgcagaattatgggcaattaagctcaatggcatttaatcaagagcaactatggttcaatgcaagtgaaaggataccttggcatgacaagctcgatggtgaagatgctttgcaaaagcatgttcatgagcttgtctctctcgggaacttagaggctgcggtttcattgttactttcaacgccacctgaaggatcaaatttttacccaaatgcattaagagcagttgtgctgtcatctgcagtctcacaatccttgcatgaacttgcagtgaaggttgttgcagccaatatggttagaacggacaaatcgctatctggcacacatcttctatgtgctgttggaagatatcaggaagcatgttcacagcttcaagatgctgggtgttggaatgatgcagctactttggccgcaagccatttgcatggatctgactacgcaagggtgctgcagaggtgggccgattatgttcttcgtggtgagcacaatatgtggagagctcttatcctatacgttgctgctggagcactgccagaggctttggatacacttcgcaagagccagcgcccagataccgcagccatgttcttgctagcttgccacgagacctactcacaagccttatcagaatcagagcccgaggacgacacttccgtgttagcactgacgccgacgccggagcagacggagaagctccggttcccttccaagaatgtggccgacgaggacctgatcgcagtcagtgaggtcttcgggcagtaccagcagaagctggttcatctctgcatggacgccgaaccgacgtctgactgaatcgcacgccttgtcgcatggcagactgatgcgggcgtggattctccgtttttgaagcttattattatcaacaggttgcaaattccttccaagtttctgcgaagctttttgttctgtctgttggtaggtaccagacgtccagacatgacatcgggactgctgatgtggcagaatctgatggcaggaggcaggaacagacatgcagtgctgtatcgtaggtgccaatggttggcactgtttatacatacgtaagcatttgtatttggtacaagctatgttttttttttctttggtgcgcaaagagcgagtgcgcagcgaacttctcttgtggccgagatgagatgagaacagatgccatcgaggcagcagcagacgatatacttacacctgtacacccatgacagtttttgtctgaagattggttattatatgcttatctgcaaatgcatcgcttcaggccctggagacatcgctgtcactggatccatcgtcattgccgatccgtgcagacattgttttggaggtccgaaagctacgttcttgtcgcattcaagccctccatgattatggatgatggataatgata

SEQ ID NO: 18341 - DNA, 2324 bp, Zea Mays
aagcaaagcgttccgccttggattttagccgtttcgcccgtcccgtggggcggttggcctgttgctaccttgctataaggggaagccagccagggcggtgtgcaggacggggtgcacgggcgcggccctcatccagcagggtggtactggactgtacactgtactgtggagtgagtgcatcagcggtctcgagccacactgtgagccactgattatataccaggccactgattgttacgctgacacgcatgcatcccgcatccctgctccaagagagatgggtctcgccggcggcattgtccggagggtcttctccaagagcccttgctcgtccgccggcagccgtggccacagtgtacgtgctttctcttacatcgcatgttcttcacttgttggcgttttcactgtgtccgcggggcacgtcgttcgttctagtacagtatgtagtggtagtactgtagttgagtgcaacaacaacaacaacaaaaagagagtgaaggtcacttgtttgctgtgtcactggacagactgacgcttgcatgagcacggccgattcgcaggagaaggggtctgctgaacacaggaggagatggggctcgctacggctgtacctctgcggcgaggagatgaacgcggccgcagaggaggaggaggacggggacggcgacacggtgtccgtcaagagcttcgagacctgctgcgtgatgccggaggaggcgcacgtcgtcgtcccggtgcatcatcgtctgatgagcgccgcacacgatggcaacgaccagagcagggtccctggtggtgccgatgaagagggagcggcgacgctcatccagtccgcgttcagagggttcatgtcgaggaggcagctgcaggaggcgagggcgaggacgaggacgaggacgcgcggccgagagccagaaccggacggcgccaaggaccaagagcccagcagccccacctgggggccgtccgtcgcgacgtcggtgctggtccaggtaggcgacgagtcgtcgtcgctgggcaacctccggctccggctaagcgaggagagcgcgtcggtgcagcagcagcggtccagcagccagaggtcgtcgtcgcgcccgccgccagcgttccgagtcaaggaggagtgggacgacagcacggtgagctccaacgtgtccaggatgaggatccagaacaggatcgaggccaccacgcggcgcgagcgagcgctcgcctacgcgttctcgcagcagtgcgtgaggacgcgcgtgcgctgaccgatggcggagagccttgagagcgcgctgatggtggatgcgttctttcttgttgtcgccaaattaagcttcggagctgcggcggcggcaccagcaagaagcggtcgtcggcgcgcgcggaggggcagggggagttcaacgtggggtggagctggctggagcggtggatggcgacgcggcaggcggagcccgcggacgactgcgcgagccgcaacgcggacacgggctccgccacggggcggcgggtggtggtcgtcaggaggcggagcgacctcgccgtcgaggagaaggagagctgcgcctccaacgacgtctcggtcgtcagcttcgacgcctcctccggcctcgcctgccataggcccacgggcaacaagagccggctcaagggcggccggagcttgccgcgccggaagcaggtggcggcgtcggcgtcggcgtcggaccaccgcttccaggaaagatcacacaaggtgagcaagaagggacaccagcgagtggagcaggagccgcacaaggaccgattcgacgccgtcgccgccctggacgacgacgcttgccagcctcccacggattactgagacgacctgctctgtacatagatttggaaggatttgcagcgctagctgacgatttgtttcggcttgcactagtctgaaagactgcacggttactgtctgctgagtgactgtacgtgtcgtgtcggtcatgtaaaagttcctcgctacacgtacgtcgtatcaaacgtcactcactgtaaaacgtcacggccacatacacgatgacgagttccggttccctagacacggcaaggagaagcaatcagtgacagtatttgtgatatcatatccatccaggcatccagctccgtttgttttgcgttagcacctaaagtacgactgcactgtaccgccacaacagtttacttatggtgtgtttcgttttaagtcaatgtatgatgagacaggaggacaccgttctctcgattttttgtatcacgtcgctatcaaaagttacttcgttgttcacctcgttcctgcgtgactcttatccaaacactataaaaat

SEQ ID NO: 18342 - DNA, 2647 bp, Zea Mays
caattctccacggccagagggagtccaactccgcctccagcactcacgcttcgtctgctgaccctacccatcgcggccgccgccggctcgccgctgctgccaggcgctatgcggccttgctcccgcatactcgcggcgcgtcacttcgtccgcagcttccggttcgatccctcccaaactacctcccccgctgccggatttcgtcggctgaccggagccaacaggccgttcgtgccgaaacctctctttggcattctcctcggaggcttcagatcgaactgtggcgtactgcctgggaaaggggtccccttgggcagcctcggcagcttcctgccggactctgcctaccagctgcacggcgcgcggcttcaacgagatacgagaggtaatgcattctccacatccgccaatgctgtgacagttaagaagccagttggtgacaaggtccagaaagatgcatcaaaaaaggatattgatgaggagattgctgattctcagatattgaaaaaccttgggaagtacttattgttgaatgacagccctgacttccgctttagggttgccttgtcgttggtcctgttagttggtgcaaagcagctgttctgataggatatggaatcgcacgatcaggagtatcagcctgtacagaactgcgaaacgctgtattttctaaagtgactttgagagcaatccgttcagtatccagaaaggtattttctcacttgcatgagcttgatcttcgatatcatctaagccggcaaactggtgctataaatcgcgtaattgatcgaggaagccgtgcaataaattacatcctcacagtcatggtgtttaatgtcgtgcccacgatactagagattggtatggtgtcaagcatacttgcctacaaatttggttcaacttttgcttggatcacttcagtttcagttgctacttatattgctttcactttggctgtcacacagtggcggactaagttcaggatggccatgaataaagctgataatgcttctagtacggtggcagttgactctcttctcaattatgagactgtgaaatacttcaacaatgaacaatttgaagttgagaagtacgacaaatatttaaggaattatgaggatgctgcattgaagacccaaagtagtcttgcctacctgaactttggccaaaatgttatctttagctcagctttatctacagcaatggttttgagctcatatggaataatgagtggtgctctgactgtgggtgatttggtcatggttaatgggcttttattccagctttcattacctctgaacttccttgggagtgtgtatcgagaatctagacaaagcctcattgacatgaagtcaatgtttcagttgcttgaggaaaaacctgcaataaaggatgagcctcatgcacaacctttgcagttcaagggagggtgcattgaattcgagaatgttcattttgggtatgtaccagaaaggaagattcttgatggtgccactttcaccgtacctgcaggaaagagtgtggccattgttggaactagcggaagcgggaaatcaactattcttagacttcttttcagattctttgattcgacttcaggatctatacgaattgacgggcaagatatccgaggagtgacactggggagccttcgaaaatgtctaggtgtggtacctcaggacacagtactttttaatgacacgattaagcataatatacagtatgggcggttatcagcaaaagatgaggaggtctttgatgctgcccgacgtgctgctattcatgatacaattatgaacttcccagacaagtatgacaccgtagtaggagaacgaggattgaagttaagcggcggggagaaacaacgagtgtcaatagcccgtgtattcttgaaggagccttccattctgttatgtgatgaagcaactagtgctcttgacagcactactgaagcatcaattttgaattctctgaaatccttatcttccgatcgaacatcaatctttattgctcatcgactcacaactgcaatgcagtgtgatcagataattgttttggaggatgggaaggtagtagaacaaggaccacatgattttcttctgtcacagggtgggcgatacgcagaattgtggtatcagcagaacagcactgacgccatggattctgctgcagctagcgtagaggtttgattgaccatgtttaccttttccttctgcaaggggaaaagaagggaaaacacaatcataaccgtgagagagagggatggagccaacttgtctgccttgtaattagaggtaggttttttggttcgggggggaggggggggggggggggggcataaacgtacagttccattttcaagatagccgggaggattttccccccttttgagattgtatagacgatccctgcatgttatgataaccgtaacgtttctgtagcataagggataaagcccagtaagggcctgtttgtttcgcatggaataaagggtagaataaatctggcttggattcctttaataattactataatttttggagatttagaattaattctggtctgttccagtagaaacgaacgggccctaaatattcagttgcctcaggcgtactaccgtttcaatataaatgctcccatgattgct

SEQ ID NO: 18343 - DNA, 138 bp, Zea Mays
cttgaaattgccgggagggaagcggatgggggctagcgacgcgcaccggccgtatgcggaacgactcctgctggtccgccgatcggctcggggcgtggaccgttgtcgcccgcgccggcggccaaagcccgggggccc

SEQ ID NO: 18344 - DNA, 251 bp, Zea Mays
gggtcggatggggagctcgcaggccgttgcagcgcagcgccccgaggggcgcgccagaggcgcgcggataccgtccgcgccgacgacggctgccgggggcgcctagggcccccgggctttggccgccggcgcgggcgacaacggtccacgccccgagccgatcggcggaccagcaggagccgttccgcatacggccggtgcgcgtcgccggcccccatccgcttccctcccggcaatttcaagtttttttt

SEQ ID NO: 18345 - DNA, 1324 bp, Zea Mays
gtggcgtagcacaattaattaatgatatgagagagataggaagaatagaaggtaacttctgttctgacaagaagtcagctgctgtgaactggatcgatggccgtgggaagtcggtggtttgcgaggcggtaatcaaggaagaagttgtgaaaaaggttctcaagacaaacgtacaggctctcgtagaattgaacgtgatcaagaaccttgccggttcagctgttgctggagctcttgggggtttcaatgcccatgcaagtaacattgtggcagccatcttcattgctactggtcaggaccctgcacagaacgtggagagttcccagtgcatcaccatgttggaagctataaatgatggcaaagatctccacatctctgttactatgccatctattgaggttggcacagttggtggaggcacgcagctggcctcacaatctgcctgcttggacctgcttggcgtcaaaggtgccaacagggaatctccggggtccaacgcgaggctcttggccacggtggttgcgggtgcggtcctagctggggagctgtcccttatctctgcgcaggccgctggccatctggtcaagagccacatgaaatacaacagatccagcaaggatatgtccaagacccttgcagaggaaacagacaaacccaagaaatgctgaataatatcaagtagttgttctatagccctttgggagaaaaggagcagaaagggtcgtacaggatgactttcttgcggcatgctcaggtggaaaggggggaaaaagaccttcaggcgaaaagagataattcagtcgccttgtcatatttaccaggcggtgagacctgttgtggatcctggagtatgacctatttaatttgttgatgttgttgttatagttcctctaccgtacttgaccccgtttgcatcttgttttgaccgtcccatgggcattggagaatctgaccatgggttttgtcccaagcttgcatcacactggggggacctctgctttgcggcggccccgtctcagaaaaaaaaattgcgctggtaactgccgggtactgtgtatttcagctttgaaacttttatccaatgcttttgagtcgaagagtcagtggactcgatgatgtggttgtaaagaaaaaaaaatgcttttgtgtggaagagtcagtggagtcgatgacgtggttgtaaagaaaaggtgtgcttcagaacaagagtacatcacgttgcctctctgctttctctgtagcgtgttcgtctcaattgcatgttccggttggctgggctgccccgtccacggatcaggtttataatataataatttaatacaaa

SEQ ID NO: 18346 - DNA, 268 bp, Zea Mays
cgagaaagagaggaaaccacggaggaagacaaaaatttcaagtacaagattatctattacgtacggaaattcttggatcaaatcgtagacgattgtctctccaaattgtttattacttctaacactgcatttgggaccaattttttcgcgtgctactagtaataataaagagaggggagagacgagagagagagagggtaatgtgcgaatggtgagaaggttgtcacggcgaattttgcatggctggatctctgcgatcagtgtgctt

SEQ ID NO: 18347 - DNA, 780 bp, Zea Mays
ttaaatttcacttcatcttgtaaactctgcatgaaattgttccactgaggaaggtgtgccgccgaccggaaactgactacaggcttcagattctgcatgctgctagagcggcagccactaatgcagatgttcacactccacccaaagaggttaaggtggagttggcgtccactgataagagcccagccgagcagaaaccccataagcagcacaagatgatggacgtgaacactgatgaggtgaccatggtctccaccttggagcaagatgagacaccaggcaagactgtagcccccgtaccgtcagcaactgcagaaacccgcaattcaagttcggacacagtgatgaaaggtgctgaggcttcctcggtcgttgaagatgacgatgaagtgcaggcagttgacaagatgaaagaggggtagggttttttttttctgtcaccttttgttatctaggtcagtgcctgtcttaattaccatgtagcatcttaatggcctcagaagcttgtttgaaggcctatgtgagcctttgccttgcctacacctttttgtttggtcgatgatatggtgaaatggaacctggctgggatggttctgtttctccgagggacttttgttatctgtggtcttccttctccagcgtgggcagaggggcgccagagactgcgggtttcgcttcaggatctcagggtaaaatgtgtagctgttcgattgattgtttgcttcactccattgagcgttgttcgtcaataataatttattggagtagtccttgctagtt

SEQ ID NO: 18348 - DNA, 2689 bp, Zea Mays
cgtctgtgttttcttgtggttctcgcgtgctactgtgctgagaggggaccaggaagaatccgtcgtccggccggctcgctctctgccggccatgacgagcgccaataaggcgaagctccagctgcaggagagggtcccgctcccccgcacggcgtggaagctggccgacctcgccgtcctttccctgctcctggccctcctcgcccgccgtgcgtcctcgctggtgtcgtcgggcggcacggcggccgcgtgcacgtggtgctgggtcgccgcgctcatttgcgaggcgtggttcacggtggtctggctgctcaacatgaacgccaaatggaaccccgtccgcttcgtcacgcaccctgaacgcctcgccggatattgggcgggcgacgacgagctgctgccggcggtggacatgttcgtgacgacggcggacccgaagctggagccggcggtggtgacggtgaacacggtgctgtcgctgctggcgctggactaccccgcgggcaagctgtcgtgctacgtctccgacgacggctgctcggcggtgacatgctacgcgctgcgcgaggccgccgagttcgccaagctctgggtgccgttcaccaggaagcacggcgccaaggtcagggcccccttcgcgtacttctcctcctcctccggcggcggggcggcggagcgtggcggtggcggtggggccgccgacgccgacgccgagttcctgcgcgcttggacgtccatgaagaacgagtacgaggagctggtccgccggatcgagagcgccgaggagaagtctctagtccggcgcggcgacggcgcgttcgccgagttcgtgggtgctgaccgcgggaaccacccgaccataatcaaggtcctgtgggacaacgacagcagcaagagcgagagcgatgagcaggcggcaggggatggagtcccaagcctcatatacgtctcgagggagaagagccgcacgcagccccaccacttcaaggccggggccatgaacgtcctgacgagggtgtccgcggtgctgaccaacgcgccgatcatgctgaacgtggactgcgacatgttcgccaacaacccgcaggcggccctccacgccatgtgcctcctcctgggcttcgacgacgaggtccacagcggcttcgtccaggcgccgcagcggttctacggcggcctcgcggacgaccctttcgggaaccagatgcaggttatattcgagttggacacggaattgccggactccaaggcatattttactgcgggacgggttgctttcaccgcaggaaagtcatgtacggcgtgccaccgggctccggcaccggcgccaccaaagctctggcagcagcagattcaccgtcctacaaggagctacagaagaagtttggcagttcgaaagaactgatcgagtcggcgaggagcatcatcacgtcgaaagaagcgccagctgcggtggcagatctaacgagccgcgtcgaagtggcgaagcaagtctctgcctgcagctacgagacgggcacgagctggggtcaggaggttggctgggtgtacgggtccatgaccgaggacgtcctgacggggcagcgcatccacgccgccggctggaggtcggcgctcctgagcccggacccaccggcgttcctcggcggcgcgcccaccggcgggcccgccagcctcacccagtacaagagatgggcgacgggcctgctggagatcgtcctcagccgccacaacccgttcctcctctccgcgtccaagcgcctccgtttccggcagtgcctcgcctaccttgtcatcgacgtgtggcccgtcagggcgcccttcgagctctgctacgcgctgctcggaccctactgcctcatcgccaaccgctccttcctgccaaaggcatcggagcccggcttcgtcgttccgctggcgctgttcctggcctacaacgcgtacaacctgggcgagtacgtggactgccggctctcggcgcgcgcctggtggaacaaccagcggatgcagcggatcacgtcgtcctccgcatggctgctcgcgttcctcaccgtggtcctcaagacggtgggcctctcggagacggtgttcgaggtgacacgcaaggagcagcagcagcagcagggctcgcccgacggcgacggcgccgacgccgacccggggcggttcaccttcgactcgtcgccggtgttcgtcccgccggcggcgctcgcgatgctgagcgtcgtcgccgtcgccgtcggagcgtggagggcggtcaccggtggcggcggcggcccgggcgtcggggagttcgtgtgctgcgcctggcttctgctctgcttctggccgttcgtgaggggcctcgtcggcggcaggggaagctacggcatcccctggagcgtcaggatcaaggctgccctgctcgtggccgcgttcgtgcacctgtccacacgcaagtaacttgcccggccccggcgtcgactcaccactgctactgctgcggaaggttttcatgtcagagacccgtaataatgcagacaacagcatgttccgcctaagatttgtacacaactctctgcttccactgcttgtatagaattcttgctcaagattacaagtcgaggccagtggtcggcgatagaaacagcgagtattattttatcctactcccaccagttcctgagcgtcgattctgggccgcgtctga

SEQ ID NO: 18349 - DNA, 2134 bp, Zea Mays
ccaccgtgcagttacagtcatcacactccacgcaccgcggctaccacctctgttctcttcctcgcttccttgctcaaccggatcgacgcgagcgtggcaagaatcgcggtgcgtgtgagccttgttcggagaagagctacccgatgcagctgaggctgtgagggcactgggcacggatgatgggagaagcaggggaggaagaatcggcggccgcgccggcggaggtgagccgacaagcggagctggatgagcagcgatgcctggcggaggcgctggacgccctcagttcgttggtctccgcttccttgtccgcgacgctgttcccgctcaagtggcagctcaccagggaccggctccacgcctgcctcgccgacaccaccgtccccgcgggggacgagagcggcgaggacaggcgcgacgcgttcgtgaacctcctgcgggacgtcgcggcgaccgctcgggaggcgcgagagctggtgccgcgtagccaggggcggcagtacggcggcggcaagctgcggctgcgcagcgacctcgacgtcctggccgcagccctcgacgcgcacgtggcgcggctggacgaggtgcacgcgtcgggcgcgctgacgcgggcgcgggcgctggtggtgccgcgccccggcgccggggccacccgcgacgacgtgcggttctacgtgcgcgacctcttcgcccggctcagggccggcggcgccgagatgcggagggaggccgcgaccgcgctcagcgaggtgctgcgcgacgacgagaagtgcgtccgcgtcgtggcgtccgacgtcgcggacggcgtcggcgtgctcgtcgcgctgctcgagtgccccgacgcccgcgtccgggaggacgtcctggaggcggtctcggtgatcgccgggtccgacgcgcacaggggagacctggtcgtcggcggcgtcatcgcgcctgtggtccgcgtcctcgacgccgccgccagcgccagcagcgaggcggccaaggagagggcggcgcgggtgctctgcaaactcacggagaactcggacaacgcgtgggccgtcgccgctcacggcggcgtcacggcgctgctcgacctgtgcacggaccacggagcgagcggcggcgagctcgtgtgcgcggcgtgccgggtgctgcggagcctcgcgggcgtcgacgagatcaggaagtacatggtggccgacgctggggccgtcccggtgctcgtgtctctctcgcagagggccacggacgacgcggcgcgaatccaggcaatggagctcgtcgtcgccatcggctctggggacagctcagccagggaggccgtggtccaggaaggtgccatcgaggtcctcgttcgcgcgctcgacgcctcctcctcctcgaaggtgcgggaggtggccctccgtgccatcgacgggctctgcctctcgccgcccacatccaccgaccgtctcctcgccgccgggttcctcgacagcgtcctctccctcctccgcaccggagacaccacgctgcagcactgcgccctgaaggcggcgcaccgtctgtgcccggtgtcggaggagatcaggaaggcgatgggcgacgccggattcatgctggagctggtgagcgtcctcggcgcgtcgtccaagtcccccgaggcgcgggagatggcggccgagtcgctctgcgccttggtgtccgtgcaccgcaaccggaagcggttcgtccaggaggaccgcgacgacgtggcgcgggtgctgcagctgctgggctccggcgacgaggagaagctcacgccggcgaagcggttcctgctgtccacggtgacgcgtctcgcggacagcagctccggccggaggaagatcctgacctcggagcacgtcaggaatctggagaagcttgcggagaccgatgtcccggacgccaaacggatcgtgaagaggcttggcgggagcaggctgaggagcattttccatggcatttggagcctgtaatgtaatccttggagacaagcatgcactagctgccacttactagcaccatgtcgatctctggctaacacataactattgttccttgcatcttttgttactgtgaaggaatcaaaagcatgaaccacccagtgatttgtctcctacccgcatgtgtaaatcactcgtct

SEQ ID NO: 18350 - DNA, 3284 bp, Zea Mays
ccagtcccgggaaccagcttccagtgcctcttgtaccgatcatcagcaagggagtgctagaggaggaggttatggtgagttttgtcgcgactaatggtgagcccacgactacggccacatcaaagctggtctggtggaacctcgtggagcagatgacgatgacgccgacatcctgcacctctgctgcgacgctgccgaccaggacgcgggcccctccgtcgcgcgcgctctacaagtctggatccatcatcgtgctcggcaagactgacttccttaggccagacatggatcccataaccagatggacagccacaaagaaaagtggcctgattagctacaagaagctcttgttccatggactcgatctctggaccgcactatcgttgcctcaacccctaggtcgtgctgccctctggcctcctcatcgtacaattcaccaacatctccaacgtaagtgcagcaggttcagtaatgaactcaaaagtggcatcagaatactctaagagttttttgttctttttgcctggatatataccgagggcaatgcattcaaaactcctatagatgacgaatcccatctctccctcttttcccggacatcgatcccagtctcttcttcaagcaagagatggagctttccttggtcgggctccaaaatgctaggaaaacatcacttgcagcagctcgcagcgacacccccgcctcctcatcatggaagctacaagaacactttgagtaggtgaagaggatttgcgacactaccacattgtctttggccatgcatcatctcagtgataagataacaagccaactagatatttcaaaattgactgacaagctacagtaagggaaggtagactcaactgcattgacaccaaaggagaagtatgaaacttggaaggagattaaaattatgagtttcagaaaaatagtttctccaatgtgggcaatgacattgcttagcttgtatgttagagttcatgtcaccatattaggcagaatctgacgcctttaatgtaaatggacacaagaccttcgttgcaatggatgattatcttgtcactgacaaaatcactgcattcatagtgcaaacgcaacatgcagcaactgaagtccttaaagaaaagcaaccaaaagactgtatgaaatggaccaagtattgcagacaatattacaaatattggacacgttcatggctctttctgaagatactcatggagaaattatcttgtacctgagaatcccccttatttttgcacaattgatggttgtgtcctgtagtggctttgataattcatcactcctaaacgattttagaaagctataccaactaatgtgtggaggacctgggcaaggggtggtagtcgcgctggttcgctatccacggcggcaagccgcctactcgaagatcccacctccgaggacgccgctacggggaggacatgggcactaatcttgaactaaaactaggggggtgtctattttcttaccgacacagggagacagaaaaggcaacagtcgactctcgcccagggcacgtgagtgacggtgtatttgggcggcccaacgcccgcaagctgccacatttcagcccacgcaaaccaagccaggcgaaaacccggcaccggtgcgccagcccagccacaggctcccaaaccgaccgggcggcgatggtgttggtgtcggactcggagctggtggagcggctgcaggaggtgctgcggtcgtcggacctcaacaccacgaccaccgctgccctgcgccgccgcctcgaggaggacttcggcgccgacctctcccacaaaaaggccttcattcgggagcaggtcgacctcttcctcgccgaggtcgccgccaaggccgagccgcaggagcccaaggaggaggagcccgaggaggcgccggtgcctaaggaggaggagccagaggagctcgagggggtggaggaggagggcgagggggaggacgaagaagaagaagaggaggaggaggaggaggaggaatgcgaggatgagaatagcagcggcgcccggaagaagcagcggggtaatgatggcaaaaagaggggtggtggctttacaaaattatgcagtctttcaccggcacttcaagagtttgtcggcgcctctgagttagccaggacagaggttgtcaagaagctttgggcatatattcgagaaaataatcttcaagaccaaaacaataggaggaagattttgccggatgagagattgaagaagatcttcaatgtcaattccattgatatgtttcaaatgaataaagctttgaccaagcatatctggccattgaattctgagggtcctgtctctcctgatagatcaacacccaaagagaagccacaaaagagagacaggagtgaaggaaagaagcaaaagggtggctcttcaggagctggatctggttttctcgtgccccttcaactttcggatgatttagtaaaatttatcggcactggtgagagcatgttatcacgatctgatgtcgtgaagaaaatgtgggattacataaaagggaacaacctgcaggatccttctgaccggaggaaaataatctgcgatgagaagctgaaggacctatttggagtggaaacattcaccggctttactgtttcgaagctgcttgcccctcattttaccaagacgaagtagcaacctgccatccacatcttctaaaaccaaaaaggcttgggacataaaattatctgtgcggtgtggcttctagtgcgttcttcccgagttcatggtccaccatttttcatgctcagggttgaggatgacattgctcggtctcctcagatgaccctagtggtcatggaaccgtaaagacaaggggggagcactagcgcttgtcgcctagggtttcagggttctccacttgccagtgaatctttcatcctttttagctcctgatatggatgaagtttgtagcactagcgcaaccgccttttgctgttccttcccactcacttggtaccggttgttcagaggacgccagtttatatttgtatggaccacctaaactgaagctgttttgtcatgtgggtggcatggcgaagtgggtcgatatcgcgacggttctgtaacgcgatcttgcgctgtttccaactgctggtgccatttgcctgtcagttcaaagttaaattgtgttcagattctggttccgagggggtacaggtacgtacacattgcacgagcagaatgtgattcaggggtagggtcggagtccgtttcagcagttgggtcgtcgtgctgcgttggtctcca

SEQ ID NO: 18351 - DNA, 2561 bp, Zea Mays
ggcgcgtatacgagcgaaggaaacggaagtttaagttattcccaaattgaacggcccaaagggaaaccccaccacaaccggtctcgagtctcgacagatcggcgtcgatgaccctaccactcgctggccctcccacgccttccccggcatggccgagcccaccccaccgtccctcccctcgtccgactgcgcagacgtgctcgtgggatcctccgccccctccttcccctacatccgcggctggtcattcacctccgactcgggcgctgctatgggttctgtagaggaacatctccaacccaaggtgtgcgtgcagacgagcacctccgcggggcttgagcagatcctgccctggctcttctatcacaaggtcgtcggcgtcgcgcagttcctgctcttcgtggagggcaaggcggcgaaacccaatgtcgcgggagtcctcgagtcaattcctggggtaaaagtggtgtacagaactaaggatcttgaggagcggcaggcacggaggtcagcttcgttttctcagtcccctgtttccgataacagtttttcttgtgtgtcatttccacataaaccccatataaaaaaataactgcatcttgtttcaactttcaaagtgagaaccaaaagcatagggttgctggtgtagccagacaaaactaagtcagaccgcatccaaccattgacaattatggataaagggagaaattttccatgcctagttgcctactattaacccacttctaggacatgtcgaagattgtttaatagggaatatacgcggaatttagacaggtttgagccctcgatgcgagataataccctacatcatgtttgaggtggttctgttgttgtattgtatgttctaatctgatgattctatgatctgatgctctcaggcggttccctgtccctcttttaatattctaaggagtgacggaagttacatgataggcaccgagtcggctatcaagttcatgatggaaccgagtcggtacaaagtcatacgtgaattgaattctatgtcttcgagtttatctcttattctgttgagatcttactatatctgcgcttctagaatcctcctggtggttgtaggctcccctggtcctattgccgagtccttcggcttgtggccgagcccatgagctcttttgctcaggctcttctttacgaagcttggatagatgccctagtatatattattgataggacatagcatgtcataatgtctggcttggcatgttctttgatagagtttttatcactcatctctgtcaccttcctgatgtattttattgcttgggctcaagtcgaatctggaatgagacttggctttcaggatttttctacaaaccttgcaactatgaactctttgtgaagcaatccctcaacatggagatggctattgtaatggctcgggatggtggcatggattggatcatacatttagacactgatgagttactttatcctggcggagctgctgagtattctgttagacgtttgttagctgaggtccctcgtgatgtcgacatggttatttttccaaactatgaaagcagtgttgagcatgataatataaaagatccattcagcgaagtatctatgttcaagaggaattatgatcatcttcctaaagatacttactttggcatgtataaggaagcgacacgaggaaatccaaattattttctcacctatggtaatggaaaatctgctgcacgaattcaagaccatctccgtcctaatggcgcgcacaggtggcataattatgcaaagagcccaaatgagatcaagttggaggaggctgcagttctgcattatacatacactaaattttcagatttgacatctagacgtgatcgctgtggatgcaagcctacaaaagaagatgttaagagatgtttcatgttagattttgacagagcagcttttataattgcatcaactgctagtgaagaagaaatgcttcgctggtacaatgaacgagtcgtgtggaccgataagcagctgaacttaaagcttctgaggaaaggagtgctgactcgcatatacaccccaatgacaattgttcagagtctgcgcgaatccggtgtcttcacttccgccattacagctggccaacctgctgtgaatgccaaactctcacccaaggaaaccaatgcgcagagccaaaatgttaccgcacctgggaacatgacaagagtggtcagatctactgattcaaaggcatctggcagaaagatactgcaagccgttgatcttgccttcagcgatactaatgtaactgctgttccaccgttgtcgccgcccagtttggacgaacacaggcatcatagtgaataataatgtcatacgtatcatatatatattttttgctcggcgtataagttcctaagaaaaggaggaaaagaaagttactgacatcttcgttaagagaagtgctaacatcagcttggatggtcaatttttatgcaatcgagctttatttgtttcatttttaaactaaaattaattaatatctcgaacgaattttgaagaaacatttggattgtggt

SEQ ID NO: 18352 - DNA, 2123 bp, Zea Mays
cttctccagtctctctctactcccccactcttcccccactcccccagcacgccactgctcacacagaccaccccccactcggaggcggagtggagctcctccaatccgtcccgaatccggacgccgctcgcaccgcccgcaccgcccgcagatggacgcccgccccccgatccgcccgctctgaccagacgaacccggtccccgcccccgccgccgccgctggagcgcggtaatggcgggcttctagcgcgtcggacttaaagatctagcctttctattttgtttcctctctgcctcttttctttcgctggcaccgatggtcaccgagatggcggcgcgcggcggcgaggcggcggcgttcggcgcggaggccgaccgcggcgacttcgaggtcttccgcagcggctccgcgccgcccaccgtcgagggcgccctgggcgccgccgcggccgctgccgacctgctcgtggatgacgacctccgcgccgacccggcgtaccagagctactactactccaatgcgcacctcaacccccgcctcccgccgccgctcctgtccaaggaggactggcgctcctcgcaccaccgcctccgctccgcggccttcggcgggatcggggacggcaggaggcagcagcagccggctgcccaagggacggtcggcctgcccgggatcgatcttgcccgccagaggagcttctccaccgtctttcaggctatagaagttgttgatttggatctgcagactaaaatggttgcggagctggagggtcatgtcatgcgctgtgtacgtgatcaaaatgggaaccatgttatacagaaatgcatagagtgcattcctcagcatgctatcgagttcattgtctcgacattctatggccaagttgtaatgttatccactcatccatatggttgccgagttattcagagggttctagagcattgtgatgatcctaagacacagcaaataatgatggatgagattctccagtctgtttgcttgctagctcaggaccagtatggcaactatgtggttcagcatgttctggaacatggcaagccccatgagagatcagccattattgagaagctaattggccaagttgtgcaaatgagccagcaaaagtttgcctctaatgtcattgagaagtgcttagcctttggaaatcctgtagaacgtcaggttctgatcggtgagatgcttggatccactagcgaaagcgaacctcttgaggtaatgatgaaagaccagttcgcaaactatgtggtgcagaaggtgctagaaacttgtgacgatcagcagagggagatgatcttaacaaggataaagacacacttgaacacactcaagaagtacacatacgggaagcacatagtagcgcgtgtagagaagcttgttgctgctggagagaagcgccttgggcttcaaccagcatgcaccgccgcctgaagggcaaactctctaagttgtacagctaacagttgctaggtttgcctcatgtttttttctctactaaaaaccttatatgaaggccccttttggcctcgccaggaaaaaaaataaatactgtatgtttgcggggaagagtgtacattaattctgtagcagaaagaccccctacccatgtggcggaatcaagggaggagtgatgcgtgtgagtccgatcgatctgaaggctgctgtaaagaggaagatggaaggggaaggagtgagaagcatgtcagttactctgctgctgtacaaattaaacttagctcttagagtgaggagaaagtaagctgttagctgtctgcctaaaggaaagaaaggaaaaaaaaaagaagctggaggccattggcaccctgtttcatgtgttggtatagctgctgtggctctcctgttgtctgtctggcctttgttgtaacataaagctgaggcgcactagcctgccttcgttttcacagttaagctgaagttattagtatcagctttcctgaactgcttggtatgtaatgtgactctgtttcttccttgtactaatgcttgtctcatgtaatccaggcccctaatgtctgaatgttttaatctcatttttcacctctgataaacgttgtttttttgtttggttttgttgctgctgagg

SEQ ID NO: 18353 - DNA, 3553 bp, Zea Mays
ttcctccgccgcttccgcgttggacgcactggacagctcacgcacgccgctgctttcgcagccagccagttggttccaacggaacatttccatccacgcccgccaccgcgcaccggcatctccatctccatctctatctctgatccgctgcagcccgcaggcacgttctccatcagtccggccgaccggcgcgcggcaggcagcgagcgggccactgtgtgcgcgcgcagcgcagctaccgaattttcgctgcacaaaaccagagggaggagaggggagggtgggggcaaaaagggaacgaaaagaaagggagggacagaggtgcagggccaacctgcgtggtgcgggtggtttcgagcacgggcaagcgccaccccgctcgctgccgatcccaatccggctacagcagcggccgccggccgccccgcctgcggggcctccctccgaccgttccccccgccctccatggcaggctccatggtggaccgcgccaccagcgacatgctcatcagcccggactgggctaagaacatggagatctgcgacatatgcaaccgcgaccctgggcaatcgaaagatgtcgtcaaggcactgaagaaacggattggccacaagaatccaaaagttcaacttcttgcgctaactttgttggaaactgttattaaaaactgtggggatatacttcacatgcatgtcgcagagagagatatattgcatgagatggtgaagatagtgaagaaaaagtctgatcctcgtgttaaagagaaagtattggtgctgatagatacatggcaagaagcatttgggggaccacgtgcaagatatccacaatactatgcagcataccatgagttggtgcgtgctggagctgaattccccaagagaccagagaaacctgcacctttgtttaatggtcagtctcaagcagcaaggaatatgcgtagtcctgaccaacaggatgctgcagaatcttctactgccaatgatttccctgctttgagcatgtcagagattcagaatgctcgtggtattatggatgtacttgccgagatgctgaatgctttaggccctggaaacagagagggattaaggcaggaggtaattgtggaactcgtggaccaatgccgcacttacaagcagagagtagtgcagctagttaattctaccacggatgaggaacttatgtcgcaggggctcgcactgaatgatgatttgcagagtgttctagcaaaacatgatgcaatagcagcaggcattgcagttcgagtggagaaaaaaccaaagtctttgcaatcacttgtagagactgaggattcggcaaaccaggactccaaaaaggagcagggactcatagatattgaggatcccacaagccaagatgctgcaaaagagccaaatcaaagtacaagtgaccaatctccttttgagcaattagctcttccagcaccaccagtgtcaaatggcgcagcaacaaaatctgaccttggcattgatcttctgagctgggatgatacccctgctacagcacaaaatccactagctcttgttcctgtcacagatcctcttgctgactcgacttcatcgaatcaaaatgcactagcaattgtggacacattttcacagaacagcaccgttaacagcaacactcaagctgctgacccctttggtctcaatccaagttctgctattccaggatctcaggcatacaacactccaactcagcagcatttccagtcgcaacaggcgacactgtatccgaacgggggtgctggaacgtcctatgatcaggcatcccagtttaataatgttaattcagggtggaatgatcaagctgccaaccttccagcagagcaagcactgaattacgatgatcaaagtggaaaccttccgccacctccttgggaggctcagccagcggcaagcaacgaaatgccaaatggtgaattgggaggcgtgcaacctctccctgggacagctgggcagttcggcggcatgcagcaggcattgcaaccacaagttaaccacatgggagttccacaaaggcagccaatgtacagcaaccagtcagggattggggtggcgccaacactgatgcaggcaggcttggggaaccagcagttgggttcgacatccatgatgggcatgcctccacagatgtatggcggcggatcgcaggcagccatgatgtacccgcaacaaatgccagtggcgccgcagcagccgatgtatggtggtggtggtggtcgtctggcagggtacatgcagcatcctgctgtggccgctgcgcactactacagcaacctggggacggcgggaatgtatgggtaccccggcgcgaacgggctgtcccagagcatgtatggcctctcggtgcaggataactcgtcgtaccagactaagacggcgccaccctctgcggtgatgaagcccgaagacaagcttttcggcgacctcctgagcattgccaagaccaagaaagcttcatgagacgagcacgagcaggagcaggagctttgtcgtttgatcttttacacttgtgtaacattcattgtctggctgtcgtataagctttttggggtcctcttttttttttaaaaaacattatttgttcccacgatcccattggattcgttataccgtacgtaaatgatgattcaataaagggtgtgcagtacgtacttacgatattgtacatacggtgcagaaatgttttcagtattcatatatgtataaggaaccgatgacggcggagatccggcgagctgtgtacagacccaaaggctctcctcatctgaagcatccgtggctttccttggagatgtaacctgccttttctgtttttaatcaatcatctctgtactctgttctgcctgcgtcgctttcggctgcatcgctagcactagcagcggggtggggtgggggtcgtagtcgtgctaagcaagcagcgatccgcaccagaatccatccaatcgcgcggccatgggcgacggcgagacgcggctggtggccgccgcgacggcgaggaagtggctggaggacccgcgcgtggggtacgacggcggcgtcggcagccaggcgctgagctgcgtggcgatcgccggcgcgcgggtctccgtcgccgagcgcggccgcgtcgtctgctcgctccgcgtgcgcgcccccgtcgccgacgcggaggggaggtggcacgccggagcgatcgcggcggcggtggactgcgtgtgctcggcggtggcgtacacggtggaggccgcgcccacggctaccgtccactacagcttgtcctacttctcgccggccgatcgcgacgcacgagctcggactcggtctttggggccggccgggatcagaatcagacgcgggtacgagcggtgccgcggcattgtctggatcttgcactggggaacgcatcgcatcgtgggccgttagggtatgtacagtggtgtttaatgtgcaggctcttaaggtgttttaggggttatttgcaaaaaaatcttagagccgtctctccgtgaagagacgtctctggctcgtaaaccaagtaacaacagac

SEQ ID NO: 18354 - DNA, 1679 bp, Zea Mays
atctgtgctgaagacatgtcatatttgggcccccaattcattgggaagagtggcaatcataaggtcaaaactatctttttctcaagtactggagagcgtgctgctccattcgttcgccaagctgcccaagagtattcaagttattcatcatttggatttgtcctatggagagaagacgaatcccagatttggtggaattcgttaggggtggaatcggctccagcacttgttttcttgaaggggccaggcacaacgccttttgtacaccatggaatttttagcaagtcagagttcatagagatgatggaggagcacaagcaccatgaactgcgacagctaagaagtgacacatctttggaactgggttgtgatgctagaggtcattcacgtgctggcaatgatgcagcaatttggtattgtgtaattgttgctggtcgtccaggtgcagaattaagcaagaagagacaaattttgcggaaggctcaagacaaattgttaggtgatgttgacagaagtgctgggaacgttgacaattcagtagagacatcaagtgctgcaactgccttcaaagatgataggttaacctttgtttggttagatggagaagtacaaaagcaaatttgtgccttctaccttgccactgattatactggagcctgtggccctcgagactttggagatgacaatgataaacctgaaatttttattgttcgattccaaagaaatgcaacatatgaggcactgaaagctgaaaaaaagaacaatcttgtggatgttctccagggacagcatgctgatgcgtcccagttagtggcaaggtacaagggcccagttgaaattgaagagataaataggtggatctctcagattatcaaagatggagatactagagaaattccttactttacttcaaaggtgccagatcttgtaccagaggaaacaagcaaagcatggaattctaaaagtatccgctcagcagggaaaagtctaaaagagaacatcggtttccatttccaagattacctaacccacccaatgattggttcaactttgcttatgtgcggatgtatttctatgggaatattatggttcaggaacaacacacccactcaaagtactcgacaggagaaagctcggaaagacaaggcaaagaggccccgtccgaagcttagcacgtcgctcttcggtgaaccttctgtcccagacgtcgacccaaaagatgctcgtcagtgggaaatgtcaagctcggattcagactaatgactcgcttcttacatttggacctgacgtactgcaaagacgttttaaaattaagtaaactacatagtagtgcggtggccttagttttgggaaatggaacagagtataaccgatgtagtgaaaacagttggaccactgaagtaatccagttgccatctttccgatgcttcagctgccctgtgacgtgactccagggacgtatttgttgacacctgcttgaaaactgacaagcctctctattagacagagtgttaacctgtggtctcagaatggagtaaacaatggtagacagagtgttaacgtacatcatgtctgatgtaagccggcaggtattttcgtcgtgagccaaaactcggctaacgtcgtgacacggactattatttttatttttcttaaataataatcccttttcagacata

SEQ ID NO: 18355 - DNA, 2007 bp, Zea Mays
ccccggtgaactggcaacgtcgtcgactcgactcggcgagcaaacctgcgtgcgcagactctcctccgtatagcatacgtgcgtgcatcagctgcctgcctgctccgaggcgccacccagctcttcctcgccccagcagccgcttcccgagatccttttcactttcaccaccagggtacatagaccgcatctgcggtgctctgcgctcctcggactcgatttgttggttcatccatccagctgccgccggacgtcgatcagctacctatcttgaaaccacaggaccgagcgtggaaactcccggaccggacattccattttccattccgaagggggggtgagaaggcggggaatgagtacaaccaaggtgaagagacgtgtgggcaagtatgagctcggccggaccataggcgagggcaccttcgcgaaggtcaggttcgcgagggacacggtcaccggcgaggccgtggccattaagatcctggacaaggagaaggtcctcaggcacaagatggttgagcagatcaagcgggagatctcgacgatgaagctgatcaagcaccctaacgtcgtccgcatatacgaggtgatgggaagtaaaacaaagatctacattgtgttagaattcgctaccggtggcgagctctttgatacaattgttaaccatggtcgaatgagggaagacgaggcaaggaggtacttccaacagttaatcaatgcagttgattattgtcatagcaggggtgtgtaccaccgggatttaaaacctgaaaatttgctgcttgattcatatggtaacctgaaggtctctgactttgggctcagcgcgctatctcagcaaatcaaggatgatggactgctgcacacaacttgtgggactccaaactatgttgcaccagaggtccttgaagatcaaggctacgatggagcaatggctgatctgtggtcatgtggagttatcctgtttgttctgctagcagggtatttgccgtttgaggattctaatctcatgactttgtataagaaaatatcaaatgcagaatttacatttccaccatggacatcttttcctgccaagaggttgttaacaagaatccttgatccaaatccaatgacgagaataacaatcccagaaatattagaggatgagtggttcaaaaagggctacaagcgcccagaatttgatgaacaatatgacaccacattggatgatgtggatgccgtcttcaatgattcagaagagcaccatgtgacagaaaagaaagaagaagaaccagtagctctgaacgcattcgaactgatttcgatgtcagcgggcctaaaccttggaaacttatttgactcagagcaggagttcaaaagagaaacaaggtttacatcaaaatgtccccccaaagaaattgtccgcaagatcgaggaagctgcaaaacctctaggatttgatgttcagaagaaaaattacaagttgaggctcgaaaaggtaaaggcagggaggaagggaaacctcaacgttgctactgagatactgcaagttgcgccctctctccacatggtagaagtccgaaaagcaaagggtgacactctggaatttcataagttctacaagaacctttccaagaccttgaaggacgtcgtctggaaatccgacgatcttcaaacgcaacatgcttcttagcagaacctcagagaggaggaatggcaaactattttgtgcaccatcctttcaagcaaactattctgcatgtaacggtgggtgcccaggaaattgcgctggtgctccaccatcgttgtatatgctgcgtcttgagttgcttgctgtagctgaagggaagttcattcagtaggttttgagtatgagttttgtatatccgtatatgcctatgactatgagccgtgctggaacactatgatcagaaactgcgaaatggagcccagaatgttcttgccatcttgctccagttctcagcaccgggcttaacttgccttgcattttttgaagaagaaaaa

SEQ ID NO: 18356 - DNA, 3375 bp, Zea Mays
agattgttgtccattggccatccccatgaatttctgaagggggagaagaattgctgttgcatttcccgggcaggtgcattggcatggtcgcagtagtgtaggaagcagaaaagatgaggcactgttggagtgcatggctcctggccctgtgcctcgtctctgtccagctcctcgctccattggtatgcgagcgattgctcgttgcagcacagaacctgtcaccgccagccttgacaccgccccttgtcaaagaagtagacgatgtggtggaacatgtatggatctcatgtgggttagacaggggatctcttgaagacgttagaaaacatttcaattacaaccacgtatttgacattctccgtacgctctccggaaaagatactaaggatagctctcctgaaactgaagatgccagcaaagcactgtctccagaaattaaaaacactttgctgaactgcttaagcaagcacccacttgtagttgctgcacatgagagtgcaaaaaacttacctattgattatatcaaaatgctttttgccttgttaagaagagatgtggctcaaggatctacaggtgcagcgacaacttctgcaccaccagcagctgtgaaatcaaatccatcaccttctttaggggaaccttcctcaacaaaacctgacaaaaatccagatcctccattagaaacaacacccgaagaaaaaatggtgccccaaactgaaaaaacagtggccaaaaaggaagataacagtaacatgtcaatcactgctgtcattggtttgtctgtgtctgctattgcgttgttagcccttctctgcttatgcaactttgtttgccgtgcaaaacaggcctcttcatctgaagtaggggttgataaaccgcctctgaatcagaacctgagtaatttatctgcttctcttaagttttccaaaggaaactcaattgatgtcaacaagctgggagcactgccgctaaagtcagaggctggccaaaatggcaatgccaaactaagctcatctgaaatctctaaaactgaagttaccccagcagtctacaactgtttggctgaaccaatggctgcttctactggttatgtcccaggatcaagaccaacaaccccaccatctatgccacctccagcccctgcacatccgaaggctcctccctcatcaactcctcaagcacctgcatctctgaaggctcctccctcatcaactcctcaagcacctgcacctctgaaggctcctcactcatcaactcctgaaacacccgcaccaccttcaaagcctagttcagttcttcactcagaaccctcatcaccatctgctctaaaagctgcacctccaccaaaagatgcaccacagccaaaagctgcacctccaccgccaccaaaatctaccggcccaccaccaccagcaatgtctggttcatcgaatacacgtccaccaccgcttatgaagaaatcaggcaataagatggatgatggcgcaaattctcatgaagctaaaacaaagctaaagcccttcttttgggataaagtaacagcaaatgctaatcagtctatggtgtgggatcacctcaagtctggatctttccagtttaatgagggtaagatggaaagcctttttggttataactctgtggagaaaataggcggtgatggcaagaaagatttattatctaaggatatacctcaatttgtgaggatacttgaacctaagaaggcacagaaccttgcgatatcattaagggctctgagtgtttcaccagaggaagtatgtagtgcagttaaggaaggaaatgaacttccatcagacttgatagacacactactaaagtggatcccaagcaatgaggaggagcttaggcttcgactgtacactggggaactgtctcagcttggtcctgcagagcaattcctaaaatcgattatcgatattccatatattttccaacgtctggatgcattacttttcatgtccagtctaccagaggaaacttcaaatgtgaaacacgcttttgctactttagaggtggcttgccaagagcttaaaaacagccggcttttcttgaagttacttgaagcggtccttaaaacaggaaacaggatgaatgttggcacattccgtggaggagctcaggcttttaaacttgacacgctccttaagttatctgatgtcaaaggaactgatgggaagacaacacttctgcattttgtggttgaagaaattattcgttctgaaggtatccgtgctacaagggctgcaaaagatactgacggtaataatatgcgaactgaagatgattacaaacaacttgggctgaaagttgtgtccaatttaagtgatgagctacaaaatgtcaggaaggcagcgatcctggatgcagatcaattgacaatgtcagtagcaactcttggccacaagcttgtcaaaaccaaagaattccttaacacgggcatgagaagtctggatgaacacagtgggtttcaccgcaagctgaagcatttcgcagagcagtgccaaactgatgtttctttgttgcaagaggaagaaaagaaaattcggtccttggtcaggggcactgttgattatttccatgggagtacagggaaggacgagggcctgcggttatttgtggtagtacgagatttccttgcgatgctggacaaggtttgtaaagaggtgaaagaagcatcaaaagtggctccaaagaaaacaaagaccgctcagccatctcaagcatctttcaatgatcccaggcgcaaactattcccagcaattcaagacctaagggcagacagttcaagctctgatgaagacgattagctgtataccgaatcaaggagtccatgttttcaccttcgaatgcactgaatttgacccttcaaaacaatagtgcggtgatacataatacatggaaactgatgggaaatggtgaagtgacgctattttttgccatccactgatcaaaaaggcaacaatcaaattgggaaacctggcttggctttacactgacatgttggtaatgacaaatcatcagaccagatctggcattcttggccaatgggtttgtatggcactctcctatctagcaagaaggatgttcatatggtcgagacagcatctatataaaaggtgtggctggtggaaaatggataattcaaaggaaatggaagaaaactggctctagtttagaaccggtgtaaatgcaggaggaagtctgactaatactatttttctgttcattgtacacatgtaccattgtaccgaacgcagagaaatgcagcgcaaacttgtgaatccggtgccattacccttgcaaacaggaatacaaatgaagtgtttggtttgagaaataagctagtttatcatcttc

SEQ ID NO: 18357 - DNA, 1455 bp, Zea Mays
gggaattgaacctaggtcatgaagaaaagaaactcctttagctggagagagtgtgcaatttctgttgcattgtcagttggactaatcactggtgcaccaacgtttggaccaccggcctatgcttcttctcttgaacctgttcttccagatgtgtctgttcttatctctggacctcccattaaagatccaggtgctttattgagatatgctttaccaatagataataaagctattcgtgaagttcaaaagccgctggaggatatcactgacagcctcaaggttgctggtgttagagccttggattcagttgaaagaaatgtcagacaagcatcgaaagcactgaacaatgggagaagcttaattcttgctggccttgctgaaccaaaaagagcaaatggagaagagttgttgaataagttggctgttggatttgaggagcttcaaagaattgtggaagacagaaatagggatgcagtagctccaaagcagaaagagcttctccatgtagaagaagacatggtcgatggctttccctttgaaataccagaagagtacagcaacatgcctcttctcaaaggaagagctactgtggatatgaaggttaagattaaggacaatcccaacatggaagactgtgtatttaggatagttctggatggatataatgctcctgtgactgctgggaacttcgtagatcttgtcaaacggaaattctatgatggcatggaaatccaaagagctgatggctttgttgttcaaactggagatccagaggggccagctgagggctttatcgatcccagcaccggcaaaatccgtacggtacctcttgaaattatggttgatggtgataaggcgcctgtatatggtgaaacacttgaagaacttggtcgctacaaggctcaaacaaaactccctttcaacgcttttggaacaatggctatggcaagagaagaatttgatgacaattctgcttctagccaagtattttggctcttgaaagagagtgagctaacaccaagcaatgccaatatattggacgggcggtacgcagtatttggatatgtaactgagaatgaggactacctggctgacgtcaaagttggagatgtcatcgaatcaatccaagtcgtctcaggcttggacaaccttgtcaacccaagctacaagattgtaggataacgtgttttgtatcagagtttcttgtctgtgggtctctgtcctcaagtcgatgtaaagtgctatatagtatcttactcccatatccttctcgctcgttaacgagggtttgtgtcacgcggaattcgatagtaattgaaagtacagagtcattgattggttgtcccatacttagaaaaacctgaaacgaggaacatggccgtgtttctctgttctggaaactttgtccagaaacaaggaacgggaatggtcataaacgacgacgaaacttcaact

SEQ ID NO: 18358 - DNA, 2257 bp, Zea Mays
cttttgctagctggggaagtggggagtagggaggcgggtcgggacctggcagtcgcgtcgacctccccgccgcgcccacggcactcgccactccacccaccaggccaagcacgcggcggcgacgccaaagcatcagggcaccaatggttgtgctccccgcggccccgcggcccctactcctacagtcctaaataatagccttccattccaatctgttcccacagttcagtcgcacactcgggcgggtcaaattcgactcgggaggaaccaaccacccggaaattcccccctcctccagtctccacttgatcggcgaggcgctgcggccgcgggcgaatggcgtcggaggcggagtcgcccgtggtgatccacgcgtggtcggcgccgcgctccctcagcaccagcctcatgtactccttcgcccagagggacgacatggaggtgcttgacgagcctctctacgcaaatttcctgcgtgccacaggcgtcgacaggccctaccggcaggagctcctgtccaaaatggaccctgatggaaataaggttgtcaaggaggtgatttttggcccaggggacaaaaagtatcgttactgcaagcacatctcaaagcaacatctcccaaatctgtcaagcgacctcatgaagaagggaaaacatttcatattgatacggaaccctctagatatactgccatcttttgataaagtcgttccaccatccttcatggagcttggcataggcgaacttgtctcaatatacagtgaattatgtggacttgggagcccaccccctgtgatagatgcagatgatctgcaacaggatcctgaggccgtcctaagtggtctctgtgaggatctgggcattcctttccagccacaaatgttgaaatgggaagctggccccaaggaatttgatggtatatgggcaccctggtggtatgggagtgtgcacaagtcttcaggtttctctaagcctcgccaatatcctctgactttcccattcgtgttttatgacctgcttgagcaaagcttgcctttctacaacatgctgaagcgccaaataaggaagataagaggaccgcagcaaccaccattatcggaccctcctctgcctgtccctgcaaataaaaacattcttgtttgggttggagatgaacttttgccccgtaacagtgcaaaggtttcagtgtttgattcagttgtacaaggaggagatgctgtttgggaaggtttacgtatatatgatggaaaagtattcaaattagatgaacatttggacagattgtttgattctgcaaaagctatggccttcagcaatgtgcctactcgtgattggattaaggatgccatctttaagactctgattgcaaatggaatgttcaacaatgctcatataaggctcacgctcacccgtgggaaaaaggtgacatctggaatgagtccagctttcaatctttatgggtgtgccttgattgtgcttgcagagtggaaaccaccagtttatgataactctcatgggataaaattggttactgccaccacacgtcgaaattctccaaatagtatagattccaagattcatcacaacaatcttatcaacaatattctggcaaagatagaaggtaatcttgcccaggctgaggatgccattatgctagataaggatggctttgtatcagaaacaaacgcaacaaatatttttatggtcaaaaagggaattgtattgacacctcatgctgactattgccttccaggcattacgcgagcaactgtcatggatcttgtggtgaaagaaaactttgtgttacatgaacgacgcattagtctgtcagaattccatgctgcagatgaggcgcggacgcgcatggccaaggtgtgtgttgctgctgccgcggcacagatgccactgcagcacatgtcgctgctgccgcagaagctgccctggacgctaccgctgcaggcacagtcggcttgggcatgggttctttccccacactcctgtcgcaaccccttcctcctggtctcctccggtacgatggcgccttgtcagtgccgctgcgggccgctatcccccaacgactcttttaccgcctacttcacccttgttactaccattgccacccaagtatgttgtcgttgctcgggggtgttgtgatcaccgacactttacttgagtccgatgatatcaaggtttcctaggcatatgaggcagttgccatcgctaacctacatgctcagtggactagtgtacacaacat

SEQ ID NO: 18359 - DNA, 1672 bp, Zea Mays
cgaaatctcataccctagggtttgacagactacccttgtttcaaatcctgggtccgccattgggggcggtgaggccaccctagtagaggctagaggatgatatacacggcgatcgacacgttctacctgacagatgagcagctccgtgactcgccatcacggaaggatgggatcgacgaggccaccgagactgcgctccgcgtctatggctgtgacctcatccaggagagcggcatcctcctcaggctaccacaagcagtgatggccacggcacaagtattgttccatcgcttttactgcaagaaatcatttgttcgatttagtgcaaagagagttgctgctagctgtgtttggctggcagggaagttggaggagagtcccaggaaatcaaggcatattatatttgtcttccacagaatggaatgtaggagagaaaacttgccaattgaatttttagatgttttttcaaagaaatattcggaactgaggcatgacctgatacggacagaacggcatctgttgaaggagatggggtttatttgccatgtcgagcacccccataagttcatatcaaactaccttgcaacacttgaagcccctcctgagcttactcaagaggcatggaaccttgccaatgatagcttaaggacaactctgtgtgtgcgatttaagagtgaagtagtagcatgcggagttgtgtatgctgcagctaggagacaccgggttccccttcctgaagatcctccgtggtggactgtctttgatgctgatgaagcaggaattcaggaagtttgcagggttcttgctcacctctacagcttgcccaaggcccaatacattccagtatataaagacaacgattcctttactgttaagagaatctctgatctacaggcttcaaaggaaagtccagcaagggctgttgctagcgataagggtacccctgtaccctcaagttctagccaggagaaggatccagtggctaagactatactgaacaaggtgaaggaaaaaagtgatgacgaaggtaaaccattgcccgctgaatttgatggaaaagaaaacccggtggcaaactcaaaaaatgacaagtctgattctggtgtcgaccggagtcgagaaagagagagatcaagagggcgggaacgtgatgccaggggtagggattctgatcgtgatagcaggggtcgcgagtctgatcgtgagagggaccggagacgctgctctagggaaagaagttcaggacactcagacaaggagaaatcaaggcgccattcatcacgcgaccgggctgactactacaattcgcattcatctcgtgagaaagatcggcataggcaccattgatcaaggtgacgaggatccccggtctgcagggcttcgctgcatggagaccaccacttggcagtgccgaccggatcatgaaaacttgtggattatcatcccactggtggttgtattggcttgattgtgttttgcaccttggattgtaacttgcaagatacgctagccatgagctgtgtgcaacttgaatttataaacacaacatataagatacaattgacgcacgtgcactaactgccattccagcagagcttgtggaatgttataaagaaacagtttgtggaatgttggcactgttagacctagtttggtgactagggaaacgaag

SEQ ID NO: 18360 - DNA, 368 bp, Zea Mays
aggccaggacaggggcgggccgcaatggtggtgatggagggtaatggcggcgccggtaggatcaccattggcgtctgtgtcatggagaagaaggcgttctcttctccaatggagcagattctcgagcggctccgcgcgtttggagaattcgagattataatatttggagataaagttattctcgacgatcctattgagatttggccaaactgtgattgcttgattgccttctattcctctggttttcctctgcaaaaggttcaagcatatgctgctttgagaaggtatattttttattctctatttctttatatatctctttcaaatggtaactattcttgtaagcacgtctccattttcttaataat

SEQ ID NO: 18361 - DNA, 1145 bp, Zea Mays
tttcgcgatctggaggtgtctagcaagacccctgtacctccactgcaacgggctgctgatgtaaccccagtgttcaaccagatattgatggatgaacaagaagaatacgatggcccccctcaaaaagaaattcctgctttaattgtctggacccttggaggaaagaatgtatatgttgaaggatcatgggataactggaaatcaagaaaagccatgcaaaaatctgggaaagatcattctcttttgctggtactcccagcaggagtttaccgatacagatttgttgtagatggagaaaggagatgtcttcctgatctcccctgtgaaatcgatgcaatgggcaatgcggttaaccttcttgatgttaatgattatgtccctgaaagtgttgagagcgtggcagagtttgagccacctccttctccagactctagctacagtttccaggcacctgaggacaaggacttcgccaaggagcctcctgttcttccatctcaactccatctcggtgttcttaactcacagaactcggaagaaagctgtgcgcggccgcagcacatagtcctcaatcacctcttcatagagaagggctggggcgcccaccctctggtgtctctcggcctaacccacaggttcgagtccaaatatgtaacagtcgtcctgtacaaacccatcgaacgatagcaatagcccgcgcctgaagagcggaagttgacaactcactgtgggagcagcgatgaacagcgccgaagtggtacatgcttgtaaaagcggttgaggtccaggagtatttttttcccgtgcccttagcttgcacaacctgtggtactctggtggttagctgtacatgctgcgctgtcatgatggttggtttgctgttacagagagccaaggcgtccttgattccgaagtacacgtacgtttgtcgtcgtcgttcctccccccatcccatcccaggaatgaaatgtttgtaggtgtcactgaaaaccgtggaaatccacagaaatgctaggagacagagattagaccatgtgattcctagatttttgtttgttttttttttggctggtcaagaactcaagacgatgttgttgttatgaaatgaactcaagaaaaaatacaagtgggatgctgtgggttgtctt

SEQ ID NO: 18362 - DNA, 783 bp, Zea Mays
  misc_feature (782)..(783): n is a, c, g, or t
gcagcttactcgtaacggtaaagccaccgacccaactggtctcgtagccgaactgcaagagggaagagaagcatcgcatctctgagtctgaaaccctagccgcctgtctccctgtccggtctccactcgtccgggcgacgagacgacgacggaggctttgcttttgtctactttgaggatgaacgtgatggcagtgatgccatacgtgctcttgatggttatccatttggccctggcagacgcaggctttcagtagagtggtcacggggtgatcgagctgctagacgtgatggcaacaaaccagaagtaaatactaagccaactaaaacattgtttgtcattaactttgatccaatggacacaagagtcagtgatatcgaaagacactttgcaccatttgggaacatatcaagtgttaggataaggaagaactttgcttttgtccggtttgaaacactagaagaagcccgtaaggctcttgaagctactcatgctaccatgcttttggatagggtgatttctgttgagtatgcctttagggatgatgatgaacggagtgataggtacgacagcccaagaagaggtggtggatatggtaggcggggggatagcccagcgtacagatcacgtcctagtccagactatggtcgcccagcaagtcctgtatatggttcgtatggcaggagcagaagtcctgttcgtgaccgctatcggaggtaatgccctaggattattttcattggtttgcatgttgtcttgttgtccatgtcatatgatcatann

SEQ ID NO: 18363 - DNA, 157 bp, Zea Mays
caagtattttgagtaggttctgcaacaagtataatttgactgttgactaggaatgtaattttgagatcaggttgcaaaacagtagcctcaaaagtcaaaacacgtcagatacacttctgcaaaccacgaaagcttaagtagagatgtgagatcacac

SEQ ID NO: 18364 - DNA, 1561 bp, Zea Mays
tgcaatcaaacaataaatgtcttgcctaacattgctaagtcacctgattgcccatcaaagttttgaccctatgaccgtatcactttgagaatagagcggatggcatatctaattttgtctctgaaaatgggaacaaaataacagaccagaaatcaggatttagcgttggaagagatggtagaggtggcaggcaatttggtgcatttagagggaggggcagaggaaggcatcctaatcaaaatcgtggaagaggaagcaacaactggggagaaataaaatcaaacttcatgggacacaaaagttcagcatcaaagcattgcagtgatattgcagctccagcatctggaggacgccgaaagccccctccaataatttatgatgcaaatgaagttaaacagtgggtagaggcacgaaaaaagaactaccctacaagtgtcaacgtaaataagaagttgtctgagatgaaatcagataatgaaaacaaggacaaagatgcccaactgcgacgtcaggttgaactgaaggaagtcatagcaaagcaacaagagctgggttttgacccacctgagctaccgcctggctatctatcagaaattggggatcaatgcattgaaaataaaaataataggaaaactcaattcagggattctcattttggaaatcgtttcaataataacaaaagatcaaggtatgagcgtggaggttttcagtctaaaagatctaaggtatggaactgtactcctcacgctgatcacgggatggtcaagagcagagaaccaaccctcctgcagaagcttcttagctctgatatcaagagggatagacatagacttcttcacgtgttcagattcatgaccttgaacaatttctttaaggactggcctgacaggcctttacagtttcctagtgttaagatgaatcagattgaaataggaagcaatattagcacagatgacttggagaatgctgggatgtccaaagacagcatccttggtgtaaacgaaaatggtgattggaaagagttgagctcgattgatgaagaggataccgatagcgccaaccacaatgatgaagacgtcgatgatgacagtgttgacagcagcattgaggatggggccgaggaggacgggtacgaagagcagtttaatgagcctgaagatgatacggcagtctgaatttgactgggccgggtatccacatcaaaaagacaaagcgcttcttcttgagtagagtttttgcacaacacattctgtagctcttcgcatattcctgttccaggagagggtctggtgtttaaagaaactttgtactttgttgtagttgaattgttatgttatcgccgggaatatatatacaatatgcggacgtgttctctgtccttttctgaatgtatacaaaagagtaaaatgtattaggagtctttgaaattaacatgtgttatttgggtcccgaactcttaagagtaggaaaacgagtgttgggacttggtggtctatctaaaaccgagtttgagcggacttggtggtttatctaaaactgagtttgctcaaaccgaatatta

SEQ ID NO: 18365 - DNA, 977 bp, Zea Mays
gtccatgctcccccaccggcccacctaaaccaagaaagatttttgggacactccagcggtccagcccgacctctttccaaaccggcaaatcctcagatccgccccctcctccgcctccgcctccgcctcctgtaccctcacgccgtgcttccacagccctcccacctccgaatccagatccgccgccaccaactcctgcttctcacctcctaggctgcttcgcgcgacaacctccgcgaggagcagcaggagcggcggcggcggcatggggcgggacggcggtggcggtgtcgccggcggaatgtctgaatcggtgctgcggaaggggtggcctactacaatcatgtcaagctgcaggcgctcaaggctaaggaggcccagaagaaagccgcacaggctgatgaggaggttgggtcgctcttgcaggagcgcgatggacatggtgatcataagagcgacaatcaggcttagactgtcagatctgatcctggccttcccatattggggatctgatgcaaggtgcaaagaccggagtttggtctacggttgctttcaaggaggtggatgacggtttcttgcacttctttaactttgtgtctggagagaaaatcagaggtatttaacgtttaggaaatatgcacctgcttggtggagagctttgccttgttattttagacactttgttctactgaaaggcagccatgccttactacctcacttgtccattgcctagatttatttgttctgctagtagattagggactaaaaatgtactgctgcagaatgttaatttggtggttattttcgatatataatgagcttaccgtaatctacgagctgagcctctcgtgccgtcgtgtgaagtcttgtttattcgtgggactggtagcacgtgttatatggattattttttactggtgatggttattgttaggatgccttttcagatttaaggtcagatgtatatattctagtct

SEQ ID NO: 18366 - DNA, 2671 bp, Zea Mays
cttccccatcctcactctcccccagcgttccactcactccggcatcgcttcgaatctccgcgcggcggcgggaccgcgtgaccgacgcgcggcgctgccccttcagaaagccgcatggacgccgccgaccccctctgcgccatctcctcgactgcgcgactccttccgcggacccttggccccgccattgggccttccccctcgaacccccgcgacgcgctcctcgaggccatcgcactcgcccggtctctgaaagggtctgaggagctggttaagcaggctacaatggtgccgaaggagcacggggacatccaggctctctaccatgatgatggagtgaaaggctggcctcctgcaaatggcagcaaagagcaacagggaagaaggccagcactggatcgtaaacgggctcggtttgctatgaaggacactggaagcaaaccggtgcctgttgtggaccaatctaagttatcaaatatttcagatccaatcacattcttcatgaccttggatcggcttgaagaagccgaggaggagatcaaacggctaaatggagaggcagaaaaacgcacattgaattttgatcctgtagatgaacccattagacagcctggtttacgtgggagaaaatcagtccgcagtttcaaggtaattgaggatgttggtactcaagatcccaatgaggcaccggcttcccaaacagcaactatgacaggatctcagttgtcacaggatgttatgcatgctgttgcgggcaaaaatggacgatctgtttcctcaagatctagtgaagctatttcagagaaagaagtttcattagctgagaaggatggccgtgacgatttgacttatatactgacctcaatccaagatttagatgaatctgaagaggaagagtttatccggaagaccttagggattaaagaaacaaggaaagaaagagttagtcttcgtaactccattcttggagttaggtccctaagaagcaatactgaacaaaaaggttcaatgaaggtccaccctccagaaagtcatttgcctcagactcgccaagatcgaatttcagagttagagaaacatttgtttcctggaggtgcagcaaatgctaaatgcacagatgatgaatctgaagggtcaccagatattgtgatgggtgaaccatcattggtgcattattcttctgatgttctgatgactgatgagaactttactgcaagtgacgttgacagggagaccccaaatctgggtgccagagcagcagaccctgttcttgatcctgaaccaaacttgcctgatcatgcatatgaaaggcaacctggaggttcctcacttggtttgtacagagacacagaagttggagttgccaaagaaaatgagacatgtaacaggagcaatatatctgtggaggaagatgatgtgccaatagactatataactattggcaggtctactaatgaaacagaagtttcttcttctcatcctttggagggcagctcgacagaagaattggtcactaaaccaggtagacatgcggctccagatggtatctgtaggacttcacatgcagctgaggatagcattcaacatctagaagcggtcaaagagggtggtgtcctacaagataagtcaagccagttgttggagatgcctcaggaagatattaatccactgaatcaggctcagatgcatggtggaagcactaagaaatcggcacctgatctatccccgaccaaacagaagaagcaacaggcagttcaagaaaggaaaaggaagcaacagtcaaagaggggcaagaaagtggctggtgaatccctggaaataccccaaacaaattttgaatcggagaatcaacctcataatgacgatgtcaacattgagaaacagacaattacgagtagcacactctcaccaaatggtgccaaggggcaaaagggagctcaaaggagaaaccagaccaaaaaaaggaatcaaagaaaaatccttggagatgctgaccttgcatgccagcctggagtgagaaaaagctcaagaacacgctcaaggcctttggagtattggcttggtgaaagattactatatgggcctatacatgacaatttgcatggagctattggcatcaaagcatactctcctggccaagatggcaagagatcattgaaagtgaaatctttcgtgcctgaacagtattcagatcttgttgctaaatctgcaaggtactgaagccaagattttccaaagaggatcacgccttgtgacctgttgctttgtcacctcactatgggatgttgacatgtattggtagaactgcagtactgcacaacgaaatgcatgttaacttaggcaggtatcaaatggatgagtatctatctagtttggatgcgctactacccattcggctactcgatacgtggagtctagggtgtcaattgacattggtacttgatagtaagacagttttaggttcagactcttgaaaattgattttgtttgtcttctcgttttcagatttaagatgcgataccacagataaaaatcttgggtaattggaggtaaaaaaaaggatagcacacctaaatatcataatgatgttatgatttttttattcagtgttatggctcatgccgtcaaggtatcatgtggtgtgatagtatcttgatgttaagatctgtgg

SEQ ID NO: 18367 - DNA, 886 bp, Zea Mays
taagtatggtcctgtgcttcgctatgaacccggcttcgtgtattcggtcgcgttccacacgcagcggctgactcatccgatgccctggagtgtggagagcagagcaggacattcattggagtgctccattcattgaggcagcatgcctaagataaagacaagccgtgtcaagtatcctgaaggatgggagcttattgaaccaacaatccgtgagttggatgccaaaatgagagaagctgaaaatgatccacatgatgggaagagaaagtgtgaagctctctggcctattttccgcatttctcatcaaaggagccgctacatatacgatctttactacagaaggaaggagatatcacaggagctttatgagttctgcctagaccagggttatgcagaccgtaacctgattgcaaagtggaaaaaggttacgagcgcctttgttgcctccggtgcatacaaacacgtgaccacaacttcgcaacgacatgcgtctgccgcgtccccaagcatctgagggaggaacaggtgatagaatgtgtccactgcggctgcaggggttgtgccagcggtgactaatcttgtcatcatgttgttgggctcacggctcatcatcgcaacgttaaccagatgaggtgccctgctgtgagcatggatccgctgcggtgattagcatgagtttattgggtaactagtggggagtactaaatttcctcacgtttggacgtttcaactgttatgtactacgctttctcgtgtctcagatgcttgcgttaaattagtggcgcttttgcattttatatgagtctgttaattggttattgttatgggttctaacaaaaaaatttctacgatttactacgtttttttttcaaaaaatcagaaaaaa

SEQ ID NO: 18368 - DNA, 1325 bp, Zea Mays
tagttatttcttcctcatcataatattacattccaagcatcttggcctggattatttgttgataagaagggaacatattgggatgtgccattatcattatcggctgaccttgcttcagttggctccagttctggattgagttatcatctattattgcagcagaatagtggggaaccaaaatgttttgggggtgatgaaacagatgatgttcctactgctctgttacctggcctatgtgctaaagtggctatttccatgaagaaaagcattgatgcttggaggaaaaaagaagataagctaaaaaaagttcagccatatgatgtatttctctcggattcacatgtttctttaactggtattgttggtggagtagccagtggatatttgggagactgttcaaggagagtggctatacgagatgaaacacacaagagtaatgcttttataatgtttgacgagaggaataaacgtgctgcctttgcagacctctttgcttctgttactttcactgctcaatacgggaattttcagaggctttttctggatttgactaaggcaagtgcccgatttgatatcacctctggttcattgttcttatgtggtgcttctcgccttgcacaagatttcttcttctctagaagacctgatgtagagacattctgcgatatttgtcctgatgtgacagtttcctttcaacaacagatagttgggcccttcagttttcgtgttgaatcctctgtagccattgaccccagaagccaggaccattttgttcgagtggatgatccgatcttcgcaattgattgggctctcaaagtcctgggttcagcaaaggccacagcgtggtattcacccaagcatcaggaggccatgatggagctccggttctacgaaacctgaagctgttcatcgtgaacgttgtataaaataatgcctggacttcatgattgctatggtcgctgatttcactaggatcagatggtatgaatggctgacgccgtgatggtcaaatgaatcaacccccgtgtaatatctattcatatcctgctttaccggtttgagtcatcagttttttttgcttcaggtgatgtagcttgtgctgttctcggcgttaacagaggaagttaatactgtttgagtctttagtgaacttgctaggtgaaccagtctgagtttctgattgccttttgtcagtgtacaaaaaccatgcccccaccatttttatttctttaaatatatgaattttagggtgagcttattaaataattaatccttttttagacatccatttgttcatctttttgacaaaactcaagacagctgaa

SEQ ID NO: 18369 - DNA, 1858 bp, Zea Mays
cttggctcttgggggctcggcgttgatgcagcctcatcccttttcttcaccgcttcgaatcctccgcccgtcgccaaaaaaccaccctcgttttcgtccaccctcgccgcttccgcccatttcacctcgtcttcttctgttacgcctcgccccccgccgcctctctcgctagcaccagaatccatctctactcgctgccaccatgcacctcacggtcatgtccctctcggcggcggttgccaacggcgccgctgcctacaggtacgacacgatccagccggttgcgaggctccgcttctgcggcctcaggcgcaaggcccaccggctccactcgccccggtactcgcggcacttggtggccgctaggcggagcgtggtggttgcggcgacggctggcaatggcgcggccgcgagcggcacgttcgactacgacctcgtgatcatcggagctggcgtcggcggccacggcgccgccctccatgcagtcgagaagggtttgaaaactgccataattgagggagacgtcgtgggtggaacttgtgtcaacagaggctgtgttccgtcaaaggctctccttgctgtaagtggtaggatgcgagaacttcaagatgaacatcacatgaaatcactgggcctacaggtctcatcaccaggatatgacaggcaggttgttgctgaccatgcaaataatcttgcatctaaaatccgcagcaacttgactaattcaatgaaagctctgggtgtggatatactcactggtattggcaccattgtggggaagcaaaaagtgagatatgggaaagttggtttcccagacaatgaaatcactgctagaaacatcataattgccactggatctgttccttttgtccccaagggcattgaaatagatggtaaaactgtatttactagtgatcatgcactaaaacttgagtcagtccctgaatggattgctattgttggaagtggttacattggacttgaattcagtgatgtatacacagctctaggaagtgaggttacttttgttgaagctcttgatcaattaatgcctgggtttgatcccgagattgcaaaattggcgcagaggattcttattagtcctcgtaaaattgactatcacactggtgtttttgcaagcaagattaccccagcaaaggatggtaagcctgttttgattgagctgattgatgctaaaacaaaagaacacaaggagacacttgaggtggatgcagcactcatagctactggaagggcacccttcaccaaaggacttggcttggaaaatatcaatgtcgttacacaacaaggttttgttcctgttgatgagcggatgcaagttatggatgcaactggcaatgtggttcctaatttatattgtatcggagatgccaatggtaagctcatgcttgctcatgcagccagcgcacaaggaatctcagttgtggagcaaatcagtgggagggacaacattttaaatcacctaagcatcccagctgcttgtttcactcaccctgagatcagtatggttggcttgacagagccacaggctagggagaaggctgacaaggaaggatttgaaataagtgttgtaaagaccagttttaaggctaacacaaaggccctggcagagaatgaaggagatggacttgctaagatgatttatcgccctgacaccggagaaattcttggagttcatattttgggcttgcatgctgctgatctcatccatgaggcatcaaatgccattgcccttggaacccatgtgcaggacatcaagtttgctgttcatgcacacccaacgttgtctgaagttctggatgaactcttcaaggctgccaagataatgttccatccg

SEQ ID NO: 18370 - DNA, 1531 bp, Zea Mays
agagggcacagggcagcgcagcacgggagccggcagcggcggtggagcagcgtgcgtggagggtgacggagctaggcttggctcgcacaggctcgctactggttgaaacttggcggccgccctcggattgggctcccctcccctcccgctcactcgccagtcgccaccgctcgctgcccacgcgcatggcgtcctcgctcgtctcgcgcccgcacctcacccagcgcccggtccgcgccgccacgctcgcctccgctacccgcccccgcctcgtggccggggccctcggcgggcgctgccaggcgcaggcggcgggggacttggacgacgcccactacatgcggcggtgcgtggagctggcgcgcaaggcggccggccacaccagccccaaccctatggtgggctgcgtcatcgtccgcgacggccgcgtcgtcggagaaggattccaccccaaggccggccaacctcatgccgaggtatttgcactaagagatgcaggtaatctagctgaaaatgcgacggcctatgttagcttggagccctgcaaccactacgggagaacccctccgtgtactgaagcgctcataaatgcaaaagtgaaggaagttgtcgtggggatgactgacccaaatcctatcgtggcatccaaagggattgagaagctccaaggtgctgggataagtgtgagggtgggtgtggaggaagcgttatgccgcaaactaaacgaggcttatatccatcgtatgctcaccgggaaggcttttgcaactctgagagctacactctcaatgaatggaatcatcacgaaccagattgggaagggagctgatcagtcaggtgggtactactcgcagctgatgaaagaatacgacggagtcataatttcaagcgacctggccaagatgtcggccttacctttgtcgcgtgaagccggcacaaaccaacctctctgtatcatcatagcacagggtgaaagctcccggctacacatcccatctctcagccaagagcatgcatccagggccatagtccttgccgatagtccggtcactgtggagccagcaggagtggaagttgcagtttttcgtcagatagacctggagtctattctccagcttcttgcgcagcgagggctctgcagcgtgctggtggacttcagagaggccggcgaaagcttcgcgtcgcttctgaacgacttccaggaggacaagctggtgcagaaggtcgtcgttgaggtcctgcccttttggctcgcgagcgacgggctcagcaacctggcatttggtggcagccaatcgttcccgttgaagaacttggagctcagggatgtgaatgggagtgtgctgctggaaggctatgtgtaatagcctctcttctgtcggagattggcattgtttgttttccctcgtgtaaacagatagccctgtaatatacttgcagagccgcccacgagccatgtggggttttgcttttttatatatatagttgaaaatcaatgccatgcgtccttcattttgctgacatggaactg

SEQ ID NO: 18371 - DNA, 838 bp, Zea Mays
aacttaaaggaaaaaaagaagtcatgatgaagagtacagatttataagagcgcgcaggagctaacgtggttgagtgtgcatgcctcattgggcttcccaagtttaaggatttctataagctcaacgggaaaccggtttacatcctggtggagtcccgcaaataggacgcagtaaaatggtcagacaagtaaatgctctcaagctccttttatacttgaaacttctctcaacattcatttcgaacatatcatgaaattacaaagctatgcatgttcgcagaatcgagctttgcacattgagtcaaatttgatttcctggtgaaacaggagcagtagcagcggtagcgtccagccttaaagcatgcatggctactgacactaatttctgcctcgtgaccatttcagaaaaagctttctagcttcccgtccaaagaagctcacagcttcactcatttgcacgcgcaagcaaggtggtatgggggcaccgagaaactccgcagtaatctgtgttgaggccacggccagatgatgctatgtactcctatcttcatggagagggtgatggactgggtgaaacgtagtcactgtacttttgtagcacgtcatgtctagtgtttcttagtagccatggctgaagagagtttgtagcttattcccggcttcctgcagccaggaacatcagtgttagccagagaagctaggaaaaaggatcttatgttgctgctcagttttctaccagaatcgtcttcctttttttcccctttgcagaatcaactctttggtaaactttactaagctcgttttgcctaaacggccgttcaatcatgaagaaagagcaa

SEQ ID NO: 18372 - DNA, 1942 bp, Zea Mays
ctgatgcattatgcatagtgtattcaaacatgggcacatggcctataatactagcgggaacacaaaggccaactaactacgacgcgagaacggtctatcagtttcagagcccaagagtccaagaccaggtggtacgttaaccgtttgtctggcccaggtgcggcccttttcctgagtgtaatggcaggcagcattgagctgcaactgcaacagcttggaagcagtaagcacgcatcgccgccccccatctcccccgcaccgcgcacctctatggccgccggcgaaggcggaggtggggacatcggcgccgactcggagcggcgcctgcaaaaggctatggataagctctaccacttccccaagcccaagtcgagtagcaccggtggctccaagccctcttcgtcgacctcggctccaagctccgggagagcggtggggaaggcagcggcggaggcagcgaggaggttcggggtggtgcgcgggtcgcgactcccgcatcagatgttggccatggcagcgatctcgccgccaccgccgtgccgcccctgggaccgcgccgacctcatgcgtcgtctcgggtcattcaaagccatgacctggttcgccaagcccaaggttattagtcccgttaactgtgcaagaagaggatggactaacattgagccggatgttataacatgtgaagcttgtggggcacgactcctgttctccactccttcctcatggacaacacagcaagttgaaaaggctgctgctgttttcagcctgaagctggactctggacataaactactttgcccgtggattgataacatatgtgatgaatcacttgctttatttccaccaacacctcctcctgttttagttgggaactactatgagcttttgtcctctctgctgcgacttttagcactcccaagaatttcctgctcttctcttgagaccatgaaaaagaggaatccacagctagagcagttcctatcagaaccattctcttcatcagttgttctcaaagggggacttatgcttactgaggactctacaattaaggatttggatgatgcttttcaagatgctgacacatattatcagaaaaacaagggctgtatgacagaatgaatgagtttgatcctatcaagcagcaccggacgttctgcccttggacttcccctgattacggcgaacccttgcctggatggaggcttactctctcggcattacttgctggggacaagagatctgatggggacttgcaagtggatattcagaccagccttctcgatgaggaggatgaccctcttacctctgttaggaagcttttcatgacaccacctccgaaaaggcggaggatacagcaatctgaaaagagctgagaagcgaactggatccacatgttgggaaagctggggtcaaactcatacggttggacaatatcatggggcagatccagaatgccatatgaattgaatattggaactggaaatgtttacgctgcacatctgtgcgatgtacaaattcttgaggcagcagctgggaaaatgatttatgacatggttaattgttccaggacgatactgctgctgtagaagccattgttgtggtggttaaggaatgtagaagttgggttacctcttccccatttgaaaccacctgagcatatacaccgtgatttcgtagcttagtaatgttgtcaacttgttatattgcattctttatattgctgtacgatcacctgttaactgttaaaccctcggggaattttgattggcaagagcgaattcgtttgacgcctttgctggctgacttacctgtaataactgcttaaagatctgatcggcttgaaacgataggttctgccattcaatagcctacaatgaatcatttttgtaaacaggtctaccgtgcgtgtcttccagaaaaaaaaggataaacgtttgtgccg

SEQ ID NO: 18373 - DNA, 925 bp, Zea Mays
ctttctctcactgctctccccactccccaccccactattcctttctgctgagctcaggaaatcccctctggtctccccgtcccccattccacccgccgccgccgacgcgccgcgcctgttcaaggaagaagaaggcagtccacaagaccgcaaccaccgatgacaagcggcttcagagcacgttgaaaagaattggagtgaacactattcctggtattgaggaggtcaacatcttcaaggatgatattgttatccaattccagaaccctaaagtgcaagcatccattcctgcaaatacatgggtagtcagtggagtaccccagacaaaaagtctacaagaccttctgccaacaattatcaaccaactgggccctgataacctggagaacctcaagaggcttgctgagcatttccagaagcaggtacctggtgccgaagccagcgccagtgcagctgcacaggatgatgacgatgtccctgagcttgtcccaggagagacatttgaggaggctgcggaggtgaaggaggtgcctgaagcggaaccggaagagaagaaagagtcgtaattttgttgcgtgtcatatccattgtttgtgaagggtcgttatgtgttaccatacaccatgggagagacctggtcatctatgaaccccctgatgttcctcattcgtttacatgtcctccagtttttcagtttcttatttacctgggttttggtccaaacctgacaactcagcatttggtttggcgtcaattgtgcttcaggttccaaaaaaaacattactgcagtatgattatgttgagggtgtaggccagaccggcacatattttcatcgagccagagtttcagccaatgtttgttttctcggttggcgtccacagcagttccatatacagaccaaattttgcaaaagcaaaaaagata

SEQ ID NO: 18374 - DNA, 1850 bp, Zea Mays
tctctgtcctcctggctcttgggttttgatcattggcgtcgacgcactgcacaaggctcttgcctcctgctgagtttgagtgagataaaagagctctatggcacacggcatattggcagagatcaagctcgtcatcttgttgggctgatggatgtcttctgttttagtgaggcatgtctgattgccgatattgttcaacactttatagatgcaaaactggagtttgatccatcttacatatatgaggatgttaatcaatcgattcagcatgttcacagaagtggtttaattcacaggcaaattctttccgagcctgagaaatttctgataaaaaaaagccaggtgttccgtttcttgaagatgctgaaagagaaagggaaaaagctatttcttcttactaattcgcctttctactttgtagatggagggatgcgttatttgctagaggaccaacattttgatggaaattcctggagggaactgtttgatgttgtgattgcgcaggcaaataaaccaactttctataactcagatcacccattcagggtgtatgacactcaaaaggacaccttaacttttactgcagttgacaagtttctgccagatcaagtatactatcatggctgtttgaaatcatttctacagatcacaaaatggaaaggctcagaggtgatatattttggtgaccatcttttgagtgacttgagaggaccttcaaaagctggttggcgaacagctgctgtaattcgagaacttgaggatgaaatagaaatccaaaacggtgacagctaccgattccaacaggcaaaattgagtataatacatgatctacttgggaaagtccatgcagctgttgttagcaccgagaaaggccaagtctataaagcattgctcaatgagttgaatgcagaaagacgtcaatgccgatctgggatgcgagatttgttcaatacctcttttggtgcaacatttcttacagacacgggaagggaatcatcattttcctatcacattcatcaatatgccgatatttacacgagcaagcttgagaacttcttatcatatgcccctgaatcttggcttcatccacctcatgacataaagatcatgccacacaatgcgaaggtcccagcgagccttttcagtacctcctagttcatcctttctctatttcggtggagaaccaagccgtagtacccccacctatggtttctgtgcgtgaccacgtgacaggattgtggactgctgctgcattcgcttgcgttatactataactgaagcaccatatgatgcatcaatccagcagaccagcaagttagcattctctagaattgccatggaattatcagtcatgtgagtagttaaccgactcatttgcctgtatgacgaagcctctgttttccgtttaaaataaaaaaaggaagcatctgagaggccgcatacttgtgttcccatgaaaccctaccaacctgtaatggccgccaataaaacagtcacacgcaacccatctcgtttccccattttattcgcattctgctacactctttgctgcactcatgttacactgaactcgcctggtggcatctgacaagttttttgggatgagcagaagataatttgggttcgggcaacggataaattataaaatgcttatttgtccttgtctggaacaggaaggctatcttcaattctattgtttatggtcctagagactggatggagttccagttcttgctttgcatgaatgtggagatctggaatgtcaagaataatggcaattagtgcactcatatgaacacagaaaacataatattctgattcttcactgacgaagattttgttaaaaacta

SEQ ID NO: 18375 - DNA, 1266 bp, Zea Mays
gtcaaaaaaaaaaaacaccaaatttctcaggcctccctccccgcgtcgctttcgccggacaccaccacctgccgctttcccctcgcccctccgcccctttttgaccccggttacgaatccgcaccagggcctgcggcggtatactcggttccctgcccccccacgaccacgccgccgcctcctccccacgcccgcccggcgctcccggaaccgccggaagtgggaaacaacggctacggtggacatcggatcttcataatcgctttgtggatgccatcgcccagcttggtggaccagacagagctacacctaaaggggttctcactgtgatgggtgtaccagggatcacaatttatcatgtgaagagccatctgcagaagtatcgccttgcaaagtatatacccgactctcctgctgaaggttccaaggacgaaaagaaagattcgagtgattccctctcgaacacggattcggcaccaggattgcaaatcaatgaggcactaaagatgcaaatggaggttcagaagcgactacatgagcaactcgaggttcaaagacaactgcaactaagaattgaagcacaaggaagatacttgcagatgatcattgaggagcaacaaaagcttggtggatcaattaaggcttctgaggatcagaagctttctgattcacctccaagcttagatgactacccagagagcatgcaaccttctcccaagaaaccaaggatagacgcattatcaccagattcagagcgcgatacaacacaacctgaattcgaatcccatttgatcggtccgtgggatcacggcattgcattcccagtggaggagttcaaagcaggccctgctatgagcaagtcataaggcaaacttcaccttgacagaaaattttcagagttgacctctccacgagatgagcattctcatgtgaatatatattatcttaacaacagaatgtacgggtttttgaccctgcacctgatcccttcagccacgtccagttattcttatcactgtagtatccatcaacaagtcctgtaattatgaggatggtgttacagagtttctagcaagcatttccatcgagggaatggccctgagttgatccatgtagcaagaaagagaacatgcttacaagcaatatatttgctgtgaaaagggcacgcccctggatcttcctgaagttatgttgataaaaaaaagattatggcatatttctgaattatttctgaactcggcattatttatagtcttcgtttcatgt

SEQ ID NO: 18376 - DNA, 826 bp, Zea Mays
gcgatgtcgtgcttcacccagcgaggtctccacgcctggagctgattgagaaactgagcaagggtgaattacctctaaaagagtacccatctatgagtgaaccaagttctgcttctgcttctcaagatgccacacaaactgcatcatcaactgcacgaccagcacaaaatccacaaccgatgtctatgagatcaaggaggacaccaacatgggcaaaatctcgtaattcggatgattcttcaagtgattcttcagtcctgagacacgcatcaggtgacttcaagaggctaggcaaccggatttttgtcttcatgattggtggagccactagatctgaactgcgcacggtgcacaagcttacaatgaaaatgaagcgcgaaatcgtcttgggctcttctagcatcgatgatcctccgcagtttatttcgaagctgaagtcgataggtagtgctaccaagacctagcttgtatgccgagcgataaaatgaattctcaccttatagtactcagtataaggatgttgtcggctgtcaccagcgacccattgattatcgtcgaactgatcacagttattattctcttaatttttttttaattgaggaagtgagctggcttgtctggatgtaaaataagaaatacgtacacaacgttttgtttgttatttgatgttcttgttgacaaacagataaagagagaagtcattaggaggttttgtaaaaaaggcctaaaattgatggttatatgatatagaaactgtattgcacggatctataacagaatatggataaaattgattatggagggacacaacttcctttgcttgctc

SEQ ID NO: 18377 - DNA, 1683 bp, Zea Mays
ggagagaaactaaacggcgccgaggaggaggaagagacctcacaatcccatgcattactacgcggacttcccgtcgtcggcgtgcaaagccacaggtaatagcagcacgtactacccgaacgggccgcagccgcagtggcagaacgacaccgtcgcggcggcgacgcggagcaccttcggcccgccgggaggtggctggcatgcgccgccgcccgacatgacctccggcccgcacggcgcacggccgccgccgccgacgacaccgcacgaggcgctgctggggctcggcaagggcaccttcagctacgaggagctggcggcggccacaggcgacttctcggcggcgaacctgctggggcagggcgggttcgggtacgtgcacaagggggtgctccccggcggcatggtggtggccgtgaagcagctcaagtccgacagcgggcagggggagcgcgagttccaggccgaggtggacatcatcagccgcgtgcaccaccgccacctcgtgtccctcgttggccactgcatcgccggcgcgcgccgcgtgctcgtctaccagttcgtgcccaacaagaccctcgagttccacctccacggaaaagggcagccggtgatggagtggtcgacgaggctgcgcattgcgctcggatcagccaagggcctcgcctacctgcatgaagactgtgagccatccccggatcattcaccgcgacatcaagtcggccaacattcttctcgacaacaacttccaagccaaggtcgccgacttcgggctggccaagctgacgtcggacagcaacacgcacgtgtcgacccgtgtgatggggacgttcgggtacctggcgccggagtacgcgtcgagcgggaagctgacggacaagtcggacgtcttctcctacggcgtggtgctgctggagctcctgacggggcggcgccccatcgacgccggcgacgcgcgctcgttcctcgacgtcgacgacagcctcgtggactgggcgaggccggcgctgtcgcgcgcgctggccgacggcgactacgacggcgtcgcggacccgaggctgcggggcaactacgacaccatggagatggcgcgcatggccgccagcgccgcggcagccgtgcgccactcggccaagaagcgccccaagatgagtcagatcgtgagggcactcgagggggacatctcgctggaggacctcaacgacaacgagggggtgcgacctgggcagagcatggcgttaggcacggcggccgcggcctcgtacaaggccaaagctcccggaccgtacacgcacggcgtggaacggatcaggcaggcgcccacggtgtacagcggcgcggtgggccgtccctctacgatcggcaacgacggcgatgagtcccgtgaaccgcaccagtagcaggccggaagcagcagcagctgagttgctaccgtgtacgcatgtgatgctgcacctttgcaactcatgctcgccgcgccgttattgattgcgtgaacgtcctgctttggcgtctgtgagctgcttaatcccagctgttgcctgcaaagctgtaacggcagcctgcgagctgctgctgtacctgtacatatcgacaatcaaccacacggagaatgtgcagatgaacaaaaccctatacgtttgtgcattgcaaagcagatcagggcacgaaagaatacacggc

SEQ ID NO: 18378 - DNA, 1474 bp, Zea Mays
tttttatgcgtgcaacttggttcagatcttgtgccgtttcgccatgaggaaagtgctgagagaggtggcatctggaggacgtgatgccgagcgtgtgaagcttaagttagaaattgtagtcgagtctgtagactatgacaaggagggatctgttttacgtgtgcgtggaaaaaatatcactgagaatgaccatgtgaagattggccagttccacacgttagagcttgagctgaagagaccttttgttctacgaaaggaaatttgggattggttagcacttgagaccattcagcaagcatgtgatcctgctgcaagtgctgatctagcagttattctcatgcaagaaggacttgcccacctattcctcattggcaaaagcataacagcaacccgggcacgtattgaaacatcaattcctaggaagcatggccctgcaattgctggctacgagacggccctcaagaagttctttgagtatgttttgcaagcatttctgaaacacattgattttgaagttgtccagtgtactgtaattgcaagcccaggttttacgaaggaccagttccgcgattatttgtttcttgaagctgcacggcgagatttaagagtaataattgagaacaagcaacgccttgttctggcgcatgcaacatcaggttacaagcatagtttaaaggaagttttggacacaccaggtgtgatggcactgataaaagatacaaaagcagcacaggaggtccgagctctgcaggatttcttcaatatgcttactaatgagtcagctcgtgcttgttatggaccgaagcatgttgagtttgcactgcaacagtttgctatccagactcttttaataactgatactttgtttcggaacgctgacattgctacgaggcaaaggtacgtgaagttggttgaagatgtcaagaaaaatagtggcacagtacacatattttcctcgatgcatgtctcgggcgaacagttggcgcaactgacaggaatagcggctatacttcgttttcctcttcctgaactagaggacatggagctgtgatgaaaccaacctttttgcttctcgataacattctttttggttgtgatctgttagcatactacctgtatcatgtgtaacgttatggagctatttgatattgtataggcaaccctggaaaggaattctggtattttttaaggtatatcctattcgttgtaaatggttcatcgtgcgttgtttgccagttctttttctcgttaagggctagtttagaaaccctaatttctcaagggtttttcattttcccaagagaatttagttcattttctcatgggaaattggaaatctcatggaaaaatagggttgccaaactagacctaagtcttgttgttatttttcacatcctaaactatctgcatgtaaagttaccactgagcgttggagctccagacatcagaactaattttcgtgggccttcttgtt

SEQ ID NO: 18379 - DNA, 2656 bp, Zea Mays
gggtggctcagtttgccatcgtcacgcccatccgggtctgtggagtacagcaaaatagtagcacaactgaaaccaggggaaagtgaagatgtaatactgttggcgtgccaaaagcttctatcaatcttcagtcaccggcctgagcaaaaacagatctatatggcacagaatggtttcctcccgctgatggaactccttgaaattcctaaaaatcgtattttatgctcagttctgcagcttatcaacaacattgtaaaagatagtacaggcttcctggaaaatgcttgccttgttggccttattccagtggtgatgaattttgcagaaccaaatcgcccaaaggatgttcgggtgcaagcatccttgtttcttcagcagctttgtcaagccagcaccttgacattgcaaatgttcattgcatgtcaagggatccctgttttggtaagctttatggagcctgactatgcaaaatacagggatatggttcatcttgcaattgacggcatttggcaggtctttaagctccagcactcaactccaagaaatgacttctgccgtatagcagcaaaaaatgggatgcttcctaggctggtgaatacactatatagcttgaacgaagcaacacgatttgcctcagtctcagggtcaggtgcttcagtaacacagaatggctcaaccccccgacgaagatctggccaattagacccttcagttcttgaaagttgcaaggcgaggctggatcatcatcattcatctggttctttgcaatctctacaagcagatgcagataagcaccacatattaatggactcctcgtcatctcctaggttcagcgacaaaacaagcagtaacttggagaggaatgagaacgacttggttattcggccacagaggcttagtgtttctgccggaaggacatctacagacagatcaccgaagcacatagaactagtttcaaatggtcataataacagtcaaaatgaccaggtccgacctctactgagtttattggagaaagaaccaccttctcgacatgtatctggacaacttgattatgttcgccatatatctggtttggaaaggcatgaaaccattctgccactattacatacatcgacagagaggaaaacgaatggtgaacttgacttaatgatggattttgctgaggtttctagacatggaagggagaatggccatctggactctagtataaaagcttcaaatagagttcatagtatgaaatatgcaccttcagcaagtgcgtctaatgaaggggcatcaacttctggagctgcatcacaaactgcatctggtgtgttatcaggatcaggggtgctcaatttaagacctgggagtacaacatcatcaggcccattagctcagatgttctcttccatgagcgcagatgtggcacgtgaatatcttgagaaagtagcagatcttcttttggagtttgcacaggcagacaccgtggtaaaatctctgatggccagccaaagccttcttacaagggttttccaaatgtttaacaagatagagcctcctattcttcttaagattcttaggtgcattaatcatttgtcgggtgatcctaattgtcttgagacacttcaacgcacagatgcaatcaaacatctgataccgattctggagcttcgtgatggacctctggtttatcaaatacatagtgaggtccttaatgctttgttcaacctttgcaaaattaataaaagaagacaggaacaagcagccgaaaatggaatcatccctcacttgatgaaatttgtcatgtcagactcacctttgcggcagtatgccctgcctttgctgtgtgatatggctcatgcttctcgcaactctagagagcagttgagggttcatggaggactagatgtgtacttaaatctgctggaggatgatgcatgggcatgcacggcattagattctattgctgtttgtttggctcacgataatgatcacagaaaagtggaacaagcactgttgaaaaaagaggccattcagaaattagtgaagttcttccaagattgcccagaacagtattttggccatatattggacgctttcttgaagataatcacgaaatcttctaggctaaatacagcaatggctaccaatggtttaacaacattgctcattgcaagacttgaccatcgagaagctattgcccgcttgactctgctgaaactcataaaggttgtctatgagcaccatcctcgaccaaaacagctcatagtagagaatgacctccctcagaagctacagaacctcattgaagagcgcagggatggacaacggggcggccaacaagtgttggtcaaacaaatggccacctcattgctgaaagcgctgcacatcaatacagtattgtgatattggtggatcatatgttttcctctcaagttgtatatgcttgccctagaggagaaggtgccttttccttttgctctgctgtggtggtttctcatgagcaccagactcatctgttgtacctgatccctcttttttcgggagaaaggttttttaggtgcaggatgaaatggacgttctgtccttcagtgttgtttatatttagagtgttagtgaggacattgtaaattaagacatataattaataaacaaaacccatgttgagata

SEQ ID NO: 18380 - DNA, 1088 bp, Zea Mays
agaatgaaaagggggaaaaaaacagggcaccctcacggcgaactccccacctcctatcgcccccctctctctagcgccgcacaaatctctcctcccccgctcgccctcgctgcattgggcgccgccaagcccccgccggatagagaggacgagaagcggcgtggctgcgggaggagcgggcggcatgtgcgacctggtggcccgcacgggccggcaccagcagcgatgcataccatttaggtatagagctaacaatgatgaaacctctggtgacaaaactaagaaagtcgtggaagttctcatgataaattcccagagcggacctggtcttttgtttccaaagggaggatgggaaaatgatgaaactgttgaagaggcagcagctcgagaagctatagaagaagccggagttcgaggtgatatagtgcattttctggggtcgtatgacttcaaaagcaagacacatcaagatgcgtgctgccctgagggtatgtgcagggctgcagtgtttgcgctgcatgtaaaggaagagctgaactcatggcctgagcagagcacccggcagaggacctggctcacggttcctgaagctgcatccaggtgccggtaccagtggatggaagaggccttgctcacaggcttctctgactggcacgacaagtggagcataggtgacggcggtggcggcggtgccaactgtgtgacccggcctaactgctgatgaacccatctgcagtcgtccaatttgtccatcctcccccatttcccctaggctccgacattgcgtaacgcaataaatacagtgtacttctctcgatgctgggttggtcattgacccttggatggttatcttagttattagtgggacgaggtatatagtatttatatctgatgaagacgagaattctcacaacttttaagtgtcgattctcgtgcctgtttatttctcggtttcaggtcagctgcagcctgcaggcaggcacgcaccctgcgcactttgtaactctgctcctgattctggagatgcacatcctgtgtatgaactgaactggtataacttgaaaataactgttaagtcaaccatgcat

SEQ ID NO: 18381 - DNA, 2121 bp, Zea Mays
tttcccattcagggagggagtggcatagctagtaatatttgaaaatacggaagggcgaagagggtaattcttcggttgaaagggtcgaaggcgatcggggctgcggttgaaggtcgtggaagtcaggaagtgggaagtagtagctgagggagccagaggttcgcgcggagcaatggagctctttaatagcttcggcgcattcaccgctttaatggccacttcttccaacgcctctgtcccggcttccacgcgttctcagtgagggctagggtttgcccgcgccgcgtcgctcggcaaggaggaggacagggtgcgctgccgtcggcggcggaggcgcggagctcgttcgtcgccgtcgcgcccccctggcatcgctggttgtctagaggaagaagatgattgtgggctcttcccagcagcagctgctgctgcagaggaaggggaagcccgtggctggcaagggagcggcctccatgaccgtgaaggcagagaaggtggtggtcgcggtaagggcagccacgagggagatctccaagacagccgtcatctgggcgctcacgcatgtcgtgcagcccggcggaagcatcatactcctcgtcgtcatcccggcacagagctctggcagaaaattctggggttttccactgtttgccggagactgtgcaagtggccataagtctatggtggatcagaaatgtgatttatcagagttgtgttctcaaatgttgaagaaattggatgtgtatgatattgacatgataaatgtaatgtataagcttgtttccggctctccttctggtgttgttgctgctgagtgtaagcaagcacaagcaagctgggttgtgctagacaaggatttgaagcacgaggagaagcgttgtgtggaggagcttcagtgcaacattgttgttatgaagcgttctcagcctaaagtccttcggcttaatcttgtgggatctcctgataaagagtctaaagcaacatgtgcagttccacctgtgttagattgttctagtggtaaaactgcaactgatgttaaggaggcacgaagttcaattcgaggacctgctgtaaccccaaatagcagcccagacctggatacacctttcagaagtactgaagcgggaacttcctctgtctcaagttcagaccctggggcatctccattttctgcttctgaaataaatggttctctgaagaaagaggtactagcaacaaaggataaaattcagcattcagatgtcaatatttctgattcggacagtgaaacattgagccctccagcaaatttctcttttcagccatggatgtctgatattctacagggatcagcatcctcaaggtcgcttggaaaagttccacggaaaactcgtactgcaactgcagatgttttgttggaaaagatttccaagctggatctcctgaatgaaattagtgctatgagaagcaggtcagacttaaacttccgcggagatgtcagggatgctgtctcattggcaaggaatgcacctcctggaccacctccactttgttcaatatgtcagcacaaggcacctgttttcggaaagccacctcggtggtttagttatgctgaactggagcttgcaactggtggtttctcccaagcaaatttcttagctgaaggtggatttggttctgttcatcaaggtgtccttcctgatgggcaggctatcgctgttaagcaacacaagcttgctagttctcagggtgatgttgaattctgctcagaggtggaagttcttagttgtgcacaacatcgaaatgttgtaatgctgattggtttttgtgttgaggacagaaggcgtttattggtttacgagtacatctgcaatagatctttggactcacatctctatggtcgtaatagagaaacattggagtggactgcacggcataagattgcagttggtgctgctcgtgggctgcggtacctccacgaggaatgtagggttggctgcataatccatcgtgacatgagaccaaacaacatccttgtcacacatgatttcgagccactggttaaagtttttgtatctgatgcaatcatgaggcaattattcttcgtatttgactggtagtagactaatgttgcaataaacg

SEQ ID NO: 18382 - DNA, 2069 bp, Zea Mays
ttttttttttttggccatcttttcaaatctttgttactttcccgtaagatacgttcagtatatgtttgtgcttcttgttcttccttgccttgtcttggcgtatctaggacaagctgcttttctcattgccaaccaaaagtcatcggagcatgtcttcttttcatctattccaagtggagttttctggcctgttttcttagtggcgaatctggctgcactaattgccagtaggacaatgacggttgctatattccagtgcctaaagcagtctatagcacttggttgttttccccggctcaaaatcgttcatacatctcgaaaatttatggctaagatatacattcccgttgtaaactggtttctattggtttcctgcttgggctttatcattctgttcagaaacatatatgatgttggcaatgcatatggtaaataatctattgatatgcttttgatgccaatatgttctctatttattcttctgtttgtttcttctgatctgacaaagttccatcttgaacagctattgctgagctcggggtgatgataatggccacggtttatgttacaataataatgcttctaatatgggagtccaatattacaaaggttctgtcatttgttatcacattcctgttcttggagctgattttcttctcatctgctctgagtagtgttggagatgggggttgggcgttgttgatttttgcatctgttctactcatgattatgtttatatggaactacgggagcaaactaaagtatgacagtgaagtcaagcagaagcttccaaaggatttgatgaggaagttagggcccaaccttggtaccatcagagctcctggactaggcttagtctgcagtgatattgtgaaaggagttcctgcaatttttggtcattttctgacctcactccctgcgatacactcgataattgtatttgtgtgtatcaggaatgtgccagttccggtggttcctcaaagtgaaaggttccttttccaacgtgtatgctcaaggggctatcacttgttccgctgtatagcgagatacgggtataaagacaagaagcaggagcaccatagcgtatttgagcgtcttctgattgaaggccttgagaaattcatacaaagagaggcagtagagctatccctacaaagcgaagacgacattgactcggacgaagagcctccaacccctgtgaagatcatcacagcaccaaatggcagcctgtactcgctcgatgtccctctcctggcagactatgtgccttcaacagagctcattcatgaagccagctgctccacgcctcaacacgatcctgtactggattatgcacagaaccttgaactggagctggcgttcatcgagcagtccaagcggtctggggtcatctacctcatcgataatcccatcatcaaggccaggaaggactcatggttcttcaagaagctgatgataaactatttcttcgcgttcctgaggaacaactgccgccgggcgatcatgttgatgagcatcccgcattcaaacatgatgcaggtgcgcatgacttcttatgtctgattgctggaactgcactggttctgttcatggatgtctgatacaaaccacactgacagtaaaagaatgaacgtggcaaatgcaaagaggatatcggcacttttgtttttgttcataatttgatgatggcttaggttgttgtcggaatctatctcccctgtagttgtacaatgccaaaatatagttggaagttttagctggtacaccattagggtgctgtattaaccttttttactcttgtgcagtaaagattctttttgtcagcctccttgattttgttagataaggtttttggtgtttgcaaagttactggtgaatgtggcaatttgtatgtatatttttgcctctttttttaggtaacggaagcataagcatctggctttgcgaaggaatcaggccaaagtttcaataaccgatttcacagacacttaaccaagataaagacaaaagcctaaacaccgagtctgagggctaaggctaaccaaaagacacaaagaaatgcatagctg

SEQ ID NO: 18383 - DNA, 1420 bp, Zea Mays
acgtccctcccggcctcccccacccgccatcgcccaaaaggagcagcgatccatccatcctatcccctgtgccaaaccctagccggctatggagcatcccgccgccacctcctcacctgatccgacgccgtagcacctctccctgtccctgtccccatctccctccgtctccctggccaagcactccacctggaagcaccctgccccgaactgcaccgcagtcgtcgacgctaagcgctggcccacgctctccaaggttgcaagggtgatcaacttgctattgggaaggaaacaacacgtcgtttgggaatgggtactaaatgtaaggatgagtcacttgcttcattgccaattgatgaattgaccgagaaggctgatggctttgctagagtctttccagcttggttttatgcttcttgcgctgatatggaagtttgacttcccaacatttaccgtccagatcattgccatcctcaatgacgtacaagcagcatattaggtaaactaacaacatcaacctggcgacatgaataagtaccattgtggctatctcgaaggacatagtaaaaccacctgcacaacctgacagttggaagttatttggtcgtgatgactgtcattttttcttctgggctacgtacaagactgacttcttctcggtatgggccagtggctggtttagcattatttaaagttttgagaaatcatcgtagtgtgcccatccttttcatggttgctaatatacagaaattgttccatgtcgaaagccttgagaaaatttcccagggtgattttcatacgctttcctctgccatgtaccttcaagtcagcacaatcaatcagggcccttaacttacacggtctcgcacgctcgcaactgctgctgagtcatccgactctagttccataccttactgttgtatgtggtctttccgcgtctccttacattttatggtgtttgcagaatgccactctgattgttgtatatgccaactgggcatttgctgctattaagggcattggatggggctgggccggtgtcaaatggctctacatcattgtcttctacttcctgctgcgcatcatcaatttcctcatcctgctatacgctgagtaggagggcatggaacctcgtccttatgtatatactaggtgtgtgcccgtacgttgcaacgggagtatgttaggatgagcatcgacacatatttgatcggatattatattttttgggatctggagaaagtttgctcggaagccaaacatgttaagacctgagcatgtgtatgatatgcaaaggctggggctcgaacgcgcttgtatgagtcttgttaatttgcatgtctcgtgcatagtctctcaccatctattcactataatatacaaaatctgtgtctatctatatttattttaagcttctaac

SEQ ID NO: 18384 - DNA, 1093 bp, Zea Mays
gccccacaaccgctctatacgactcctccatcctccccccctccccgtgatggctgcaatggatggggtaattgtagtggagctgtagaggcggcgggggtgcggttgcgacggactgtgctgcgccgacaagctgggaagaggaggcagcggcggcggggtgggacttgggatgggtcttctgtcgaaccgggtggagcggtcggagatcaggcccggcgaccacatctacacctggcgggccgtctacgcctactcccaccacggtatttatgtcgggggaagcaaagtggtccattttacacctgtctaatagtggtgttgtcctcacttgcttggactgtttcctccgcaacggctccctctattgcttcgagtatggagtgccatctgcagttttccttgcaaagattcgtggggggacctgcaccattgccgaatcagacccaccagaagttgttgtccatcgagcgatgtacctgcttcaaaatggttttggaaactacgacatgtttgagaagaactgcgaagacttcgcactctactgcaagactgggcttctacctgttgaggagcctggcattgggactagtgggcaagcttcttctgctattggtgtgccgttggcagctcttctgtccactccgttcaagcttctggctgctggtccgcttggaatggccactgtcactgctgggatgtactgtgctggcagatacattactgacataggagtaaggaaggacgtagcaaaagttgaagtggagaaattatcatcgcaccccggtttccaccttgttgaagatgaagaatcagtcaacaagcgatcagaaaaaccaaagaccttgctccctatgaagaggaaacgagaaaggtgactgcgaagcacagcttaggaggatgaacttctcttcccttcaattggtgtcgaattgtggataatttgggatatgataataagactcggtatagatatgtgccttgcgaatgtatcataattggattaggcgcacccctcacctgatcaactgtaactgccttataaattcaatcaaattgctatataatgtagatttttcttctttgtgaaaaa

SEQ ID NO: 18385 - DNA, 1643 bp, Zea Mays
cgcgcgcgcggaccgtccgcgccaccaccgcggacagtccggaccgcggaccgtccggcctcagggccggaccgtccgccaggctcattttagcctccaacactacggcacgtactaaatttatgagtggcctttgaacttgcaaaaaaaaaaggtggtgtgtacacttgggcgccgcagtttctacgcgtcagtgttcgtccacacacacactgtcagctgtctgtcacttggccacacgcgtgacagagtattatatatacatgctcacccgtgatgatttgagcaccacccaccaacccaccatccccgatcgcccttggagatggagatggtcggcggcagcgccgacgccatccccggcctcttgtcatacggctgggccgggctctggtccacgctggcgagcctcctgttcctgtggtccatggtgcaggaccacctccctttccagctcgaggagcagctgtccgcactggcgcgccgcgccctcgccgccgtcaccccctacgtcaccatcaccatcgacgagcacgacgccgactccttcggccgcagcgaggcctacctcgccgcggaggcctacctgggcgccaccttcgccggccgcgccagcaggctccgcgccgagctcccgggcggcagcgaccgcgtcagcctcgtcgtcgacgacctcgacatgttccgcgacggcagggactactacgcgtccgtgggcaaggcgtggaagcgcggctacctgctgttcggcccgcccggcaccggcaagtccaccatgatcgccgccatggccaactacctgggctacgacatctacgacctggagctcacggcggtcaagagcaacacggagctcaggaagctcttcatcgagaccaagagcaagtccatcatcgtcatcgaggacatcgactgctccatcgacctcaccggcaagcgaaagaagaagaagaaggacaagaacgatactaggaagaagaagaagaaggcgccgtgggaagaagaagacaaggacgaaggcagcaaggtgactctttcagggctcctcaacttcatcgacgggctgtggtcggcttgcggcggcgagcgcatcatcgtgttcaccaccaaccacaaggacaagctggacccggcgctgatccggcggggcaggatggacatgcacatcgagatgtcctactgctgcttccagggcttcaaggtgctcgccaagaactacctgggcgtgcaggagcatgacggcgagctgttcggcgacatccgtcggctgctggaggaggtggacatgactccggcggacgtggcagagaacttgatgcctaggtccaagaccaaggacgccgatgcctgtctccggaggctcgtcaaagcgctcgaggaggccaaggaggcggcgttgttggcggccaaagccaaacaactggacgggatcaaggacgatgagggaaccgacgatgaagacgacagcgatgacgatggcagcgttaccagcagaggtcacccctccgacggtgacgaaaagagtgccaaaaaagaggaaatgtaataaaaaagtttaaaacctataaaagcctgaaagctagcaatatgatcaattaactgcatcaagccatagctatttgcatcaacaacaactggtgcta

SEQ ID NO: 18386 - DNA, 207 bp, Zea Mays
accggcaaagcactaaaattactaagcaaataaatctagcttaccagcatcaaacgtgactcaatacttgtgacaatgttgataaattctggttcgggcttgtcgtcgaacatctgacaggtgttgagatcttccgccccccatgacccggatggggctgatcatgaggaggcgaagcacggcgaggcacgtaccggaagagctact

SEQ ID NO: 18387 - DNA, 3983 bp, Zea Mays
cggtcatatcctgccttgagtgttcgtgcaacgctgcccctgccgcgtcgtcttctggaccgcttctccactccgcccagctcgcagtcgcagctcgctcaaagcagcacagcagcaagcagaaggaagaaaaagagcagcgagagccgagaagagaagcgcgccgccgctcgagctcatcccgccgccggacacaccgcatggccatgaggcacagggcgcggtcctcccccacctccccgctcaccccgtcctccagcgcaaggttgcatctatcaagcaaagatgttcttcctccgccttctatctggagggattcttgggtggcaacaagatctgtcatgaaagtgaagacgtttcagatcattgtcctgcaagggatcattggctcgttgccgtggactgctatagttttcttcacaatgtggttcgaactcattggttttgacaacaacagctcagcagcactgaacagcctcttcgccatcgggtgtgccagcggagcatttattggcggggtgatagcagatcacctgtcaaagtacttcccagattcggcacgggtcatgtgtgcccagtttagtgccttcatgggcatcccgttttcttggatcctcctcacagtcatcccccagtcagttgactactggtatgccttcgccgtcacgcttttcttcatgggcatcacgataagctggtgcgccacctcggcaaacaaccccatgttcgccgaggtggtccctcccaagcaccgcaccatgatctacgccttcgaccgcgcgttcgagggctcattcgcctcgttggctgcccctgccgtgggcctaatcaccgagaagatctatggctatgataccaagaccgtgaaccttgcgaacgggtcagcggaaggggcgtacgcgctctcaagggggctgctgaccatgatgatcgtgcctttcggtgtgtgtgtcctgttctacagccccctgtaccttgtgttcaagcacgacagagagaacgctaaatttgccagcttcaaggagcaggagctagtatgatcaatgatcatacgaatgtgcttccttggtccgcattcataacctctcgtcatcccgggctggagctttgcgtgatgattatgaagataactgccttgatcggcattcagaacatctggtcataccgtcctgggtcattctgagtttcttgttgagattatggcaattgtgccacggagaggtgtggatcaacgtttgttctggcagattttgaagattgttataaggcgacctttttttttgtgctgatcacctatccagaaagccatggcttctcccgacgactgatttgtgttgttaagggatgatttgcttttttgcatggcttctcctgacgactgatttgtgttgttaagggatgatttgcttttttggtaattcttagtcttacaagagaaccccaaggagaagcatatgatatgatctgaaccatgctgaattgctgatgttacatgtagttggaacagatcactaataatgttctgatcactgggatcagctcgttttcagtaatctttctggtttttttttcgcaggaaaaaatttctgtgttttttttgggaaaaacacaggaaattttgcttctgttgattatgaaagcagtgctagcagtttgatttcatctattaaaactatgtgcggaagcaaattccgcaaagaagcaaaggaagaaaatggaaaatgctagctgcctcacgtgggacctcctgtcagagacagacccctttgcacgctttggagccgcagcaaagctcgaactcgatccgggtctccgggccattcgatctccgatcggacggcccagacagctcacttcctctccacctttgcacgctatagctcctctccgagtcgtcgtctccgtcgctgcctgctctgcttgctgcgccactccaaacccaacccaaaacccccacacgagatctgcgcagcaatggcgacgcggtgccacgtcctgctcctcctcgccgccgccttcgcgtccctcctcgcgctcgtggccgcggaagggggcgaagaggggccccgcgggcgccggctgctcgtcctcctggacgacctggccgtgcggtcgtcgcactcggccttcttcggctcgctccaggcgcgtgggttcgatctcgacttccgcctcgctgacgatccaaagctctcgctccaccgctacggccagtacctctacgacggcctcgtgctcttcgccccctccacaccacgttttggtggatcagtggaccagaacgcagtcctcgaatttattgatgctgggcatgacatgatcctggcggcagattcctctgcctctgatctcattcgtggcattgcaacagagtgtggggttgattttgatgaggatccagaggcaatggttattgaccatatgaactatgccgtcacagatgttgaaggtgatcacaccttgattgctggtgacgatcttatccattcggatgtgatactagggtctgaaaagattgaggctcctgtattgtttcgaggaattggacacatggctaatccatcaaacagtttggttctgaaggttctatcagcctctccatcagcatattcagctaatccaaagactaagttagcgtctcctccatcgctcactgggtcagctatatcattggtttcggttatgcaggcaagaaataatgctcgggtgctgttatctggatcactcgatctgtttagcaaccggttcctgaagtctggtgttcaaaaggctgatagcaaaacaagatatgagagagctggaaacgagcaatttgtggcagagataagcaaatgggttttccatgagaggggacatctaaaggctgttaatgttaggcatcacaaggttggggagaccaatgaaccaggcatgtaccgcattaatgatgacctggaatactctgttgagatctatgaatggtccggaacaagctggaagccgtatgttgctgatgatgtgcagcttcaatttttcatgatgagcccttacgttctgaaaactatgtcgactgacaacaagggtttgtattcaacaaccttcaaagttccagatgtttatggagttttccagttcaaagttgagtaccaaagactgggatatactggtctgtcttttacaaagcagattccagtacgtccttacagacataatgagtatgagagattcataacatcagcgtacccatactacaccgcctcattttcaacaatgggtgctttcttcgtattctcgtttgtgtacctgtaccacaaataaaggactcatgggagcgcacaagtctctggaggctgacgtgaccaagatctgtgggcactgaatgttgtgctataagccaagagttacccggcgccaattttatggaaccatgtttttgtactgccaacttagataacatttgacgaccgtgaccgcactcatgggaaatttactcgtgctaggatgttcgatctgcccccacttcttttttttctttcttggaccctttctgatcagcacttgtcagaacgtttacagtctatagcactgaaacgtgattttggaagtactacacccccagtaattttgcactcgtgcccagttctgatttctgatcctgggtgtggacttcaaagtctgcctattatacttccgcaattgttcgtgtttataacctggacgcacgtattttttttcacgggcttattgaacatgatgctcgaagagtgcactaaacatgccatgcacgtattttttttcacgggcttgttgaacatgaatgctcgaagagtgcactaaacatgccgcttcatgtacagaattcgaaatttgtaatgttatatgagcattttctcgggcagtggatgcattttaggtgccgtttggttcacatttgtcatgtacatttgtcatgtaatgggtaattgataacgttaaaccatgtttatttaagtttaactgtaatt

SEQ ID NO: 18388 - DNA, 1150 bp, Zea Mays
ccccgcccacctcttccgtcctcccgttcccgtcccgcacacagactctttctctctcctcccctctctcgtcctctctctctcgtccgatctgcatctgcttttctcccccttgtctgtctctctcctgtccgtggcgtgcgcaaagatttgattttttttttctcggggaggagccggagtccgagcaggagtggcggcgggagggaggagatcctgatctgttgtcgcagcggggaggggaggaccggaggaggaagatggctgcgcaggagcaggagcaggagcaggagaagcagcaggcgaagacgagcaccacgagctcgctcccctccagcagcgagcgctcctccagctccgctcgcaacaacctcacggaaggaggggcggagagcgacgaggagatacggcgggtgccggagatgggcggcgcgtcggcgtcggcctcgtcgggcgccggcgcggacgagcgtcccaagggggaggacggcaagcaggggcaggtggcggcgggggcgcagcctccggcgggcgggaagaagcgcgggcgcacggcgggggacaaggagcagaaccggctgaagcggctgctgcggaaccgcgtgtccgcgcagcaggcgcgggagcggaagaaggcgtacctgacggagctggaggcgaaggccaagggcctggagctccgcaatgcggagctggagcagcgggtgtccacgctccagaacgagaacaacacgctccgccagattctgaagaacacgacggcgcacgcgagcaagaggtccggcggcggcggcggcggtggcggcaagggcggagacggcggcaagaagcaccacctcgccaagagctagtgagaaacgagagagggagctgccttgcggtttggcaattcgattcaagattactgtacgctgccagctcttggagagaaaaaaagaagttttcggtgcatgtaaataaccatgcgcgggaaagaaaaacgtgataacaatcacacgacgtcaagcggcgagggtctgaattaaggtcatggttgtttacctctagtagattatataatacaacttaaataaagtaacgatctgtttaaaacctccttattatgttcattagtggattatataatttaaacagggactaagggacaaac

SEQ ID NO: 18389 - DNA, 608 bp, Zea Mays
gacctccccccgtttcaatcaaaatggaaaaaagtttcctcccttcccctctcttctgaatccggcatcaccatgcagaacaccgtcgcgaacccttccactgcggccgccgccgctgcggcagggaacggcggcgtccaagcatcgggggctggaggggagcggccggaggacgcgtcgaagcagaacctggcgcaggtgacgagctccatccagaagacgctgggcctgctccaccagctcaacctcaccgtctcctccttcaactctgcctcccagctccccctcctccagcgcctgaatgcgcttgtggcggagctcgacacgatgcagaaactcgccgaggggtgcaacatccaggtgcctatggaggtcgtcaatttgatcgacgatgggaagaaccccgacgagttcactagggacgtgctcaacagctgcatcgtcaaaaaccagatcaccaagggcaagactgacgctttcaagggcctacggaagcatcttcttgaggagcttgaacaagctttccctgaggacgtagaagcatacagggagatacgtgctacttctgctgctatattagataatcgagtatcactcactaagtcact

SEQ ID NO: 18390 - DNA, 1422 bp, Zea Mays
tcttttttttgtttttaagatatatgtcatatgttgtggggcaggcatattgtaagaacttgtgtgagggagtgtcaaactacagggattattggggagaacgtgatcagccattgtcagttcaaagaggacaacacttctgttggaggctcttggtataaccaggagcaaatttatatccagtggaaagaactgaactgtatgacagactgtcgctacttttgcatgacgcggagagaaggggaacggcaggcacttggtctgagccccgttaaatatcatggaaagtggccgttcttacgcgtttctgtgttccagtgaattaccaattgcctcttagaccccaggccaagagaacttactatgaatatactagcttgtggcatatctatgcaatcttatcaatgaacgcatggttctggagctctattttccatactcgagacattgacttgactgagaaattggactattcttcagctgtggccctgcttggctactcgttgatcctttcgttgctaagggctttcaatgtcaaggatgaggctagcagggtgatgtttgcagcccctattttggcattcgttacgacgcacatcttgtatcttaacttctatgagcttgactatgggtggaacatgaaagtttgtgtggtgatggccgcggttcaacttctgacgtgggcagtctgggctggtgtaagccggcatccgtcgcggctgaaggtctggacagttgttttcggaggagcactcgccatgctacttgaactctacgacttccctccatacatgggttacgccgacgcccattcgctgtggcacgcaagcaccattccgctcacctgtctcttgtggagcttcatcaaggacgatgccaagttccgcacggcaacactcgtcaagaaggcaaagtaattaagcaaagggccacactgttaagatatagggtctgggacccatcgtgtacacgaggagcggtttggggcacacgtgttataccggacatcatgaaacctccagtatatttgctcccccccccccccatgatgctcctgtgtcctgtcctgtctcccctccactcacgaattttgtccacaaactcagcgtattctttagggcgcatgttctgccattacgatccgccttcttacctgaatgtgtaaaactcagggaattttagaatgtgttggtgggctttgctagattttgtcatcgccgaatcagttttgcattgtggaatcagacaggacaatggacatcatcggtgtgtttgagtgtttcctgtgacgtgtggacttgtggaaattcctgaagcccatttttgtaggacatttgagttccaacgttacgaaagttactgaacaatacaatgaacacgtgctaggtttgaaacaaaaggggcctagctgcctagctggcg

SEQ ID NO: 18391 - DNA, 106 bp, Zea Mays
agaaacgagacacgttgcgtgcaaaatgtgcacttttccatgttaccaaacaaacgagcagcacgcaaagcgtcaaaaacagcacgcaaatgttctaaatgctcct

SEQ ID NO: 18392 - DNA, 247 bp, Zea Mays
aaagcataataccacaaatttaataagtatcagtagtaattacattatcggagtttcagaaatagtaaccataattttaatgcaacggaaataactaacggagaaaaccgagtaacatggcgaagcctggccacgctactcctcctggtcctctcctgcggaagcagtaaccctctcaaccatatatcccggtggcagggatgaaggccaagtcacaccatcaaccaaatcaaggaggtacctgcaa

SEQ ID NO: 18393 - DNA, 1208 bp, Zea Mays
atgacattgatggtaggcctgggcccaccactgctggcggtttcgaatccagtgagcggctttacttttccgttgcgtgtatcctctcggctctcgcctcgccgagtcgccgtcgagtccgccattccattcaccccggttcccctcccgtgcaaccgcgagcagaagccaccatttcaaaacgaggacgagcccgctgctggtgctgtcccttcccgcgcgccgccggcgcctggccacctgctccgcgtcggatctagagcgagcgagcgtcacccgcggctctcgtcgccgtcagcgtcacccacccgtcgtcttcttgcctccgaagtcaaatcttccaccccatatcaccacagagaattccaacccatccacttccgcggcctgctgccgtccgctttatttaaaccgtccgccacggcgaccccgacgactccccccgcggcctctcccgccagctccccctcacccccgaccatccacgcctccaagcgccgccgccgcgagaccgaagccacggggaacacgccgctgaggggtggcaggggccccgcccctcgccgccgctcgtcgactccgcctcctctttctctgccggcggcggagtttgacccgctcgacccggacgctgacccgccccccaagctgctcacggccgacgaggtgaggctctgcaagcaggcgctgaaggcgctcgacaagaaggtcgggaagcccgccacgcttaccaaggagtttcgtagcctcccggatataagaacagagcttcagtcagtgcaaaaatttagtgttgctcggaaacaagaaaataggggaagaaaccgctatactgatgtgttgccatttgatcaaagcagggtacagttagagtcttcaacaggcaatgattacatcaatgccagccatatagagattgctggcagaaatctaacgaagttcatttctactcaaggaccacttgccaatacaattgaggatttttggcagatggtatatgagaaccactgtcctgtgattgttatgctcaccaaatttgatggtcttaagtgtgatgagtatctaccattgagcaagggacaggctgtttttggaaaatttaccattaagatcacaaagttcaggaaagatggtcagttattgttgcgtggtgtggagattcgacaggatgagtcagatgaagtgcgatctcttctccacattgagga

SEQ ID NO: 18394 - DNA, 2330 bp, Zea Mays
cggtcttctcctttttctccttacgcatgacagaaagaggcctacgtgacgcaagacgacaacctgatcggcacgctgacggtgagggagacgatctcgtactcggcgcgactccggctccccgacaagatgccgagggaggagaagcaggctctggtggagggcaccatcgtggagatggggctgcaggactgcgccgacaccgtcgtcggcaactggcacctgagggggatcagcggcggcgagaagcggagggtcagcatcgccctggaaatactcatgcggcccaggctgctgttcctggacgagcctaccagtggccttgacagtgcttcggcgttcttcgtgacgcagacgctgcgagggctggcaagggacggccggaccgtcatagcgtcggtgcaccagccgagcagcgaggttttcttgctgttcgactgcctctaccttctgtcagggggcaggacagtctacttcgggaaggcatcggaggcctgcgagttcttcgcccaggctggcttcccgtgcccgccgatgcgcaacccgtcggaccatttcctccggtgcataaactcggatttcgacaaggtgaaggccactctcaaagggtcgatgaaggcgaggttcgaaaggtccaacgacgacgacccgctggagaagatgacgacgtcggaagcgatgaggaggctcaccagctactaccagcactcgcagtgccacatcaacgcgcagcagaaagtggacgagatggcccggctcaaaggaacggtgctggatccaggaggagggagccaggccagcttcctgatgcaggcgttcacgctcacgaagcgctcgttcgtcaacatgtccagggacttcggctactactggctcaggctcatcatctacatcgtcgtcacgctttgcatcgggactatatacctcaacgttgggaccggatacagctctatcctggcccggggcgcgtgtgcttcgttcatcttcggcttcgtcacgttcatgtccatcggagggtttccgtctttcgtggaggacatgaaggtgttccagagggagaggctgaacgggcactacggcgtgctggcgttcgtcgtcagcaacacggtctcggcgatgccgttcctggtcctcatcaccttcgtgtcgggcacgctgtgctacttcatggtgcgcctgcacccgggcttcacgcactacctcttcttcgtgctggcgctctacgccagcgtcaccgtcgtcgagagcctcatgatggccatcgccagcgtcatccccaacttcctcatgggcatcataatcggcgcagggatccaggggatcttcatgctggtgtcgggttacttcaggcttccgcacgacatccccaagcccttctggaggtaccccatgtcatacatcagcttccactactgggcgctgcaggggcagtaccagaacgacctcaggggcctgctgttcgacaaccaggacgacgagctgcccaggatcccgggggagttcatcctggagaccgtgttccagatcgacgtcgcccgctccaagtggctggacctggccgtgctcttcagcatgatcgtcatctaccgcctgctcttcttcctcatgatcaaggccagcgaggacgtcaccccctggctgcgccgctacgtcgcgcggcgccgggtgcggaaccgtcgccaccgcaagccggacctgcccgcccggacgccgtcgctccgcgggtacgtcgtcgacgcggccagcctgccggacgaccacccgtgacgaaagagcgcgagagaaaacgtacgggcagggatgtcatttcatatcatatcacacagaggctaaaccggatcgagctgataataacacactcactcactagtactgcaataatatgatgttaagttggtatagcaaccgcttaagtgcccgttcggttcttcctgaatgctttactggattggttccggattggaatagttcacaaatttgtattagctcgatgagttggaatgattccggccttcaatctggactaaacgaacagagctgtaatggagtgttgcttgatgcactgctaagatgtacacgtatatgaagagcatgtgaccatcagttctacacatcttgggttggactttgacaccctagggttaagtggtttgcctccaattacttacttaggggcgagttgggaatgtataagatcccttcataaatagggaggatgatttgaccgttgtcatctccctagcacatcatttcatttcatccttcttctataggttctctcattcctctggtatgctattgagttccacatatgattaatttagacactg

SEQ ID NO: 18395 - DNA, 1082 bp, Zea Mays
ttcagttttgcttacgatgcactccctgtgtttcattggttgaatcggaggatgcattctaatactgagtactgcagcatccatggtagcaaagccatggaggacaaggactctgtgcctcatagtgtggttgagaaagatactgaagcccttctgctccatgatgtgcttcttaatggtatacttgcaattggcacacttggccatcacgtggactcactttgccctgtggcttgcattgaagaagatgatctctttatcatggatgatgagaaagcaattgtggaagagagagatgatgaggaacccaggaatgatcaggtgaaagaagatgttgcattggaaacagagccatgtgaaccagtatggcctattgttgagcctgctaagatgcattcattgtcaatgaaagaagacaactttacatgctttgtagcagaagaaatcctgatacgtgaggtggaagatgggggaggtgctaatatccaggaacgaccacttctgatgttagaaaagttgccaggatatcattgacgttgctgtggcatccacttcaaagcatgcatcatgcatggaaaagatgcatcaaaagaaaccaaggaagccaacaccaaaaccactgaaagcgacaagaaaattaagtcgggtcatgaggaagatgttggggaagaagatccacccagagcagctcaatgggcgtagcaatgcagagggcccccttactgcatgatgtttattcttgccgacaaatttgcttctctatttggttacattggatccctatggctcagattccttgccagagagaagcgtccatggacagtcgtcgacgatgtggaagttccgttttttgttgttgtgttttgtcgccagtgaagcgtgcatgaataccaaccattctgctttcccatgttctcttgcttatttgcatgtataaatcaactgttggggtgtgtgtctgtgatcttgtaagctgtcatcatctggcgccacggcctgcgctgcgctgcactgcactgccttgtcgtcgcggcatgccaaatatatatattctttaataaaatatctgctttacgtttgca

SEQ ID NO: 18396 - DNA, 122 bp, Zea Mays
gccatattgattgaagtgtctcgagtgcacgccaccatatggttgtatgcgagacgaggttatgcgcatgacgagtttagtaaaaatccatcggtgtcacttgtgttaagttgaagtttatt

SEQ ID NO: 18397 - DNA, 112 bp, Zea Mays
ggcctcgtaatgttacccttccttgcctcctaggtagaggtgtatgggagtcgctatcccttggcagatgggtaacataacttgcgggtaaagatgtgcaacctctgcagag

SEQ ID NO: 18398 - DNA, 1359 bp, Zea Mays
attcccttcacttcctgcttttgtaggggatcatccgatcatgtcgagcgcggcggtgaacgggctgtccggcgccggcggcggcatcatcgcgcagatcatcacctaccctctccaaaccgtgaacacccggcagcagacggagaggtcaacgaagaagaggaaggccaggagcggcgccagcgccaccccagcctccaccatgtaccagatgctccagctgattcaaaccgaaggatggagtgggttgtacagcggcctcaagccctctctcatcggcactgccgcgtcgcagggaatctattactacttctaccagatcctcaagaacaaggtggaagatatagcggttgctcgtagcaagaagggccttggggatggtactgtcgggatgctttcttggcttggtattgcagctgttgctgggtcaatcaatgttcttctaaccaatccaatatgggttcttgtgacacgtatgcagacacatactcaagcgaaaagaaaaatattggagtctaagagggagcttttactgaaagaaatgtctagggcgaattcgttggaggttgcagttctgaaggataggctggttaaattggagtcagaaaaagctcgtccatatggtactcttcaagcgatccaggaggtttaccatgagtctggtgtaagaggattttggaaagggcttattccaacattaatcatggtatgtaatccatcgattcagttcatgatctatgaaacattggcaaagcgtctgcagtcaaagcgttctggaaagcagctaccaaaaaggcacctcacagctatggaggtttttttattgggtgcattggcaaaacttggagctactgtagtcacctatccattgctagtcgtgaagtcaaggttgcaggcaaaacaagaaattggcagcaatgtgatgtccagatacacgggtacaatagatgcgataataaagatggttcgctacgaaggactacacgggttttacaaaggaatgggcacaaaaattgtacaaagtgtctttgctgcctcggttctctttatggttaaagaggaattggtcaagttagcagtgcttttagttgcgagtagtaggactatgcttattactacatccaagaaacaataggtggtggtgtatttgggagaaaagctcatttttttgcctcaacttgtaatgtatagggtcccattatacatatcctgttcaagatcaatatgaaattctttactggttactagagaaaaccttaaagcctctcaaaagccataccttccccttattaatgaaggataaaatcatctaaaagatattacatgttttgggtttaactgatatacaaaattaagggt

SEQ ID NO: 18399 - DNA, 707 bp, Zea Mays
catgactcgaacggccgtcgagcccaaacctagcgatcgcagagagttgcgcccggaccccggaccgcgccgacccggctcgcaaactcctccacaaccctcgtcgccgccggctgctccacccccgccaccgccatgggacgatggtgtcgcagctggtgaagcacgagcgcatcgagaccaccgttgccaaggcgaaggaggttcggcggaaggcggatcagatggtgcagctagggaaggagggtactcagcatgcagcaagacgtgctgctgcctttgttcggggtgatgatgtcgttcataagctatttactgagctggcctttcgctacagagatcgagctgggggctacacaagaatgttaagaaccaggatacgtgttggtgatgctgctccaatggcatacatcgagttcgtggatagggagaatgagcttcgagaggccaaacctgcaacgccgccgcctcctcaacgagtccctcttgatccatgggccaagtcacgtgctagccaacagtgggcaggacctaaaatcaccaagagctcggaaacggacggcttatgagctaattgcaaggctgtgtccaaacaggaggaagtttggaacgagagagatgtatctctgctttgcttattggagttgtaacagatccaactacatgatcaaattcgtgtatgcatcaaaaaaaaaaacgcacaagaa

SEQ ID NO: 18400 - DNA, 261 bp, Zea Mays
gaatcaagtcattaaccatgcccttgattgggcaatccaattgcaaggtggcacatctgtcaaggtgcaatcaatggcatttccttttcaccggatggtgcttacttggcaactgttgggcgagatggttatttaagagtatttgacttcacgaaagaacaactaatatttggtgggaaaagttactatggtgcactgttgtgttgctcttggaggttgtatacatttttaacttgtgtagtcctgatgactgatgagtaa

SEQ ID NO: 18401 - DNA, 1506 bp, Zea Mays
ctcgtttcgcccctgtctcctggttcgcttgcgttacacgctcgggaatggattactacaacatcctcaaggtgaatcgcaatgcgaccttggaggacctcaagaagtcgtaccggcggctcgcgaggacgtggcaccctgacaagaatctgactggaggggcggaggctgaggccaagttcaagcagataaccgaggcctacgaggtactaagtgatccagagaagcgtgcaatttatgatcagtatggtgaggagggcttaaaggggatgcctccacctggttcccagagccggtcctccacaactgctggcccaagtggtccgagtaatttccattacaatcctagtgacccagatgatttctttgctgagttcatggcaagcaacaagacttactcctttgaccatgaccggaggcgattccagccaaggtcacattggacttcagccaggaacagtagaagtgaagctccttctggttcacagaaagagaatggtgccagtacaagcaatatagaaaagccaccacctgtggagaaaacattactttgtactcttgaagagttgtataatggaacaaaaaggaaaatgaagatcactaggaatgttgcaaagccagatggaagaatagaagttgaaacagaggtcttggcagttgaagtgttacctggctggaaaaagggaaccaagattacattccccaacaaaggcgataagctacatggccagttagcacaagacctgacctttgtcctcgattcgaagccccatgatgtgtacaatcttgaagggaacaaccttcttgtaaagcaggtgatccctctggtagatgccctcgctggggcagagataaacctcacaacccttgatggtcggaatctgcctgtgagggtggaggaagtggtgcgccctggatacgaagttgtgctggagaacgaagggtggccgatcaggaaggaacctgggaagaagggaaagctggtaatcaagtttgatgtgaccttcccgatgaggttatcgccgtcacagcgggcagccatcaggcgaatcatgggcagctaactgggggaagagaaagagaaggggcattgcattcttttacatggagaaggaacagtctctacattggcactagaattcagatggatagttggaacttggaagtaacttgagtcaatcagataggcatttccatggttaaatatcccgttactaatcctacctatttgctttggttaattgaatgtgacctagttttttttttcgttttctttgttatatcgtgtgaatccgtagaaaaggtgggtgatttcgaggataatgtaagctgatttttccatccgaattttttctggggcatgtgatggttttttcattggaaaactgtagcatacccgggaaatggaaggaaaggaaaaaaagatagaaaagacaagaaaggagcctttaagcaaatattcatgtgcctctttcttgtatcatgtatcagttgggcagggttcat

SEQ ID NO: 18402 - DNA, 458 bp, Zea Mays
cacggagatgccgagaagatggacgcacggagtcaccacgaacctatcgactttttatctccagatccagattagctaccacggcaccgccagcccggacggctataaagacgaggcccatctcgaaatcgacggcgatgaagaagaccagttcccctctcctgatcgtcctgttcctcacagcagcagccatggcggccgagccggagaagcaggcggcccccgcggcacaggagacggccgtgcacatcgtgtacgttgaccgccccgaggacgccgaccctgaggagttccacatccgcaccctcacccccgtcctcggcagcgaacagaaggccagggacgcagtgctctaccactacaagaacgccgccagcggcttctccgcgaagctcaccccccagcaggtcaaggatctcaagggagtggctgccatgcaccttgatcccttgttcaag

SEQ ID NO: 18403 - DNA, 772 bp, Zea Mays
tggtcaggaaataacccagtttctattttctgaactaccaatatattggcagcagtcacatgtctattatttttcagaaagctcaagtattcatcatcagttgagatattttgtggtgcacagttttcatttcctaatattctattgcccaagtcttggtcacaggagttagccaccaacatagaaagacatttactatcagaaatgctagaagtggctaatggctataattttcatgaacttcatctgatgcttgcctctattggagtgacacaaatgatcagttgtggtaaatatttgatatggatcattggcttgctaactccatgggatccgggcagaatggtcttcgacctcaagttcgtgatgcttttggcttgagggcaagccaaatcttaagaaggggggaatgtcaggcatccagtgacagatacaggctacgtctgaggacataaatacaattgggccggggcagagtgagcgagccggacggcaattgtgaagctgagcggcccagagtggtcagcaatgtaattttgtgtcttgagccagttgaacgagtatttagaggagatcgtccataggacaagggagatattcagactgtaaacagaactataccttcttcttcgtctctaacctctgcttcctctgttcctatgaatctcttgctatcttcctgaatccctagttcctgcttcctacctccaattcctgtctcggatctatctccactacctgctgctaacagagtggcttctgtctgtggccg

SEQ ID NO: 18404 - DNA, 1167 bp, Zea Mays
cgcttccctcggaaatggttcgatgtctcgatttgacgcctgcaaacctttctcttgcttcatttcttcgttatcttttcgactgactcggttccatttcgtgtcttagattcttgcatgtttttgtaggtcttcaacgagtcttctaatgtcttttttgaggtgttgatcatctggatcaccactttgcctttgtccaagtctactctgcattctttgaactataaccaaagacactagcaaataatcctcttgctcgaatgggtgctacggttactgcaattgatgttgttgacaagaatataaagattgcaagtattcatgcggcatctgatccaacaactgcttcgattgagtattgttgtgcaacagctgagggactggtaaaagagaaaaggttgtttgatgctgtaatttctcttgaggtgattgagcatgtcgccaatcctttggagttctgtgaatccctctcggctttgacaattcctaatggtgccactgtgatttccacaatcaaccgatcaatgcgagcatatgccactgcaatagttgctactgagtatatcctcagatggcttcctagaggcacacatgagtggtccaaactggttaccccggaggagcttgtcctaatgctgcaaaaggcttccgtctccgtcgaagagatggcagggttcgtttacaatccgttgagcggagaatggtccctgtcagatgatatcagtgtgaactacattgcttttggcgtcaagaagggcgaggcatcatcgacaaatgacagagaagcaaatttatcatagctgaagaaaaacacgtgaccttgaattgtcgggcatcattttcagaggaccaattcatgtcactgaaatcttactgctaaggatgcaaccaagtagcagaagataattctcttgctctttttagtcttggaaactggagcttgtggagtgatgcttcctggaagcgccattgagaagtcaagttgacaacacgtgactgctaacaagtagagctatctgccttttttgggtaatgtttcaggcagtttttctcaattttgtggcaatcactgatctaaataaaaatactactacactgctgtacgtgaaaactgaacagatttgctgtctggaaatgtaactatttttaacagttaagaggtgtttg

SEQ ID NO: 18405 - DNA, 836 bp, Zea Mays
cagcttccatatcccgcattcgcgctggcagcctggcgctaaccctaaccctcaccgcctggccctcacgaacacagccgccgcccgctgtgcccagccttccgccgtccgccgagccatcgaggggagaccgagccttccgccgctgcccgctgtgcccagccttccgcccttccagccacgcgctgacgccgtccgcggtccgccgctgtgcccactgcccactgcccagcggccccagctgtacggccttctgtgccgagccggcgagtcgccgttcgctgctcggctgctgtgcccaggcggccaggcgcccagccctccagccacgcgcccaggcgggccatgccacgcctgtgccttccgcggtcctcctctgtgtgcctgtgccttccgagctgtaacaagttgatatatttggaggattgttcaaagggcttgatcttcaaaatattaagaaggcatttcaaaagaaggataggcaaatacaattgcctaggtctccaagacatatatagcaaaatcagattgtgtagagccatacctaaatttttatccgtcctccgccactgctgctgggctttgtggaagcggagaaataggctaatcttctatggcggcatcgcatgaaaattgaagagcgttgggtagttgatgtctggtgtgcaaaactaatagtggcaatgtaaggcctcgtgtgctcttgtttttttttttttactaaaacacttgtaaacattatgatgtgggccactaaaggcaatgaaaaattcaggtgagggttcctctcccccgttgacagtaaaaaaaaacatctgtgacctactctgtgtcag

SEQ ID NO: 18406 - DNA, 3321 bp, Zea Mays
ctagcgtgctgcagctatgctacggctactcccctttttctttcccatctccgatttcaaaattcaaaagtccccttcctcactcgccttctctcttctccacgggagcgaggccgaggccgagacctcgaggcggtcgcgtggcgtctcggaacccgggaggaatccacagaaaaatccgcgcgtggggggccgaatctctgctcctggggcgagccggcgaggtcgaactgattcgaggctcgttctggtagagtggaatgcgtcggatttgagctgcttagggttgggattggggggtttcggtatttctttttcttttttagctgcagttttcgtccctctcctgtggccttcctttactcccgagtcccgacgacgacaggagcccttcaccggcgacgcacccttcgccgggcacttcaccgccgacgaccacgctcctgtgttgaatggtgtttggagtgtggtaaactggtaatcctgggaaaagatgaaagaggaaatcatgtttgacaaccaaacaaagccatgcagatcgagggttgactccaaaagcaattcaagttctctgaaacctaagtttggatcatcatggggttcccaaattgtcaaagggtttacaacagacaagaaaaccaagaagacagcagcaaatgcaagcaaaaaaccacctcttccaagtgtcgaaaatgttaatcaggccaaccaacagattccgtatcactctagggtgaaaagatcccttattggggatttcccttgttcacctgctggtgctcaagtccacccccatgtctttgattgccacaatattaggtcccctgcatcccatgatctttttcttgagctggatcatctcagagagcagcttcgtgagtcgaaagaaagggaattgacattacagtcagagttgagacagtgcagagaaaacccaaaagtttcagaacttgagaaggagcttgattctatgagggatgaagttgacaggcttgcacgactgaaaatttcattagaagctgagaaaacaagcatatctgaacagttatcagctctatcttctatggaagaacatcatgaagaaaatgtaagattagatagccacggcaatcggatacttactgtagatggggacaatgcaccttcagaaaacttggagtttgaagttgttgaactacgccggttaaacaaagagctacagtttcagaaacgaaatcttgcaattaaactctcttcagctgaatccaaattggctggccttgagaagaatgaagagagtgatattgttgccaaagttcaagctgaggcatcgttgttgaggcatacaaatgcaaacctcagcaagcaagttgagggattgcaaatgagccgactaacagaggttgaggagcttgcttatctacggtggatcaattcttgtctacgccatgagctttgtaactcagatcaagcagctagagcaacgacggatatagattacaatggtggcatggcttttaatgaggatgataatagcgaaggtgatgcaaaaacttccgaggacagttctgatataaaattcagcattgcagaacgcatcaagcagtggtcccagaatgataagagctgccaagcatcgaaaaaggaatcccttcttgatagggcatggattgaagctgcagaagcacgaagcccgacacgtaggcactcactcggtggaccaaagggatgtgcacaagacttcaacatcattaaaagaaggcaatccgatacctttatcagcctcccggatgcgacagatgagtcatttgcctttaataaggatcctgcaatcagggagaagcgtgatcttcttgtagacaagtatgattttggtcgatctgaaagttcaagatttgttctcagcaagccagaagtatgcaaatcacagtgtctggatgttgaaaagcgtgcgttgcgcatccctaatcctccaccaagaccttctgtttctgtgtcaaattctggtccatcaaatggatcgactgtaaatccaccgcgaccaccgccgccgccgccgcctccaaagttttcctcaaaaagtactggggtcatgaagagggcacctcaggttgcagagctctaccattcacttatgagaagggactccaaaaaggatacttccggtggcggaatctgtgaagcagctaattctgcgaatgtgcggagtagcatgattggtgaaatcgagaaccggtcttcccatttgcaagctatcaaggcagatgttgagactcaaggtgaatttgtgaaatcattaatcaaggaggtgactagtgcagcctacaaagatatcgaagatgtggttgcatttgtgaagtggttagatgatgaacttggcttcctagtggatgagagagcagtgttgaagcattttgattggcctgagagaaaggcggacactctacgagaggcagcttttggctaccaggacctgaagaagctggagtcggaagtttcaaactacaaagatgatccacgcctgccctgtgaaatcgcactgaagaaaatggttgcattatctgaaaagaccgagagaggtgtctacagccttctaaggacaagagatgctatgatgaggcagtgcaaggagttcaatatccctacagactggatgcttgataacaatcttattagcaagataaagtttgcttctgtgaaattagcgaagatgtacatgaaaagggttgcaatggagcttcagtacatgggtcctctgaacaaggatccagctctggagtacatgctgcttcaggctgtgagatttgccttcaggatgcatcagtttgctggaggtttcgatccggagaccatggatgcattcgaggagctgaggaacctcgttcacgtcagaaacagcacccagtagctaggacgcggcaccgcaatgtagtgtttgaagaagaggattagttttcagactctcaggcttaccatctcagtaagcgtagcaggcacgatttttggtcgtgtgatgtttgcatgtgttcctgcgtggtgtgtttcagtgtttgcagtgtgtaagatatgtttgttctgtaccgcgtgtggtgggtgggatgaagtgacccgccggcgctggcttttaacctcactgttgccagaaaatagaaaacgcactgggacatgcacatgcttttgttttgtgcctattgagcacagaagtagcggtggggttttgatttgagggtttgtttaggacgtattcaattgctttggatattgtcggagaccataattaggggtacctccaagacttctaaattcggctggtaaccatcatcagcacaagctgcaaaggcc

SEQ ID NO: 18407 - DNA, 1280 bp, Zea Mays
gatggacgcatctccaattctccatgttcgagcgtaaaaaaccttcaggtgatattgagttccggagtgaaggccacactgcatgtaaaggatgtacggttagatcttcaatctggatttgatcacttgggcaaaggagatggacggccagctttgagtttattccctctggttattgctccttcttccaaagctggaattttattcatgttacggttaagtggtacaaaggatgtggacgacgcagaaaatgcagacagcacgctgaatatcacctacgggatatctggtgacagaaaaactggagcacattctcctatacctgtcaaatctggtgattctgaagaacttgtgttcaagattgcactcagactgaagcgacctgtcctggatccatgtgtagcagttggattccttccattttcaactgactgcctgagggttgggcagttagttaatatgaggtggagggtcgaaaggctgaaaaccccggaggatgcatccatatccattgacgaaatactttatcaggttgaggcaaacccgcagaactggatggttgctgggaggaaatgtggtcacgtatcgttgtcaaatgagcaaggtaagaaccatggtaccagatgtttcaatccatgcctgtggcagagaatgacaacttccaatccaatctgaaacaattttcacatcacactgcactcgctcataggttcaaggatggagatcacggtgacatgtgtgccactggtgtctgggtacgtccacccaccgcagctggacctgccggaggtgggtgaggcaaacattagctgcaacccagcagggcctcacctggtgtgtgtccttcctccagccatcagcacatcctactgtataccagcgatatgattcttcctgggctgacagtttgctgccatttacacatagatgagccatagtatgtttttgccgagacgtgttttttgtgtgtagacatgtttcactggaatgtgtttcttgtaattctgttgtgccatgatcagtgtacaattctgcattgactgatggtacatgaaactggttccccagtattccgtgaaactgcaagccggatttgctgtgttcagattgtgttgttgcagactggttgcctttcgtaaatcagccagattgtatccttattaggtcgttttcatatctctgaggaatggatgattctagaatgattcttagatcgtttgtgttttactccgtccgttccaaaatatagttctttgtagtcctcttttttcgtccatgtt

SEQ ID NO: 18408 - DNA, 2280 bp, Zea Mays
gctttaagaacttgttatcaggaaggactgagttttcagcagatgaagacgctcatgttgtcggtgactgtgtaaagcatgttctccgagagctgccatcatcccccgtgcctgcttcttgctgtacagcattattggaagcgtttcgtctggagactaaggatgctaggataaatgctatgcgttcagctatatctgagacatttcctgagcccaatcggaggttgctgcagagaattttaaaaatgatgcacactgttgcatctcacacttctgaaaatcgaatgactgcatcggcagttgctgcctgcatggcgcctcttctgttgcgtccacttctggctggtgaatgtgagatggatgaggtatttgatatggatggtgacgattctgcgcagcttcttgctgcagcaaatgccgcaaacagtgctcaaggaattgtcgcaactctcttggaggaatatgagggcatttttcatgatgaacacctcagatgttccttgtcacctgaatctcaaattgaagatagtggtactgaagcatcaactgatgatggtaatttggaagccaagggcaatggatttcatgatgcagaaaatgatgtagatcaagaaatggatgatgacaatggcgtggaacgtatacttagtgggaaattgagtgagagcagtggatatgctggcagtgacctctatgactacaaggcagtcaatgctgaggagtcagatgctgaacgccctgtgaagatgttggaaggaaatttgaatttgagcaaagtacagaacagcctttcaactgaaaatggttcagcgaatgtggatagcttactaagcgaaaataatccttctaacccaacagttggtcacgagactttgtctatgggggagatcctttcttcttttgatcctggaatttctgtaccgacccatagtcctgaatattctgtagagagacagacaaacaaaactaatggatctcacccacatgtgaagcggagtaacttttgggggaggaataatgcaaggaagggccaaaactctgaatcagtcgattcatctggagaagaagagcttgctattcaaagactagagattgcgaagaatgatctgcaaaacagaattgcaaaagaggctagagggaatgcaattctacaggcgagtttggaaagaagaaaacaagcgctacatgaacgcagattggctttggaacaggatgtctccaggttgcaagaacaactgcaagctgaaagggatctgcgagctgcattggaggttggcttgagcatgtcttctggacagttttcaagtgctcgttcgatggacgtgaagacaaaggcagaacttgaggagattgctctcgctgaagctgatgttgcaaggttaaaacagaaggttgcagagcttcacctccaactcaatcaacaacgtcaacaccagtatggctctgtagtagatgcaaatgatcgtcatcaccgcctccctggtcatttctcacagcaaaactttgttcaacaaggatttgatatgaaccttgctttctgcaatcaagagaagcagagaaatgaggagagttcggtggagtcatcacaatggagaaacatcaagcagcatgtgctaccttatggttcttcgaggccactcacacgaaagctttcatttgatgcctcctcaagtgaatcaaggggcacagaaccctcaacaagtatgtcaacagagaacacctctgtgtccatcaacgtcccaaagctggcagagggcattgaatttgggaggcaaccaatggtcacatcctccactttggaaccacccgaggtaggaggatgaccgtttgatttcatgattgtaaattcttcagtagtggttcttttctccccgcctggcgattgcagaaaactgcatatacgagtgtaaatgtattttgctcttcgatatggttttagctttcgtgttgtgcgaggatagctccttaagtgggatgtgtgatatagtcttttctgtataacacgttgtcatggagagatgccttttagacaagtttttccagtgttgtggcggtgtatatgtattttgtgcgacttggcgaagaaattgaataggttgactgcttgtatggccgtttgattcatgcctagggcaaaggacaggatgaggaaaactgggatcaaatgagaacccagcacgagtttataaataattcgggggtaggcttgaggctgtgttttattttatccttgcaattagttcccatcgccagtggcttgattccgctccgtgttgtttg

SEQ ID NO: 18409 - DNA, 2288 bp, Zea Mays
aagcatagatccctttcaaattccatcgtcaccaaaccaaaccagttttgggtgagtggtcagggaacgagcgaagtttgatgtattgagttcaaatgcgggtgactgcgaggcgcaacgtttttcatgtgacttgtagttgtctattgggttttctcgggtattatttttttcctgttcttttggcatgattttgggtgttctaaaaacctccttagcgccagctctcattctacctcttaaaaaatcggcagtgatgagcccacccacggtgtacaagcgagttgatgcaccaactaacgagttgaactgaatactcctacttgcatagtagttctcaatcacaaagccatgggcgaaaattaattaaattaacaactcggtaaaactcaaattgtcttgccactgtaaatggttcggatatgaatcgcatgatgcgtgagcccgtacgtgctgatattatatatacagagaagtaggaaggatcccaagcatccctcccgatcagatccctcgacaatggcactccaggcagcctacgagtacctgcagcaggccgtcggccatggcgcgtggtcgtccacgcagacgctgacgctgctgctcatcgccgtacccaccgtactactgctgctagcgtccctcgccaagagcacgtcgtcgtccggtaggggcaagccgccgctccctccctcgccgccgggcaccctccccatcgtggggcacctacaccacatcgggccccagacccacatctcgctccaggagctggtggccaacgccgccgaggccgtgatgcgcacccacgaccacatcttcgcgtcccggccgtggtccatggcctcccacatcctccgctacaacacctgcgacgtggccttctcgccgctcggcgaatactggcagcagaccaggaagctgatgaacacgcacctgctcagcaacaagaaggtctactccttccgccatggccgcgaggaagaggtgtgcctcgtcgtggacaacctccgcgaggcggccgccaagtcgccgtcgacggccgtggacatgagcgaggtgctggcggcgtacaccaacgacgtggtgagccggtcggtgctgggctcgacgcaccggaagaaaggccggaacacgctgttcagggagatgaccatgaccaacgtggacctcctggtggggttcaacctggagtactacatcccgcggtggccgctgacggacctgctcttcaggctcgtgtgctggaaggtcacgcgccacctcaagcgctgggacgccctgctggaggaggtgatccacgagcacgtggagatgaggaagctgtccggcgacaaggagaaggagtcggacgacttcatcgacatcttcctctccagatacgaggagtacggcttcaccatggataacgtcaagtccctcctcatgaacgtgttcgaggcagccatcgagacctcatatctggtgctggagtccgccatggccgagctcatgaaccacaggcgcgtcatgaagaagctgcaagcggaggtacgggcgtacggagcggagaagaagctggacatgatcagggaggacgacctgagcagcctgccgtacctaaaggcgtccatgaaggaagcgctgcggctgcacccaccggggcccctgctgctgccgcactactccaccgccgactgccagatcgacgggtaccacatccccgccaacacgcgcgtcctcgtgaacggctgggccatcggcagagacccggcggtctgggagaagcccgaggagttcatgccggagaggttcatgcgggacggctgggacaagtccaacagctacagcggccaggacttcaggtacctgccgttcgggtctgggcgccggatctgccccggggccaacttcgcgctcgcgaccatggagatcatgctcgccaacctcatgtaccatttcgactgggaggtccccaatgagaaggaagacggtggcgggaaggtgagcatggacgagacgttcgggctgatgcttcgcaggaacgagccgctctaccttgttcctagggccgtctagctagctagttactgtgccgccgccgcctcctatccaagaatgcatgagtcttagacgtgtggcagtaataattgcgtggggtgtagtaaaataataagcacgtttgttgagttgtaatggattcacattatgtgcattcgagacaggtccaaggaattgtatctctaaagtgaaaatttcctttttcaccacgatgaatgcatgtcatactctctcaccggtatacacagaag

SEQ ID NO: 18410 - DNA, 147 bp, Zea Mays
cccaccaccagagtcggagttgccgaaggtgtccaaagttcctgcaataactccgaagaggagaaggatggctagcgtgttggatgctgttttggagtcggcaagggcgccaactcctgcctctgcaaaggaggctgccgaagctac

SEQ ID NO: 18411 - DNA, 1008 bp, Zea Mays
gcaacacgcgggtggtgcatttcattttgttcgccgaatcgggtttgggctgaattcggattgagatcccaacgttaccatggcagcgatgaatactggtatgggaggtttaggtggcaggccgatacatccacaagcaaatccttttggaactgccttgcagggtgctggaccaggattgatccgtactgggctagaaacatatggcggaaggattttagattcaagttctgagtttatgcagagcaatataacacaatatttgtccgaccctcagtactactttcaagtcaacagccagtatgtgaggaacaaactgaaggtcatcttgttccctttcttgcacaggggtcactggacaagaataactgaaccagtaggaggaaggctatcctacaaacctccagtccaggatatcaatgcaccggacttgtacatccctttgatggcatttggcacctacattgtagctgctgggtatgccttgggtgttcttggaaggtttacccctgaggcactgaccctacagttttctaaagggatacttgggtggtttctgcaagtcgtcctcatcaaaggtctgctgtactccctgggaagcggcgaagctcccttgctggacatcgtggcgtatgctggatattgcttcgctggcacttcccttgcaatggtggcccgcatcttctggagctacctgtattacttcatcatgccatggttctgcctctgcacgggagtcttccttgtgaagaccatgaagagggttcttctgggcgggccaaggagctacgagagacaccccggccggaaccactacttcctgatcttcttggcggtcgtgcaattccccatgctgttctggctcggcaacatatgtggctgacctttgatcctattggtcgggccacagacctgtttcttcttcttcttcagaatagagttcaaacgtggagggaagcagcgagctttatttagggcctgtgttgtagttgtagagcagcaaggtgc

SEQ ID NO: 18412 - DNA, 2005 bp, Zea Mays
gtgaactaactcatcagcgccgtcgcgtctcgcatcgcctccttgtccggttctaccgtcccatctggattcctcttctgctccccttctcctcccttcccttcccttcctcgacttcacctcaccaccatctccagctccatccgcacgcagccgtttaccaaccgacgcagcgaggagatgaacgcgtcgcagttcatggacaagcagatcctcggcctggctgcctccgcttccccctccggcggcggcgcggggggcggtgggggtgtggatctcagcgatctgatgataccgatcccccaggaggacgccgagaaccgcctcggtcgccggcgtagcagcaccagcgtcaacggaaccgcagacgacatgctacccagttatgacttccagcccatccgcactagtggcggcgccgcggccgccgccgcgcctcaggcctcgtgggggtcgctcgactccaaggcaccctctgcctcatacaacctcaaggtccaagcaggtgtgcagattttgcgagacaagcaggaaattgtcgagacacagctccaccttgcgaagctccagacaaacaaaaccgatggccaatcatcagaaaatagtgggtctggacaggctggtttacagcagcagccggtggttcctccacaagcagccattcagccacaacaagtcctaaccccttcgcaaccacctgcacttcctgcccttcctgctccaaatgcaccacctccacctccaacgcttcaaaaccaatcatcattacagtttccaagtcatttacaacattcacaggtaccatctgtgccttctgttgcactggcacccacagttccagctttaccaagggatgcttactatgccccatctgctcagccgaccgagaccatgcaccagcagtatcaagctccgccagttccacagccacaggcacctcctgcaccacctcagcagtaccaatcccaaacccagttccctcaatatgcacagccacctcagcctgcaaatgttaacccttcaactccccatgtgccccatgcaccccagcaaccagaggaaactatgccttatgcaccagctcagagctatccacctaatgcaatcgctgcaccttatatgcaaccacctagtggacctgctcctccttactatgggcagcaaaaccctagcatgtatgaacctcctgcaggccgggctaaccctgggccaccatcatcctacggttctggtgggtacgggccacagggtggaggtagtttctctgaatcttatggttacactggatctccttcccaccgtggcaatgctggaatgaagcagtcttcaccttttgctcaatcctctggaggaagcggcagctatggcagtggcaagctccctactgcccagatgcttccacaagcagtgccgatcagctcctccagcaccagcggttcttctggcaatagagtgccacttgacgatgtagtggagaaggttgctacgatgggattctcaagagagcaggtgagagcaaccgtgcggaggctgactgaaaacgggcagaacgtggacctgaatgtggtgctcgacaagctgatgaacggatgataagttgagcaatactgtcatttcacagtcccgcacagtactatggaaacttggaaagtgtcagctcatcagctgaaacgatttttctgtctgcaacgttgcatacctgattgtgcctggagaacaataatggccgaacagccgctcatcctgattgccggtcacggttgcttcatctggaatggaaacagctcagtgtgccttcagtgaattacagtatcacaatctgaatacgttgtccattttatgtatatgtggcgatgagacattctaaaacatatactgtggtttcttgtgatatgttaataagcagctttactctgtttttaggcagtgtttcagcttgctggaaagtgctttcgctacataaaagcggaacatcaaccaaactcaacaaagtgtcctttcccaa

SEQ ID NO: 18413 - DNA, 2618 bp, Zea Mays
ctctccttagctattcctgctgccgctgctctccgcccggttgtcaagaatgtggcgtcgcagtcgctcgaggtcaagaagctcgtctacctctacctcctccactacgccgacaaatgcttggcaacatagtagtttttgtcaagacaatgccatcattgtttgccccgttttatgaggacttctttgtaaacacttcagatccgtaccagacgagggctttgaagcttgaaatactgaccactattgccacagagtcatctattccggccatttttgaagaatttcagaatcttttattagtaactcagttcacttagatggagaagatgctgttttggttcaagcaatcttgtcaatcaaagcaatagtgaaaatggatccagtatcccacgaaaaggtaattgtccgcttggttcgtggtttggacaaactcaaggaacctgcagcacgatccttgatcatttggatgtttggagagtatagcttcatgggggatctcactacaaagattgttcctcctgttctcaagtatcttgcgtggtccttcgttgctgaagtggtggaaacaaagcttcaaatcctaaattcttctgccaaggttataatgcgttgtacagaagaagacatggaagaattcaaaagcatagttgcatatgtcattgagttggctacgtgtgacttgaattatgatgttcgtgatcgtgctcgtttactatcaagactcttgccgtgctacatgactcaccaagggtcctcacatcaacctcagaatggtgatatctataaagagctagccaatcatatatttaatgggaagttgcagccaacatctcatccagcaagcaactatcgcatatatcttccaggttcactttcgcaggttgttcttcatgcagcccctggttatgcaccacttccaaagcctcaaagtatggaattaaaccataatgtcacggcagcaattagaggcaaggccaaactttctggaagtgactccgatgctgaatctggatcttcaacatatgagagcagctctgtttatgattcggagagtgaaggtgctggcctatcggacagggatactgttgaatcccatcaggctcaagaagataaccaggatgctccactggtacagatatatgatgctagtatacagcaaggccaggcaggtcaaaatactgaggaaaatttggcagatcttatcagtaccgatttgactgagttgatgtctaagtcagccttggaatcatggcttgatgaggctcctgctgagccagttgttcagaatttgacacagacatcgtctgccagagtttcttttacaaaccgcaactttgagcgaaaacctaaactgcacacattgttagacccatctggcagtaatggattaagcgttctatatgccttctcgcctgaggtttcacccagatcacgtttgctagtatgtgtagacctatattttgagaatgtcactacacagcagctaacagatataaccattgaatctgaagaggcttctagcagtgtggattttatagaccaaacatcagaaggatattcgggtgtccctactatcgttcctgtggaagggatacattcgttggccccacaacaaatggcaaagttggttcttcaggtccattttcatcaccatatcttgcctctaaagctgtctgtgttttgcaatgggaaaagacatccagcaaaacttcatcctgacattgcttatttcgttcgtccactacccatggacctaaatactttcctatgcaaggaaaaccaattgaggggaatgtttgagtatgcgaggaggtgcgctttcaaagatcatcttcagaagctaggtcacgaggacagtgcagagcacatcgataagaaccttcaggtggcccagagtgttgcttcaaaaatactgagcaatgctaatattcaccttgtctcaatggatatgccagtaaccttcagtgtcgatgacgcctctggcttgtgttggagattcagcggtgaaatcctgagcacttcaaaaccttgcctgattaccatcctggcggaagggcgtgcctctggtccgctggaccttgctgtgaaggtgaattctgaagatacggtgttcgccctgaatctcctgaacagagttgtggcgatcatagattgaggtgagcatgaaattgtacattatcaacaaatagaagaggtatttggcaagcgcgtgactatttgtaagaaagtcttgttgaataatagcatctccaatagctctaaaaaaagaattgtgaaatgattgagttttacagcttgatgtgaaaaaagtgagtataatggttgtgtactaagaataccagagaaaatcgaagagatgggtgtagtctttggatcggtggatcgtcgacattggtggcatacataaggaagtttgggttgaatggatttaataacatacgtcttgtatgtggttgatattttgatgcaaaaaagatcagggattacatgtccagataatgtctaagctagcgagcaagagtcagggtgcgtttgattctgcattttgatgttctagagggcacttagtatcattcaagtgtgtgtcttctttggatgctgacagtgactcataa

SEQ ID NO: 18414 - DNA, 396 bp, Zea Mays
aaaagatcccaacaaggcagaacgcacccttctctcagtctcagcgccgtctttcttcgttacctgcccccgctccccgaaggctcgaaccctttacagccggcgaagaagatgcacctgtggccatcgctccggatccgcgactcgttcaagcacggctacctccagaagctggagctcaacctcggcaacatgaagcgcgcgcagcggcagcgccagggccggcagggagagagccaggaggaccaggacggccagcccggcggcaacgggaaggcgccgctgctcgaggaccgctcgccatcggggtccgtgcttgccggcgcgctcgagctcgcctgggacgccgtcttgctcctcacctgctgctgctgttgcttctgctgcggagagcca

SEQ ID NO: 18415 - DNA, 862 bp, Zea Mays
gtttctcttcccttctctctctgctccgggttcagagcagagctcagcgccctgtctccctccctccctccattcctcctcctccgctctctctctgcaggcctgcactgtgaggagactgtgacccggggacggagagctcctttcttctctctcatcgctccaccccttatttaccggtcggttgttcctgggccgtcccgtcccgtcccgtcgtctcgcctgggttctcgcttgcttctcaccatcactaccaccgtccacaccatcgcgagggcctggagggaagaggatgggacagggaggagaagtgaaggcggcgccggccgtgagggtgctggtggtggacgactcccccgtcgaccgcaaggtcgtggagctgctgctccggaaccacaaccaccagggcggcgccgcgccattccacgttaccgccgtcgacagcggcaagaaggcaatggagcatctccggctgatggagcaaggcggccagctggattcatgtgccgctgatgctaatcggataaccattgacatcgtgctcacggactactgcatgccggagatgactggctacgacctgctcaaggccatcaaggcgctgagctcccctaacccgatcccggtggtggtgatgtcgtcggagaacgagccccagaggatcagcagatgcctaaccgccggtgccgaggatttcatcctcaagccactcaagaccaaggacgtgcagcgcctgcgcaactgctccagcgccgctagacccagggacgacgcggcccaccagtgcgagagcttgaggaggagcagcagaaagctgcggtcggatcagaagatcagccagagcttataatttcaatggatg

SEQ ID NO: 18416 - DNA, 1862 bp, Zea Mays
tgtacaaagttactactatacacttgtgaagtggaacttgatgatatcttcattttttgactttttgtgctttaggctcctcttcttggatcgactgcagcagttagatctgcacatgtatatctttgtttaattatcgtctccgtattggtggaggtggaatgggtgattataaccacctgcaggttgtgtacatatctttagtacatatccattatgctatttaactccgaaaggagacaatatgcatcagtttcaacaactttgttgtttccttttcatgctgtcttataggatggcattttctgctcaatttgtccgttgctgatttcagtcgggtaatgttctttctgcacaatgacttttgcttgcaaagtcgagtttggcattatgctttgtgtagatgtatctgagaattgcatgactgcatacccttaacatgaaatttcatttttagagattagattagattagatatgtcgctgatggaagtccaactaatagcgaactgaagaccgccgaccttgtgtctacacccgcacattctgttgcatctatacctccttctacaccagcacttcatgttgctcctgcacttttgtctacccctgtcagatgctcatctccatttatcacgccaccatattgttcctcaggtatgcaagcaatttttatttttgatctttctccttgttagcttgattgatctttctccagtatttatttgtgggcttggttaatctaggttccatttagttgttgaattagttctaaaatcatagtggaaccaaaataatgtgtggatatttgcaaacgagtttctcttgaagtcatggtgtgaggaaaaaaggtaatgtccttcacattattctggtttagtataccttgttgattattgacatatgttggtcatgttggtgctccactaccttgttcgtatattaaggcatgctacatttcttaactacgtaccaatgatgtggatacgatttttgcagcaaagctatttttatcctggtgttatcttatctattctcatgacagtgaatttagttttattgttgacctcccacggttcttgacttcctaacatcggccactttatttttagttgattgactggcatgagggtggatacttgactgttgatttaccaatgtctcggggagaagttgtcattgggggtccaaatgtaactaaaggctatttcaaggatgaagctaaaacaaatgatgattgtgagcccatatatggagaacattataatcaatactgatcctttccataattactgtgttgcgcttgtggcagctgcacaaattgagctgtaaagctaggcttcccaacaaggagttaaaacaacaattcctcaaatttgtgctagaagcaagaggctgttaaagaagtgctctttagcaaaggtttcgtcattcttgcctaccgctgtccctttgcttcagaatacggtgaaacagaagtccttcattggctcttctcatcttggctcacatgcagtacttgaataccagtttcttcctgagcagccaagtgatgcatatgagaggggaagccagttgcgcttctatgatgctctagcagaagtgttaaactcaaggaaagaagaacaaatgtagagggaaatggagagacatgatcacgagagatgtaatgaagagaggttcatgcgtgaaaggcaaaggaaagaagaaaattccattagcaacagagacgtatacttataactattatggtagataaaaaatgttacaatgtctctcttctatagaacgaaactgggatatcattcattgatatatgttcgattttattcaataattattatataattgtgcaccgtcgca

SEQ ID NO: 18417 - DNA, 521 bp, Zea Mays
gggtgattagtgaagagcaggccttttcattacgtatcttgcgctgttcttgatggacgggcatggtcaacctgcgttgttgtaccttgtgccatgtacattgggggttattgttattcttggttggttaagaggtgagctttatgaattatggaacttcggaaaaagtccaggagaaaattttgtcaatgaaccatgacaacaaaatccagggaagatgtattcttcagcgtagtagatagcttgaggatgtttattaggaggcaccgtgtattgcaagatgttatgtttagcattatttcaaagaaggatgctattgtgtttgaaaaaaatgatatacatgtaagatgcaagcatgtactcccacagtcgtaaaataatccaatataagtgccgctatatagttccaaaataagtgtcactagggttggaaacgagttgagcctgacttggctcggtcaatttggatatgtttggttgcctggtctagtgcacgaccaggcccatttgaaaaggtcgac

SEQ ID NO: 18418 - DNA, 1387 bp, Zea Mays
gcgcagggtaaggctatgcggctgggttgcgctacgccgcgcgcacgccgggctcaccttcgtcacccttcgagaccgctccggcatggtgcaggtgacagtgttgccagagtacccagaggtttacaacatagtaaacaagctgagggtggagtcagtggttgctgttgaaggcgtgatccggccacgcccggtggatgccatcaatgcagatatgaggactgggactatagaggttgtggcacatcatgttctagtgctgaactcagtaactcggtcactgccgtttccagttacaacttctgatactgtaaaagagaagtttccagaagaaattagattgaggtttagagtgttggacttgcgtcgtccacaaatgcagtcaaacttgcggttgcgccataatgttgttaaactcatacgccgctacttggaggatgaacatgaatttgttgagattgagactcctgttttgtccaagtctacacctgaaggtgctcgggactatcttgtaccatcgagagttcagccaggaacattctacgctctccctcaaagccctcagctgttcaagcaaatgttgatggtttctggttttgaaaaatattatcagattgcaaggtgcttccgagatgaagatctgcgtgcggacaggcaaccagagtttacacaacttgatatggaggttgcttttacatctatggaggatatgttgaagttgaatgaagatttaatgagacatgtttttcaagcggtaggagatatcaagctgccaaacccttttccaaggttaacatatgcagaggcaatggatcgctatgggacagataggcctgatctccggttcgattgggagctgaaagatgttagtgatgtatttttggggagtagcttcaaggtttttgctgatacattggaaagtggaggcgtaataaaggcactgtgtgttcctggtggtgccactgttttttcaaacactgacctgaagaaaggaactgtttacactgaagcttccaaagctggagccaagggcttgcctttcctcaaagttatggagaatggggagcttgaaggaatcggtccactgttatcgagtctgaaacctgaaaagaaagaccagctcatggaacttctggacacaaagacgggtgaccttatcctgtttgcactgggtgaacaatcatcagctaatcagattcttggacggttaagattatttattgctcataagctagaggtgatagacacgtctgcacattcagttctttgggtgacagattttccaatgtttcaatggaacagtgatgagcaaagatacgaggttcaagaaaacacgattaggcgtgcgattaagcgctgagcagagggtcagcgcaccgcttaccta

SEQ ID NO: 18419 - DNA, 963 bp, Zea Mays
cgagggtttgaagcagcctctccgcatttgtggggggaaggctcctgtttctagctttattatcaaggactcgctaaagttgaaaaccagcgatgctgaaacggttgtcaacatacatgctgctagcgaaaagtttgctgagttgattcctctcctcgagtcaaacgctgacgtgtatgctctcaaagagaagctggaagatgagtaccttgagataccaggagacagcgtgaagcgtgtttttgcagggcttatactccgagaaataaaggagttttggcgggtggcgctgcttctatccattctcttctaccgagaaactggaactcctgctggcaccctcgacgagcaggacgagctgcgtcggaggaaagagaaatacatcagagcagagcgttccataaccgacctagatcttgacggggtgtggaagctgaagccgatactcgacgggaaatcgattatgggagtcatgcaggtcaagtccggaggtccactgataggaaaatggcaacaacgtgtgctgaagtggcagcttgcgcatccggacggaaccgtggacgagtgcgtcgagtggatgaagcagtcgcagtcaaaacgacagaaagtggagtccagcacctgataatcaaaattgacagtttggtcgtagtcagttttcagataggttagcaactgcctgccccttgcaaacagtttttttgcgtagacggtgaactcttgctgctaagacagccagttctcccttgttcgaaacctgtcctgaacgtagagtgagagacgaaagagagagagagagatggtaatctataatattaaaatatagcatgaatataattgtcctgagcacaaaaagaaatatagttgtcctgagctcgtagtatatatgtccataagcctcaaattggaaagacgataagccaccctcgcacttggcaagactgataagtgcctgctggaacc

SEQ ID NO: 18420 - DNA, 1343 bp, Zea Mays
ggtctgcctgccattcgtccgggttccggctgccacccactcgtggcgtcgcccgtcgcccgtcgcccgccgctcgctagcctactacgacttggaacttggaccccttccccttcctcctcctcgtgtcctcttccgttgccgtgccaaccaccaccctcaattgtcaaatcaggcctcctcctcccggttccggttccaccaacgaccaagcacccatctctactcgagtctctgcgaatccgttgccggtagcctctctgcggtgagagttctgctgccgcctgctggagatgatggacgacggaggaggaggcgtgcagtcgcagggcgtcaacccggactgccccaacgccgccaaccccttccaccgctgcgccgcgtactgccccgtccccgccccggcccccaccaaagccgccgccgccgccgtgcgcagcaagccgtctccgcctcgtccgagggcggcggcgatgacggagaagcagaagaagttgttcgagctgcggcttaagatgaatgaagcacggaaagcgaaccagcaggcgatggttgccgagaagaaaaggatggagcctcgtggcgagagccgaggtgtttctaagcagaagtggttagacgacaggaagaagaagattgggaagctgctggactcgaatgggcttgatatgaaaatggcgtacatgctcgacacgcaggagactgcagaagccaagtacaagaagtgggagaaggaacctgctccatatgggtgggatgttttcaatcaaaagaccttgtatgacgcatacaagaagaggaccaagaacatagaagttgacatggagtcttacaataaagccaaagaagctgatcctgaattctaccgcgacgcctcaagtctccagtatgggaaggtgtccaatgtcccagaagaaaacatcgacaagatggtaaaggaactcagggagcgggaagagaagcggaaatcgttcagcaggaggcgcaagttcaacgaagacaaggacattgactccatcaatgaccggaacgagcacttcaacaagaaggttgagcgtgccttcggcaagtacacgctcgagatcaagaacaacctcgaaagaggtactgcgctgccggactaataaaaccttacacggcagctatcttcgaccgtttttcaagctaaccagtcgactagaggcgtgtgtccctgctgctgttttccttttcgcacggttacttgtatgcttgtaacttaacttgaggccacagttccattgtgacttgtaacaaaacctggactgggttgtgtaatgacgcgaggctgaagcaaacatttgtgtatgcatgtgagttgtcaa

SEQ ID NO: 18421 - DNA, 159 bp, Zea Mays
cacaacttcaatatataacggagttctatacaaaatagttaaataattgcatcatgcgacgataacgatccagcaaccaaagttgactcggagacgatggcctagaccactcacgaactcatcacaacatccttcatgcgccccctcctgtggtacctg

SEQ ID NO: 18422 - DNA, 1807 bp, Zea Mays
gtcacggagaaaagaaaaagtaaccaacctccggtccaacccgatagcccaaaccccctgcgagcacaagcacaaagctaaagctgtgtaagcagcagaatccaatccaatccccagctcgcgccgccccctctaatccctcctccgcaaggcagacaggggccggcgttcactcgggcatccgcgggacggacggggagcaaagcctcagcggcgagtgcgggcgatgaggtcttcggaggcgtcgtcgcggctcgtgcaggagctcgtgctgtacgccgccagcgccgcgctcagctgcctcgtcctcttcgctggcctccgccacctcgaccccaaccgcgccgcttcccagaaggcgcagcaacagaagaaggagatcgccaagcgcctcggccggcccctcgtctccaccacgccctatgaggacgtgattgcgtgcgacgtcatcaaccccgacagcatcgacgtcgaattcgactccatcggcggcctggaccagatcaagcaggcgctctacgagctcgtcatcctgcccctgcgccgccccgagctcttcaccttcggcaagctcctcagcccccagaagggcgtcctcctctatggcccgcccggcacaggcaagaccatgctcgccaaggccatcgccagggagtccggcgccgtcttcatcaatgtcaggatctccaatctcatgagcaagtggttcggggacgcacagaagcttgtggctgctgtctttagtctcgctcacaagctccagcctgctattatcttcattgacgaggtcgacagtttcttggggcagcgacggacaactgaccatgaagccatgactaatatgaagacagagttcatgtccctctgggatggcttcaccaccgaccagaacgctcgtgtaatggtcctggctgctacaaacaggccttctgagctagatgaggccatccttaggcgctttactcagatatttgaaattggaattcctgttgagagtgaaaggagcaagatacttcaggttgtgttgaagggagaaaatgtggagcataatattgattacgatcgcattgcaagtttgtgcgagggctttactggatcagacatcctagaactgtgcaagcaggccgcattctatcctatcagggagctgttggacgatgagaaaaaagggaggaaattagataaacctaggcccttgagacaatcagacttggagagagccttgtcagtgtctagaaagggcaagaaggctgcaagttcagcactgcagtcacctttgtgggtacggccgacagattcagaagacgatcagatctcgtgaaaatctgcagcggagtaaatgcaggcattacgtcgataccgttaggtttccttatgcagtttgcagaggttaaacatatttatatatgtattaattcgttttgcgtttggaacctccaccggttttttttgaagcaaactgcagctggtgaagtggcaagcgtgccctcgtgtttaagttgatcatttcaaaatacgtgccccctgagggccgtaaaactgagaactctatagttgtctggtcaacagtcggtcttggttgcctctgtattttatcttcggtttgactactctagggtggcgaattacaacatacagtataatgcagaaaggttcccaaacgtgcttcggttttttttgttcaaaaaaaaaactttaatagagaccgaactaaactactgtagagaagtcctttctacattatattgtgtacatataaaattttaaaggaggttttattgaagatttatgggctccgtagcgttgt

SEQ ID NO: 18423 - DNA, 1876 bp, Zea Mays
gacaagtccaattgatgtctagatttagactactcgagacattgttaagcaacacatagcaactgcatttctccatcttcaaagtgaaatatcagaggcactggttaggacacattcaacatcaaatgagaagttggaagagtcacagctgcaaactgctatggagacaagcaaaatcaaagtatcccaaggatgcatagatctcctgcaggaatttcatcatctggtagatggcaatatagagttgcttgttaagctgagggatttgattattgattgggtacaagaaggttttcaagagtttttccagaaacttgatggacattttcatgtgctttctgggagaagcaaaacaaatttacaagagccaactatggattctatgcaaactgataagaccccaacagtcttggtacttatgcttgcacaactctgtgtttacattgaacaaacaacagtccctaaagttacagaggagttagcttctttttttggaggtggtgcacatagctacgaatatggaccaccttttgtgcctggagaaatatgtcggctatatcgatcatctggagagaaattcttgcaccattacataaatatgaagacccagaagatctccaaacttcttaacaagcgatttacaacaccagtttggattaagcacaaggaacctagggaagtgaacatgtttgttgatctacttctcctagagatcaatggtctggtatctgaagtcaagcagatcttacctggtatggttcggcgacatcggcattcagatagcactggtagcacgacttcctccagaagcaatccaatgcgagaagacatgttgaaccgatcaaacacacatcgtgctagaagtcagtttttagaaaatcacctggcaaagttatttgagcaaaaaatggaaatattcaccaaagttgaatacacacaggaatctgttatttctactgtcctcaagctctgcctgaaaagcttgcaagaatttgtccgtcttcagactttcaacagaagtggatttcagcagattcagctggatatggaatttctcaagacctctcttaaggaatttgtggatgatgaagcagccattagctttttactcaaagaggtgaacaatgctgcccatgagagatgtcttgacccaatccctcttgagccccccatattagataagctcataaatgcaaaactagcaaaaattaaagagagaaacccaaatatgcggtagctatgcacagattggtgtcgtttactagaattcagttctgtccatttgaatgcactattcagagttgtgtgtgcaacttcatagagtttagggcacatagcatggatgaaaatctggagtcagactcagatttgaataacactccccaaattgtatactggtatacttaatttggggtggtcgagctgttagcatccccttgcttgtcaggctaccgtcaagttgtcttctgtgcattgttttcttatcccaggtcaggtactggtctgaatttaatcaaatgagcatcgagctgttagaaaaccaaggcaccaactctaatagattcaccatctggaaagcgagggcagttatcatgccttgtgaagatggtttgttgggattgcgattccctttatgcgtcctgtttttttatttgtcatcttctgctgtatcatcctttctttgaactatattttcatgtggtacatgataccttttgttaccttcgccacagtactgctcacgaatagcattttgagccattttgctatgccttggaataaaacttttatcctcgatcctaggaatggataacctcttggattttcacatctgatattaaccattaaaatttggatgatggaatgtgtgttcgcg

SEQ ID NO: 18424 - DNA, 653 bp, Zea Mays
accctggtggcagtgtcaccgagacgaaacaaggaaggaaccagtggaagtgggatctggatctctcctctctcgtctgcaccgcgagtccgcgactccgcaccaagcaaatcccctgcccccaaaatattgctagggattcgaggggaggaaaatccaggcgcccaggcctggcaatccgttcgtcggagaggccatgagctcggcgcaggatccgttctacatcgtccgggaggagatccaggagtcgattgataaattgcaaagtaacttccaccgctgggagcaaactgcttcaaacacaggagaatatgttcatctgacaaaggagcttctgaccagctgtgaaagcatcgagtggcaggtagatgagctggaaaagacaatctcagttgcatcaagggatccatcatactatggacttgatgaagttgaactttccagacgaagaaactggactggttctgctcataagcaggttggtacagttaagagagctattgaaaagggcaagagcaatgtagcaacttcaaaataccaggatacaagcaggaccaaccactattctgcccaagataatgatgactttatctcttcagaatcagataggcagcttctactcatgagctctgttgttgttttcttaattctgg

SEQ ID NO: 18425 - DNA, 862 bp, Zea Mays
tgggcttcactacctttgtagcgaataaggaaaaaggtcctaggactgtgaatgatcttaagcttattaatgctgggaagatactggagaacaacaaaaccctatcagaatgcaaaagcccgatttgcgacttctctgcgatgacaacaatgcatgtcgtcatccgcgcaccgacttcaagcaaacagtctgataaaagagcagaaaagaaagcgaaaaatttcaggtgcggttgtgccattatgtgacagcattgtgaatagtagcagagagaacgtggccatttcagttttctccctttttttttcctgctctcgctggagtgttgtattatgttcgaggcgctttctcctttcattttgttttgaagtaccgcgtgcaagcttcaacagctgtcaagtgccctttaatcgtgagtgtgcatcaagcacagaattagaaggcggttggctgctaattacccttaatcttgagtttgtcaagcacacaatttgaaggcagtcattagcgtcgaaactacgatgtccaccctatccaatcttccatggtttcacgcttctcttctatatttatgctaccctgggtgacaaatgtttaatgtatgccttccatgctagatgaactttttggaacgccattctaactcatcaatttctattctgtaaaactaaaaccagttgtaatctgccatagatcagtatgcttgctatatgggagtcacattgatatgttttgcaactgttgctcatactctaaattagtagtagtttattgctggttcatctcagtttgcatcagctaccgtaaggtttgtatagacccaagttggatcacaatgtatcagcagggccgttcctgtagg

SEQ ID NO: 18426 - DNA, 1110 bp, Zea Mays
caaaccaactcggaccaagcaaaaccacacacacacacgccacctccttgagtccttgtcggctcgccatcgccaccatcatttcgtgtcgagtctccgtttcaccctccccaaattcccctcaaatcgatctcccccgcaccccgaatccccgcgcccccgcgtctgaatccggcgccccccgccccgatccgtccgatccgcgccgaatcgccgttgctcggggcggaaccctagcccgatctccacctgtttcctcgcgatgggcgccggtcgtgtctgccgcggcggccctttctccgcctcccccgccgctggcgccgccgcggggcggccgttcccgccgctcaccgcgtcctcctcctcatctccttcatcggccccttccgagacagcgtccacgtcggtcaccaagacggtgaacggctcccaccacttcaagatcgcgggctactccctctccaaggggatcggcgtggggaagttcatcgcctccgagtccttcaacgtggggggattcgactgggcgatctacttctaccccgacgggaagagcggcgaggatggcgctgcctacgtctcgctcttcatagccctggccagcgaaggcaccgatgtgcgcgcgctgttcgagctcacgctcgtcgaccagagcggcaaggggcaagacaaggtgcatacccactttgggaggtctctcgagagcggcccatacaccctcaagtaccgcggcagcatgtggggctataagcgtttcttcaaacgagttgccctggaaacatcagactatcttaaagatgattgccttttagtgaactgcaccgttggtgttgttcaatcacatactgaaggaccaaagatatacacaattccagtaccacggtccaacatggctctacatattggtcagctattgacaagtgggaagaggacagacattgcatttgaagttgatggagagatgtttcctgcccacaaggtgattctttcagcccggtctcctgtttttagggcgcaactttttggtccaatgaaggataaggacatgaagtgtataaagattgaagacatggaggctccagtattcaagatgcattataagagatctgg

SEQ ID NO: 18427 - DNA, 1666 bp, Zea Mays
aatgttctaatcgtgatgaaagcttgccctgcgctgtgcgtgtaggatgcgcaaattaccaaaagggccctgggctactgagttggcggctgctctctcggtggtcccaaagggaagagggggaaccgggcagagagcagcgcaggacaagacaggcagagaagtcgctagccagactagtctgcgcggtgatccgtcttccctggggtgttccgccgtcctgcagcagaggcagggggttgccgctctcgccgccgcacgctgcggctctgctctgctccgcctgatccttcctgcggcccttgttttttcctctcgtttcaggtggccagccttggttttgcagaactcattcagtggcctctgctgaaaagtgttcaatggcgtcaggagccaccttaagctgggttaaaaccccatttgacacccgaagatttcatgacctatctaatctaagtttccgctgccgaaacccttttggatcaattcagccctggtggctgcaaactgatcaagactcatccctaatcaaggttcgcgtggctgctgattattcagactcaatgccagattcaaagtacacgagagatcggggttatcaccctcttgaagaagttaaagaacgtccaaagaagaaggacctgttgctgacagatattgaaacagctagaacagtagtagaggcaaatagcaaggggttgcttgtatttcctgctagggtacacaatgaacctcatggacatgtttcttggtcggagtttcaatatgttgttgatgaatatggagacattttctttgaagtacctgacagtgagaacatcctggaagatgatactgcaaacaatcctgtgacagttttgattggaatggatggacccattattggagaaagtagtgtggcgattagtgatttcagtgattacatggatggtgaaaattttatggacgttcctgatgagcaccacaccaagattgatacagaaataactgatattctcatagagtgggggatgcctgcaacaatgcgtgcaatacatccgatttactttgccaaatgtttgacaaaggccattcataataataatggggagaagatggatagtccatcaaacggtctctctattgtaggatatctgagacctgctttcatagaggaagagtcttacttgaggagcatgtttcatggtgacaatggtggttattcatctgactggaaagtaaatgaaaccgatgaatacaacagagaaactcggccagtttctggaaccaatcgcctcattggtaatttagttggttgaaatcttgcacgtcagctatccactttactccaatttttattttactagtactaagcaaatattcagatgatgataaatcaagatttgacttcaatcatgctgaaactagaactgattcaatgatctacaagctggagataatgacaattgaactgttttccatgtatggaaagcagtttaagattgatccacaagattttcaagattcagaaccagatattcttgcaaattctgcttcatcgataatagaacggatcaaagaaaacagtgatcagtgtgccgcggctctcaggtcgctctgtcgccggaaaaagggcctcactgtcgagtagaacaagcactccttcagcataagctttgtttgcaaa

SEQ ID NO: 18428 - DNA, 2178 bp, Zea Mays
cagcatccttatcccctcgcttaactccaaccccgtggtccatggagattggagaccttgtccaggaaccttcaaattcctcccctggccctatctctccatccgcgcgctctgctctccctgcccgcaccccgcagatcccgaatggccatgcctaccgccgcctgcaggtcggggccggatgcactgcaagctgcggccccgagcaccgggctgaactgaagaggtgtcgaggtcgccattaatcctcaacaaccagctgccaccaacgctatatgctcaccatcgccagcaacttggtggcatctgatggctggggtttataaatggaaactggcatcttataaacagatggaacgtacgaaagttgcatcagagaggttgtcattaagatctaatagcaccaagcatcacgatactgtacatcttggtcttggtcattttgggaaggatggcaatctcatttgtcgttcacttaagtcaatattaaaaccaaaggcaagacagtatgctattgtcaaggtacataataaagatgttgacgagggttgcagctccaaagacaatgagattatttctagtccatctgataggaaagaaggaagtcagctgagggcactggaatcttatttttctaaattcaatccctctcagcagttatactctttgcctcagaagaagcacaaaagtggtccatcatcgtcaaatgaagttgatgcaatcattgctgatgaggatgctaatttgaagaacagggcagactctttgcaggtacagattgacagaggacacacaggtatcaagagtaatcaaaatactcccaacgaggtttacaaggagtacttgatatttgatgaaaaaagtctcctggacatgcatacagatgatcaagcgtctggtttctgtttgacaaacttattggctggtgttaatattgcagttctgttatttgaaatagcaagtccagtgaaaaattctgaaaatgaatatttatccctccctttgttgtatggtgccaagataaacaacttaatactttcaggggagtggtggagactactaacaccaatgtgcctgggcatatggtcaaaggacattttttctgatatacatacttggaggaatctgtggtaatttgagcagttttgttcacactcctgagataaccgtttgtggcacaggcccagtattttctttaattggagcatggctggtatatcagggtcaaaacaagcaagtcattgacaaggacgtttcagaaagtatgttctggcaggctgtgatagctgcagctttgagcttcttattgagcatttttgggagaattgacaactgggcacatcttggggcgaccatttctggaattttctttggttatctgacatgcccaagtgtagaatttgacaattctgcaaagaacggtcaaaaggaagccgtggctcttattaggcaacaagctcatccatgcaaatccgctgcagtctttttcataaccatacttgcgtttgctgtactcgccttcgcttatgggacacaattcaacaatatggatctggaataggcaaatagctaagtgttgtcatggttcacttcatatatatatatatgcatgcatgtagcccgacagctatatattccggaatgtgaatgagcccgagatgtaagaaaacgttgtacactatagatcagttctatgcgtaaccaggttggaatttttccattccgtatcatgtatacactacaatagtgaatagtctagtacagttggtttttggattggctagagcttatcagtgtctgtaagcaggtgaagccacggacggcataactatttgtacactcggtttgcataagaaccgactgcacatctgcatttgcaccgtcggttgcaagttgtgatagactcggcgggaagttttatgtaatataaaataaagtataggtgaagtacatgtttttagtataaatttttatcctgtaattttatagttattgaattttatgactaagagttggtaatcgtgctagtagtgttttatcttggatcactgcatatgtccccttgatgcagtttttggttgtaatccgagcggtttgagttcgtttgaggaaaccccaatacaaaatcttagttttgtctgtattttcagatatgtgattgatttataaatctgattg

SEQ ID NO: 18429 - DNA, 159 bp, Zea Mays
cctacatctcatttaggaccgagagatgatgatcgtgcgaagtgaagtggtgccaaccacaagatgcagttgttggacaagtcgacgaaggacggatgagtcaagcaccaagataggagatgctcgccatgcgagtgtcatctagcaaacactaactag

SEQ ID NO: 18430 - DNA, 2719 bp, Zea Mays
gctggtctcacactctcactagatctctctcacatgcatatgcatgcattagcttttccccaccagcatgcactagctgactagcatctgtgtaatcggtgaccgctcttgacttgttagctccccgctcccacggtagctaaagctagctaggtgggtggtagcaccaccatggcctcgcccaagcattcccatcgccatcatcgtgcggcggcgacgaagcatcgtcggccgctggcgctgcggcgtgcgatgctgcattcgtgcgtgtgcttcctggtgggtctcgtgaccggcctggccccttccgactggacggacgccgcctcgcgcgcggccgtgcacgcgaacggcgcggccacggcgcaggtgttccgcgcgctgcacgccatgaaccagacggcggcggcgggggcactgggccagctgctggcgctgcagcactaccagcagcagccagtggtggagaaggagaaggagaaggagaagaagcctctggatctggtggtggtggtgacgactacgacgacgtcgacggggttgtcggagcgcgagcggcggtcggcgggtctgacgcgcacggcgcacgcgctgcgtctggtgtcccctcccctggtgtggctggtggtggaggcggcccgggaggctggtcccacggcacggctgctgcggcgcacgggggtggtgtaccggcacctgacctacgcggagaacttcacatcggaggcctgggaggaggagcggcaccaccagaggaaccaggcgctagcgcacatcgagcggcaccgcctgcgcggcgtcgtcctcttcgcggggctcgccgacgtgtacgacggccgcctcctggagcagctcaggcggcacatcaggacaaggagtgtgggcgcgtgggcagtggcgacagtatgggagcaggagaagagggtggccgtggaagggcccgtcgtcgtctgcaacaccaccaccaccaccaccagcgcagcatccacagcatgtgcatggttctccgcctccgactccacattattggcggcagcggcagcagcagcgcccccagtgacggccgacgactccgtccacggctttgccttcgccagcgacctcctctgggacccttccaggtgggaccgcttccccacatccgagcccgaccagtcgcagctcagcagcgactgcagcgatacccccatcatcatggcactggagagaggggtcagggtcatcgagctcgacatgtggccaaattcaaccattgacgacatcaacatcgtgcacggcaggacactgacaaccccagtttctctcatcaaatgcctgagatccatcaagaaacacgcctttgttgcatctccctatcctgtcatcataacacttgaagaccacctcccctctcaactccaggagaaagttgccaagatggttgttgaagtatttggcaacatactgtactacccgccagacgacacccatgagctcaaagaattaccatcacctgaacaactcaaaggacgtgtcctcctctcaacaaagccccccaaggagtacctcgaaaccaagcttagtgactccacgaaggagggtgatgctgacctccatcttggcaaaggaaccggtgatgacgcggtgtggggaaaagaagtaccagattttcggaccgagatccagtctgctgaaaaggacgacgagaacgacgacgttgatgatgaggaagaacaaaaactgcagccccatatagctccacagtataaacaccttattactatcagagcagggaagccaaaagactctctagctgatgccttgaagagtgatccagaaaaagttcggcgtctcagtttgagcgagcaacaacttgccaaagcggcaaaggatcatgccacagaaattgtgaggttcacacagagaaacatactgaggatataccccaagggcactcgagtcacttcatcgaactacaatccgttcgttggttgggtgcatggtgctcaaatggtggcattcaatatgcagggatacgggagagcgctgtggctaatgcacggattttacaaagcgaatggcgggtgcggttatgtgaagaaaccagatttcttgatgcagacagaaccacaagtcttcgacccaagagaaccccagcctgtgaagaaaacgttgaaggtgaaggtgtacatgggcgatgggtggcgaatggacttcaagcagacacacttcgatcagtactctcctccagatttctacacacgggttgggattgctggagtcccagcagactcggtgatgaagaagaccaacgcgatcgaggacaactggaccccggtgtgggagaaggagttcagcttcccgctgactgtcccggagctcgctctgctgcgggtggaggtgcacgagtacgacatgtcggagaaggacgacttcggtggccagacagtgctgccggtgtcggagctgcggcccgggatccgggcggtagcgctcttcgaccgcaaagggatgaagtacaaccatgtgaagcttctcatgcgtttcgagtttgcctagcctgaccctgaccatgcatgcccccccccccccccccccccctcctgttgtgtgaatggatattgcagtctcagtgtgcttcctttgtacatagattgcttggcttggatgatatgtgcaacagacaattccttcagttgttatgatcaaataataaagaggcagcgtccttatgaacaag

SEQ ID NO: 18431 - DNA, 2516 bp, Zea Mays
gttccttccagactatggatctgcagatgctcagaatgccctctgatttgaagagcctagtgaacctttggctctcctccttgtagttcctcttctgctgtggttgttcggatagtgcctagtttgtttcttttttccatatcttttgtttgcctctcttttagttctctagctaagtcagcaattactgggggccttgactcaaagctcgctgcatgggatttctccaaaggacgaacactgttttctattgattatggatcacctgaattgcaaaacggcagttcttccggtagtgcagggcaatgtttcaaccctgcttttgttcattcagtagcagtttctgaagagggtattttgggagggctctacaaggtttgtgctgttgcaaggggggatggtgctgttgatgtggttgatcttgagtatgaactggcccctgcgaaatcgaagggacctcctcgggcagctattttgacaacgagatcaaaaggcgctgaacttggagatgggagctgcaatcaaagtcgagcgaaaagaatccatcttgactacaccatgggcggccatactgcagctgtgtcttgtgtagcattttcagcatttggtgagaaggggaagttcctcatttcaggtggcaatgatgcatcagtgaagctgtgggattggtcgaaaggattttactctgaaacaaacagcaaagttgatttggttttggatattgatgtaaagaaaaaggtaaattggctgtgtactgctccaactgattcagataacttgattgtgtgtgacacatccaaggtggtcaaagtatatagtttccggtagatggatcaaggtgtagcctcagtttgtcaggcagttatctgagggagtgaagcttgtctgaccgttggaaccaatctggtcctgactctggtatccagatattacaagcctgccgcagacagttcctgaattgtgaggtcattggttagcaatttgcaatgtcagttgtggcgcagaacagatctgataaagtatatattattttgttactgtcagaactttttgtacaacttccagtctgctagcttagctggactcggcatgtatatctctgttgtacggtgaaatgaatttatgtgtttggagaaaataaggcttgtttgtgctggaagagattatcttgattgtgtttatccttttggtttctatagattgtaggcttgtagcttttatttctcggtatggtgcaacctgtggtagcacatataatataaggatgatgtatgacgaatgtttttctgcgctatactgacggcttgttgaaccgtctctgaatgatctttctgttgcactcttgggcaacttgtcagtctgagactctcagtggctgcaaactcttgttgtacccattggaacaggaggaagaagaggggagttcaaagcttgcctctttaccagcaatagctaagaaagttttatcttacgaggagggtatttatgcaaaactttccaggaagtggatagaagaaggcctcagaaccgtatccattggaagacaggaaccagggggttttgctgctgttctttggaggagaagagaaatgggaggcttgctcttgccgcatcaccgaacctttccaaattctttgcaagcttccatcccgggacctctctctcttcacaaaggcgaccgcaaaaaccttcattactttgcacctgatgtgcacctcttctgttccctgcggcaaggctttccacgctcatcttggtcggccgtcatcagatcagaagccagcggcaacgcggtggcgtcgccaggcacggtcatcaagcgtagcaaggaggagctcatcaccttcttcagagacatacagacatccattgccgagtgctcgcgtaaagcttccaagaggacgaggaagcagccgcctgatctgttccaagaggtccgcaggagggaggaacagtcacacggtggaggagatagcggcaccgacgacgtttcagagggaccgaggaaagtgaagagtcttgaggacatgaacgtggctggattgagagagttggcgagggccagaaggatgaggggttactccaagcttaagaagggcgagctcattgatcggttgagaggggctactacgtaataaactaccatgatgcagagcagcttcgcagttaatagggacacatgttcttttcgaacgtatgatgagattaccgatcaaaaaattgtatgatgatgagattaccgactttccaaacgatctagtcagttcattgataagaactagaacaatgtgtgtagttattatactatagaaccggtggagctgtattgttgtactacgccgaaacttttgtgtaggcatggcaatctcctgttgttacgtaagttactttgttatgtacggaattagtttctctaaatctaccatggattgtgtatttctacaacatctgtttggaatttgatgtacattctaactaggtggcaattggcaaataaagaagtttaaaatggccta

SEQ ID NO: 18432 - DNA, 105 bp, Zea Mays
gttgccctatcatttttcagtattattttgaatcaatcttatatgttttgtaaatggtgagattcgaactcgcaacctctctctcgcgcataccctcctatacca

SEQ ID NO: 18433 - DNA, 144 bp, Zea Mays
gtgaatcctggactgtggagggtgaggtgagggtccccgtctgcctgtctcgccgcgaactccaccacaacagctagccggccgagcgaccgtgctcttgctccctgcgacgctgcaccagcagcagtctgcgctgacgcctac

SEQ ID NO: 18434 - DNA, 2046 bp, Zea Mays
cggatctgatctaactacaaatgcttacatcttaggctacctctgtggggatcttctgtgaagcaagagaagttacctagcacacaactcaaagttcagtagattattgaggatcaacatttcagccatctgtatgttagttaatatgatggccgatggtaacatctggttagaaagatagaaactcattattgcgctacatatggtagtgcccattcgacataagaactaagctggacattggtagatccaagttattaatggcgcacacttcctgtgatggtgtacatcatgttataagtgtagcacatggggaaactgcatcaacatcaaccagtcatcaagatatgtgcagtgactcggatgaaccacatcaggaagataggctatcaacaagcacacaaaccctgtcatcagagtcttcgccatcaatatcaccaactgcttatagcaccagaaatttatcttttcctagaagagatagtatatatggtcatggaagaagtccatggaattctggtttatggatctcgtttgaaattgtcatgtacattgctcaggttgtagctgctattgtcatcctcatcttttcaagacatgaacatccccatgctcctttgttcgcatggataattggatatacacttggctgcattgctagtcttcctcttatttattggcggtatgttcatcgaaacagacatttggatcaagaacctcagcagccacctacaacatatcctactttgactccttctcagtcatcagaaggacgcaaccatcgtaccagtggtattgttttgcatcttggatgtatctcaatttcttgcccaaggcttagtgtgctggcttatcacttcaagacaggtgttgactgtttctttgctgtatggtttgttgttggcaatgtgtggatttttggtgggcgcagtatttcatcagatgctcaggacgctcccaatatgtacaggttgtgtttggcattccttgcgcttagttgtgttggatatgccattccttttataatgtgtgcagcaatatgctgctgctttccatgcttgatttctgttttgcgtcttcaagaagatttgggtcaaaatagaggagctactcaagagctaatagatgcattgccaacctacaaattcaaaccaaaacgtgtcaaaaactgggggattgaccatgcttcaagctcagagcatcttgatgagggtggcattcttggcccaggaactaagaaggaaagagttgtttcagctgaagatgctgtgtgctgcatctgtcttacgaagtatggagatgatgatgagcttcgtgagcttccttgcacacacttctttcatgttcaatgtgtagataaatggcttaagataaatgcggtgtgcccactctgcaaaacagagattgggggtgtggttcgatctttctttggcttgccatttggccgccgccgtgtcgataggatagcggcaagaggtgtagctagctcaagattcagtgtatagaacaatgctgtttttccgcataaagagctctgctctgttgcaatggtttgattgattgtcaaggaaagcgctgtgtgcatgacttgaagacaatgacacctggtgggagacctgatgcttgtaggggcaaatttctaagaaatgtaacggactgaaggtgctgctatactctgatgaacattttttttccaagtatgtaaataaggaacacgaagttcgcttgccaggtataatgcaactttgcaagcaacttcacaggtgctctagcatcggccttggtgttctttccttccttctggttctgtgattctcttcataacggcaatgcactgcatgcattgtaaggctgtcttcagtagcttactcattctagtttctatcatcatatattctattttaaacttcaccttgtaaacagtgtaatttataatataaaatagttatttataatataaaatggtgttttatgcgatcatatgcatgatttgttggagattgtctaaattgtgaaataaaaggcaatgacctatttatggaaccc

SEQ ID NO: 18435 - DNA, 1454 bp, Zea Mays
ccgaagtggcgccgctcacctccggccggctctcgcacagcagcgggcccctcaacggcggcggctccctctccgacagcccgccggtctcgccggagatcgatgacgccaagagcggccagcacgccgaaggcgcaggcataccgggcgggcaacaagacggtggggcggtggctcaaggaccggagggagaagaggaaagaggagacgcgggcgcacaacgcgcaggtccacgcggcggtgtccgtggcggcagtggcggcggcggtggccgccgtggccgcggccacggccacggcctcggcgtccggtggcaaggacgagcgcgccgcgcgcacggacatggccgtggcgtcggccgcgacgctggtggccgcgcagtgcgtggaggcggccgaggccatgggcgccgagcgggagcacctggaggccgccgtcgggtcggccgtgagcgtccggacgccgggggacatcgtcaccgtcaccgccgccgccgccaccgcgttgagaggcgccgcgacgctgaaggcgagggctctcaaggaggtgtggaacatcgcggcggtgatcccggtggagaagggcccgggcccggtcggcggaggaggaggaggccaccaccaccaacaccaccagaagcacggcgcgcccaagcagcagctgcaccgcaagatggatagcgacggcagcagcgtcagcgacctctcgctggaggaggagaacagcttccttggcatctgcagccaggagctgcttgctcgcggcaccgaactcctcaaacgcacccggaaaggcgctctgcactggaaggtcgtgtcggtgtacatcaaccggatgggcctggtgatgctgaagacgaagagccggcacgtggcagggacgatcacgaagaagaagaaaagtgtggtggtcgaggtgtgcagggacgtgccggcgtggcccgggcggcacctgctggaggacggcgggcaccggcggtacttcggcctgcgcacggcggagcggcgggtggtcgagttcgagtgccgcagccagcgggagtacgagatgtggaccaagggcgtggcgcggctcctgagcgtggccgccgagcggaagcgcctggcgtgacagattgcgtgcaggtgcagccccgtgccgcacaggaattatgtaggtaggtatgctagggcacgaccgcacgaggttggattggatttgtggcggtgtggttttttgtacgggctgggatgcgacgccggcgcgtggaacgccatgccatgcccttgtgggtgtgagaaggcgcttgctacgctgagctgagctctgaccttgttctggctctctctctttctctttcttgtaagttttgcgtctactctctctctctctctcgttgggccatactacactgtagctggcgaaagataaatgctttgttctggtggtagtagtaactctgtctttgaccggac

SEQ ID NO: 18436 - DNA, 2831 bp, Zea Mays
ctgccactcctgctcacctccgccgaccgccatatcctcctctacatccaccgccgctgccgtataggtcccgtcccctcgtcgccgcggctgcgctggtggggagcggagcggacggacggagatccgcccgcctcgggctccgctacgccggctgaaggttctccttgatgatgtcaaattatccgaacaagtcatggacctgatattctttctactttctattcttgctgaacagaaggagaataacaatgttggtgcttctccgcttgtgcatgcgtcacttgtagcaggtagtcttcatctgttgacaaattacttctcttcccagtggcatgaacttgtccatattctgcttgcacatccaaaggttgatatctttatggacgtggcctttgatagtttgcatgaagatgtgaggctgttaagtatcagattatcatcaatgggcttcggtttctttcctgttggttctttggaatctcgtcttgctcacttcatctgtcaacagtgtgaagcatcattgcaatttctcttgttgttgtgccagcaaaagctatttcgagatcggattttaaaaaataaggaactctctagaaacggaggcatactgtcactttctcacactatactgaagttagttgtccctgaatgtttgaagcaatcaaccgaccttgttgcttctatttccaggctcaaggcaaagatactttctattctgttgcaactttgtgaggctgaaagtgtctcttaccttgatgaagttgccactaatccaaataacatgcggctagggcaaaccttggctctagaggttctaaatttgctgaagatttcatttggaagaaaaataaacattacttctgattctcatgacaagggtaagatttaccccatgggatctgtgcttatcagtgcattgcgtcttgttgatgtcttctctgatgattcgaacttcagatcattctttttgaccaacactgttccatttttaatccagattctagctgctcctcacgatgaatttgtttcgagttggtgcgctgtcaacttaccaacaattgaggaagatgcaagtctagattatgatccttttggtgcatctgaggtggcactattagcttctgataatatgttgactgaagctaaagctaactattcttgcccttttcgccctagcgtgccttcaatggcatatgcacagacaagaacatcatgcgtagtgaaaataatagcaaatttgcatgtttttattccaaacatatgtgaagagcaagaaagggatctttttcttcagaactttcaaaagcacttggcgtctgggagtcctaaactatcagcagatctgccagcttctagtgattttaaggccactaaagtctgtagaaacttaggatttttgtctgattatgctaaaacattggttcctaatttgttaaatggggaagacttggtgttattaagtgattttgctgataagctacaatcttggtgtaaatcacaagttgcagtaaaggttgtacaaaatgatattccaccagaaagcatggatgccatgtgcccggtgcagcagctcttgccaacacggacaagcactccagcctccaaaatgaataaccttccaaaggatgcacagaacatggaagtgtctacaccagtacccccaataaatccggaaggaaatgatgaggacgagactccaaagaacactgtctctagaaatggtggtttcctgcagaatgcagttggccaagacctagtccatcttggcgttgcaagaacaacaagtggtggcccttcggctgtcgcttccggtgttagcactggacaccagcacaacagaatggatcttgatccagcatccagcagcgtggataatttcaaaacaccagaacttacaaaagaaaacggtctcgaggaggatgggaaaggagagagtagtatgtatgatgagaggcaacctaagagaaggaagcggacccttatgaataatgagcaaatagatgaattagagaaggctctagtagatgagcctgagatgcacaaaaatcctgttctattgcagagttggtcagagaagttaagtctgcagggcccagagatcacagcatcacaacttaaaaactggttgaacaaccggaaagctaagcttgctcgcattgcaaaagaaagggcggagaatgctgataaaccatctacttcccatcccggcgagtcttcagaaagtgccggggaggacaactatctaccccctgcaggtgtgatgactgttctatccaaaggtggtagcctgttgagcccggactgcactgagcaaacgtcgcaggcagagctatccccgaacacgacgatgatggtccgtccattcacgagatccttctcgttggaacccggccgcctcgtttcattagtcgacagcgatgggaaggaggttggcaggggcaagatcttccaagcgccagggaagagcacaacggagagccgcgtttgcgtggttgatgtcactgagctcaggaccgagaagtggagggagctcccccacccttcggaggcatttgggtggacgttccaggaggcggaggcgaggaatggtggcatcatcagggtctcttgggacgccgtcaggttgttccctgtagcgtagcaaggccgattgtataacaagatgagtagagggaaactgtggcctaagtaacattatgttaaaagctgtggttaactgtgttgtattcatgaactaattgttttgagcaattcaggtggttactgattttacatttttactactggtgttagtgtcacctgcaatgtgctgtgagaaaccaatgctg

SEQ ID NO: 18437 - DNA, 2128 bp, Zea Mays
gcttgtggatttgttggaagagaagaaagtgaatataccatctatcttgcaatctttgggttgtatagcccagatagcgatgccaatttttgaaacccgaaaagaagagataataagtttcataactaaaaaaattcttgagtgcaacgatgatatggttcgaaattcttctaataaatctgaatggggtgatagcacagagaattgtttgctaaagatttatggcatcaaaacattggtgaagagctatctaccttgcaaagatgctcatgcacagccaggaatagagaagttaattgatattctgaagaatattcttacttacggtgacgtatctccaaatatggtctcaagtgctgctgataaggcccatttgaggcttgccgcagcaaaagctgttctccgcttatcaaaacaatgggaccataaagtgcctgttgatgtattttatttgactttgaggatttcacaggatgattttcctcaggtgaggaaattatttctttgtaaagttctgcaatatatcaaggaaagggccttggatgcaaaatatgcctgcaccttcatgtttggtgttaacgattatcatgccccgccgtacgaagagttcaagtacaatctgactgaagtggttcagatatgccaacaagttaagatgcgccaactttcagtccaagcagatatggatttgttgacggcttacccagaatacataatttcctttttggttcatgccctcgctcatgatccttcatccccggaaattgaagaacatgaaaacgtcaatgcatttggtccaatttactggcgactatatctgattctttcaatcctcctgggggaagaaggtttgcaacatagtgtcccaggcatgaaaaaggacagcttcactacaataatatctatattcaaaagtataaaatcttcacaggatgtggttgatggaagtaagaccaagactgtgtgtgctatatgtgatcttggtactcttattgcaaagaggttatgccaagaccaaacgagtttatcagaagctcaaacagttccattgcctgctcaactttacacgccgcttcatgataaccaaaatgaaaattctgtggagaataatgagcagatttggctgggatgtgagaaagtactggcccattttgaggctgtaaggactgcaaatatggataaggttgaatctcccaaacataagatgcttattgatgtgactgatgaatttggaaatgaagttcctcttggcaaaattgtcaaacttcttaaatcacgaggagaaaggaagattggggaaaagcagaaggcaccatctagtagttcagtaaatgcagagaacgatgatgttctgggtttagtaagagaaattaacttaaacaatcaagaagatttggaggaatcgcataaggacaagtctgagaagcgtcatacaaatgcaaaagatagtaaccagaaaccacttgatttttcttcacctaaacgcaaaagatcaatttctaagagtagaccacattcagcaaaaggtagtaaaagcagtgatgagcgtctactacatactcctaactcagagaggaccaatatctccttggaaactaagatgaaggagaaagacagagatgattcaactgatacagaactgttagtatctccaagcactagaacccctgtatctaaacaaaataagggtgctaagaaatccaatattaatattttgagcagtgttccaaagaagtctgctgatgcagacagtactaagagaactgttgaaccgagaagtctaaatgggtcactcaaaaggcaaaagtcaaaaccaatttctggtttactaaagtgctcaacacaagactcaagcagtacagacttggtaggacaccgaataaaagtttggtggcctttggataagagattttatgaaggtgccgtgcaatcatacgattcatccaagaaaaaacatagggtgctatacgatgacggagatgttgaagtgcttaacttggctaaagagaagtggatactgattgaaagtaatgactcatcagtgaagaggcaaaagaaggatcatcttgggacaaacccaggaagagcactggagataactagcagcagcaagtctcctcctagcctg

SEQ ID NO: 18438 - DNA, 1474 bp, Zea Mays
gcagatttttgaagggtcaagccatgtaaacgtcagtcatgttatccacgagctctcatttggcccaaagtatccaggaattgacaacccactggatgatacttcaaggatacttcatgacacaagtggaaccttcaaatactatatcaaggttgttccgactgagtacaaatatctgtcaaagaaaatattgccaacaaatcagtattctgtcacggagtattttcttcccattcgcccaactgagagggcctggccagtcaccatcaaagaggaaagaaggaacttccttcattttataactcgcctttgtgcagttcttggtggcacatttgccatgacaggaatgcttgaccgatggatgtaccggcttgtcgagtcagtcaccaactcgaagaccagaagtgtactgcggtaactgcacaattcatgataggcggaaaacagctggtaccgtggctaagagcatctctaagagactttttatttttggctctctatttaactctctatttattttttcataaagattacattatatatatagcatctcactccaacagactatctatctagttttgctagtcaggtggctagtcaaatttggctagtgagagagctgatttggagagtcagatagcttagcgagttagataactagtctgttggaaagttattttattgttgagtagctaaaatttggcttgacgagtcatttaactagtctcttggaggtgctctaatgaagccaatagacggacctttgcccccaagctaacggatgaagccatgctgatttgcatgttttattttctccgtacatgactaactttatcatcagttatgttaaattgacacaaagtccacggactacagttttgtaaaacttgatgaggaatatgtatgcaaagaaagcgtgggtccagaatagttttctgtgaaaaatcaatacaaatgtagcttcagtgtgctctgtaatagcaacctgatgctttatttataggacgactttcgtcgcatgtgacatgtgttgcgagctgcattcgctcctgtcctcaggtagatgcatgccctgcgatgcttcaaggctgtccgggggagtagcagtatttgaggaaaggtcgatgaaatgaagtagtagcgaggaaagatgtcatgcttcaactgccaaggatcagaagagttcgtgagtcgttactgttgtgaagcacgtcgctgttgtagtgctgtatgatttatttctccgtcacgagtcatgattaacacaaacgaggtacagagactttttttaattcctctgaacattgatcattgtgatatagagcttctccatatatatagagagctattatatatatagtgctgtcaaggacgaacatttgtataaacgggactgggattagaatccctcatttcctctttttttattataaaaaatagagtttgtatttttttattttatgatatttcttgg

SEQ ID NO: 18439 - DNA, 2603 bp, Zea Mays
gatctggggtttcggcggcggcgagctgcgatgtgctgctggattgatggtttgctttgccaaggctttgatcccagatggggatctcgtcgggtgcagacttccaccagcagcccaccccacaggccgtgctgccgccacgcccccatggccgtgcgccgacgctgcagacgtctctctccctggctggttccgcctcgccggagcaggtcgggtcgcctccggacacacaggagccgctgtcgaactccgacgcggggcatgactccgccacagagagcgccagctcacgggagacttggcctggggagcccggcaagagtggtggcggcgacgctcctcccgtggcatcagcaccgataactgcactgaggatagctgataataaggagaaggaggtggttggtaatggcgtcgccgagctgcaggcctttcggagtaggatcccgagtgcaggccggatgactctcagggaggttgcttgggacagggtggacctcgttgctgagaagatgaagggtatgagcgatgagctgctggacgaaaccaaagccgagctgcagtcgattctggaagggactggcggtcagcaccagattcaggagttcatgtacctgcagaagcttcttcagggcagggttgatctcaccctgcccatccttttgatggctcaccatgtgcagctggagatcctggttgccatcaagactgggatacaggcgttcttgcacccgagcgtcgacataccccagatccgcctcgctgagattttcctgtacaagaggtgccgcaacattgcttgccagagtgctgtgcctgctgaggagtgcaagtgtaacatatgcagtaacaggaacgggttttgtaatctctgcatgtgcgtgatctgcaataagtttgattttgaggtcaatacgtgccgctgggttgggtgtgatatctgctcgcactggactcacacagactgtgcaattcgtgatggaaagattgggactgggcagacgattaagaacggcgttggccatgcagagatgcttttccggtgccaggcctgccagaggacatctgaactgtttggatgggttagggatgtctttcagcaatgtgcacccaattgggacagggatgccttgctgcgtgagcttgactatgtttgcaagatattccgtctaagtgaggactcaaaggggaggaaattgttcagaaaatgtgctgagctagttgaaagattgaggggtggttctgctgaatcaatgactcctagaattctgctacaagcgctgcaagagctggacattgattcctccaagaactttgagcaccaagagccagggcggctgatcactccccaggaggcctgcaaccggatcgctgaggtcgtccaggaagcagtgaggaagatggagatggtggccgaagagaaattgcggacgtacaaacgcgcccgcctcgctgtggaggcgtgcgacagggagctggaggagaaggcccgggaggcccaggagctgaaggtggagcggctgcggaagctgcagcaggcggaggagctggagagcatcatccggctgaagcaggcggagtcggagatgttccagctgaaggcgagcgaggcccaggaggaggccgagcggctgcggagcgtcgcgctggcgaagcggaagtcggaggcggcggggcaggactacgcgagcatgtacctcaagcggcgcctcgaggaggccgaggccgagaagcagtacatcttcgagaagatcaagctgcaggagaaccagcatgccacgagcagcagcggcgggggtgcccgcctcggcggcggagctccctccgccggggaaccctcgcaggcgatgatgctgtccaagatccaggacctgctgaagaacgtgcgcagcgtgccgtccggcaagccagatgggcagcgctccaagtagcagtagcgtcgtggggtgggctcggctgggcgggaactgccactccatcggcctgctggttgttactacttgttattagacgtagtagttgttaactagcagtgtagtaagtttacatgatatatatactgcatttttttggggggaacaaaatgttgattacctgcgcagcattgtcctaggtgtgtttagtagcgacttgttttcactgattatgtgatatgtatgaattgtatgtgcaggtgattcaagtgtaaccaaacagcgtagctgctgtacggataagtgctaaggctgtctgtagcggtaggggtactcttctcgtaaccgttctccctataaattcttctatatatccctctacacattaaatatatattttcacctaactaacataaccaacttatttttctattttctttttccttttcgacacgtccgccatgtcgccatgttggaatttattttttgttaagtaaaaaaatatttgtggtttataaattgtgcagaacatacaaacataatttaagttaaatttaattttggaaatccataacaaactttattattgtgcgtcgtctagatttttcttaaacatcgagacatgaatattgaaccaaacttccgttggaagcacacaacgaacagtcgtacgcagcaagccacggttgg

SEQ ID NO: 18440 - DNA, 2549 bp, Zea Mays
ctcctctgcacttcgcctcgccgctctcggtcccagtagccgcccgcaatgcagctctggtccgcgtcgcgccgtcgccatggctcagtcatgtgagtctcctacaggcacaggaggcgccatctctcacctctccgcagtcagcatcggcagtgccatggccgctcctcggtcctactagcaaagatcaggagctggggattgccctgccactctgctgaaagttttggagaagttgtggtgtttccctgcctattagagtctgcgcttctgtgttcctgatcaactgctactacgcgattgttgtcttctcaatctgtctggccaagcatggctggccagacgtcaaaggcaaaggaagcaggaaaagatgacagagaagaacccggagctgaggcggcgaaagagaagttagtgccgtctcaccagcagcaagagtctccagcttctgtggtggacaaggattcttcaggtgtgtcttcagttcctggtgatgagtcaccggtcctagaaggggattctgttgagttgaaagtggaggaaaacttggatggtaatgggaataaggaaaataaaacgtcccagaagagcagtacaagtgatggctttgcttctgctaaagtgagtgatgggacaagtagtttgaggaagaccagtggtagtgtggccatgagtactcgggctgatttcactgagagtgggaagagcagcatgtgccgtgcgagcaccgccagtgacattagcgatgagagctcctgcagcagcatgagcagtgccaccacgaagccacacaaggggaatgattcaaggtgggaggctatccatgtggtgaagtccagggataaagttcttggactgaatcatttcaggctgcttaagaagttgggctctggtgatataggaagtgtgtacctatctgaattgagtggtacacggagttactttgccatgaaggttatggataagacttctttggcaagtcggaagaagctgcttcgagctcagaccgagcgggagatcctgcagtccctggaccatccatttctaccaaccctgtatactcactttgagacagataagttttcatgcttggttatggaattctgccctggaggggaccttcacactcttcgccaaaggcagcctggaaaatatttttcagagcaagcagcaaagttctacgtagctgaggtgctccttgcattggaatacctgcatatgcttgggattatataccgtgatctcaaaccagaaaatgtcctcgttcgggaagatggccacatcatgctgtcggacttcgatctatctcttcgctgttcagtgagcctaacggtgatcaagtccgcaaatcctggcctagatgcattgcagaggaacaatgcagcgtactgtgcccagcctgcttgcatcgaaccatcctgcattcagccctcctgtgtagctccaaccacttgctttggcccccggttcttctccaaatccaagtccaagtctaagtccaagcccaagaaggagaagtcgaagcctgatggtccaaaccaagagaacctcttcccggagctgattgctgagccaactgatgctcgctcgatgtcctttgttggcactcatgagtacttggccccagaaataataaaaggggagggccatggaagtgctgtggattggtggacctttggcatattcttgtacgagctgttgttcggcaagacccctttcaaaggttccggcaaccgggctacactcttcaacgtcgtgggccagcccttgaggttcccggagtccccgatagtgagcttctctgcgagggacatgataaggggattgctcgtcaaggacccgcagcaccggctcgggtacaagcgtggtgctaccgagataaagcagcaccctttcttcgagggcgtgaactgggctctcataaggtgcgcgagccctccggacataccaaagcccctcgagctcgagtgtcgcccaaagcaagtgccatcagcaaacggaaaggtcgcgccggtcgctaaccaaaagggcccagataattatctagagttcgaattcttctagttttttgttttgtttttgtttttgtgatttctgaactgcaagagtgcgtctgggctgatgctgtgaaagaaagtgaaagatgataacctactctaggcatgcgcttcgctggatttttttcttcttctgccattagactgtactacgctcgtttcaggatatccgagttatttttttttctctgttgaactgcttaactctaaggtgtactcaatccatcatgtatgttgcaattttcagaacctgcctatggtacttgaaatgtatttcagggctgtgttattgctattgtaactttgtaattgatgcctcctcttagaacatgtcttcctctacactacaaacgctgatatctgaacatggcattgctacttatctttattttattccattttagtctctaaatagctaaataccgaaacaaaaagtctaaaatagagttttaattttcatatttataaactaaaatagaataaaatagaggg

SEQ ID NO: 18441 - DNA, 1327 bp, Zea Mays
tcgacgcagcctctctgcaaaagaggcagggccacaaaggaagggtcaaagagggggttgagaaatcaagagacaggtcaaggagccgtagtccaaggccaaggcacagagacagagatgatagaaggcgaagtcgcagcaggagcaggagcagagaaaggcatgtccatgatagagatagggactatcgtcgtcggagcagaagtagaagccgaagtatgagttcaagccctgaccacaaaagtcatcgtagagcaagagatgatgttaagcgcaagagcagaagcaagagtagaagcaggagcaggagtagaagccgctcataccacagttcttcacctgcccggcgcagtgctagtcctcccaagagcccaccgccacagaggagccccactcctgaaaagcatgccaatggaaaagattcacctctgtcacgcagtgtatctccatcaccgaagcgtgcaagctcccgcagcccaggcagcgatagcaaggaataaagcttgttgatctggtgatgcttaaagagcagtcttcccatgggattgcagaacgttgagaaggctgtttgaacatgatggcagtagcaatctgcaatcaaccgctatccaagttatctgttcgtgagaggggttgctgtttaccggtagaatggtattgctcgggaccgactatggtggatgatgtcttgctgttagtctttgtcattggtgttgatatggggatgacacagctgatgatgtgacggtgctgatattgtatcgatattgatgctgatgctgcttacagtgaccatcttgatgcagtctatatttttgttcaagaggttctgaatcaaatcatgaaattccagatggatctcatgattgttctagttggaacaaggtgcagactggcagagatgctgaggggtgtgtgtactcatagtaacaatggtactcgtcgtcgtcgtaatatggctaataatctctacgggaatggaggtatcagttatgattagcgtgggtcctgttgatcatgtggtggtgaaccaatttattttggtccttctctatcatattgttttattattctgctagtgttgagtgactcgaatcagatgctctagatttattcattctcctaagcaccagtaatgaaatccatgaagacaatgcctctgtaccaaggctcaatattaacatgtcatctctgtctggaaatgtatttgtgaaatatggtttgtacggtacctgcccatttcgtttgtagtagagcacttgactataatatcagtacgtttaagatgtttggtgtgttaatgaaggtatgcaatagatgattaact

SEQ ID NO: 18442 - DNA, 353 bp, Zea Mays
gtctctctcaccccaaggagagtcgcagcgacccagccttctccctccctctctctcctctctctctcttcttgcgccgcttttccttcgctgctccgcgcggctccggcgggcggtgcgggaggaagaggagggggcggaggggccggaagttttccggccgaggagcccagcgggaggatcgaagaggaggcactggtccggggctgtccactgcatcgggttcttcgaagttggggggaccacgggactcgaagggagcgcccgatctgctccgccggcgaggtgaatgtgataaatgggttacattcaaaactcaagttacatccacaccaagaaaaaaaaatctgaag

SEQ ID NO: 18443 - DNA, 3448 bp, Zea Mays
ttgtttggtttgaagccggccaaagttgcctggcctggcacagatctcaggcgttggactttgagtgcttgggctaggattccttgccaaacagacctgagtgcatgacagcgacagccttctgggctcactcgcacggtcgcacccgaaacgccgcaaatccgggcccgcagcccgacccaactcaactcaggcagacactcgccgccgccacgacgtcactagtagagccgtagagggcaagaggcgacggaatgacggagcggcaggtggcggagctgggtcccgggacggcgtgctgcggctggaaccactgtggccgccgcctcgccgctggcgccgtcgatggctccgtctccgtctatgactcccagccgccaccctcgttcaagtggcaggcccatgagcaagccattgtgaatgtcgtctggcttcctccagagtatggggatgctatagcttgtgtttgtgctgatgggacactgtctttgtgggaggaggttgctgctgatgatcaacttccaacctggagaaattgtaaaatcttcgaggatggcaactctcatatactaaatgtacattttggattacatctgggaattctgaaaatggttactgcatactcagatggccaagtcaaggtctacgagctcttggattcattggaattagacaagtggcagcttcaggcagagttccaaaacattactgatccaatctctagatttggaaaacctgcatgcacttctgcatccatagcatggaatccaagaagaggtggaagccaacaagctagttttgcaattggctttaattcagattcgcctcatttcaactcttgtaagatttgggagtttgaagaagctcatcagcgctggcttccacttgttgagctaggttcacctgaggatacaggagataaagtgtgtgctgtagcatgggctcctaacattggcagaccatatgagattatcgcagttgcaacctgcaaaggaattgcaatctggcatataggtttgaacgctgatgctgatggcggaccttcgacgcagaacgttgctttacttaatggccacgatggcgaggtgtggcaactggaatgggacatgggcggtatgacactcgcatcaaccggaggagatggcatggttaagctatggcaggctaatttggatggagtttggcatgagcaggctgttcttgactgcagtggatcacatgtctagggtctacgtgtttcagaaaacattttttttttgttcccagcactagaagttgctgctcttgctgcagaattatcaagtacttctttcgcttatccgcccaactattgctgtctcctgtgtggctggttgggcgctatcaaaactgggccattaacggccgtgggaccgcattgaaaagtccagaaaacgaaggtacatttgcttgtaaccttgtaattggggaagctacacagacgttgagtctaagctagtggacggaggtcgagatcaaccacgtgatgtacacgtgcaagccgttgtcacggagtatcatggcaggaagcatctggaacacatgtattttctgctttcggatttgttcataagatcgctacctttgagaaagcatctggttatcaggctttgattcagttttctgatgctgaaactgcaacatctgcaaaagctgcactggatggtagatgcattcctagctatttgctaccagaactggatgtggcctgcactttgagaataacctattcagcacacagtgttctcaacgtcaagtatcagagccacaggagtaggtaaggtttactcagttgtcaagcgagattttttattctacatcctgtttgatggatggattctgcgagttttacccattgaattgtttcattttgcatggaaaagtatttttgtctgtcagatcattactttataaatctgggtggtttgtaatattcaaggaatcatatgactcttgattatcctttgctgttttctttagggacttcactaatccttaccttccttttctggactctgctaaagatggctctggaccggatggaaaaaaacaggaagcagagagcaatatactgcttgcttctattgagaacatgcaatatgttgttacaatagatgtgcttcatgaggtcttttcagcttttggatttgtacagaagattgctatttttgagaagaatggctttcaagcattgatccagtatccagacattcaaactgcgtatgcagcaaaagaagcactagaagggcacagcatctatgaaggtggctactgcaaactgcacctcacattttcacgccatactgagcttaatgttaaggttaacaatgagcgaggtagagattataccaaggggaatgccactccaagcagtgatcaaccttccattcttggtcctcagccaataccaagcgttggtgctgctattccaccagcacagggtagtgttccttctgcagccaccaattcagtaatgccaccaggggatccatcagttgctctaccttctaatccttccagtgagccactcctgcaagcacctgttgtttcctctggagggcctccgcattaccctaatcaggccatcctacaaggcccacttggtgttgttgcacggttcccaggctatggtgccctgcagtttgctcagggctcagctcaagctcaaatggtgcagccttcaggccaaggaagtcaacatatgtcaggtcatgtaaattatcagctacctccaggttcagcccaattcatgcagtatctcagcaacggaagccatccacttccaaacgcacctgggccacagacaatgccttaccctgccctcagtgggcagcagctacctccgggtcttcagatgatgcaagctcaaggttttggaggcctgccgttttcacagggtcctggacaaccaatgccacagttcccaatgtatggcacccagcagtttcctccgggtatggagcccaagatgatgcgcttctctgagcagggaggccagcagtttacatttgcgccgcggggtccaaatagtcgttagcaaatttgaacttagcaacgttagatcgttgatggtgatgaatggatgtcaagccttctatgttgctgttttctaaggtgaataccgatgctgttccattactaggatctatacttggtttatctctcgtactgtggccaaaacaaatgtctaatctgaggtttcgtagccttgtatttgtatcgatttcctcacgcccgcagcttctgcctgcactgtgttacattacggttatactgcagtagtggaagcaaatgtaaaagaaacctagagacctgatgtgccaggttgaaagcccgtagctgcaaactgtaggctcacatcgcgtccagttataaatttgtttgtgctatgttaagagtacaattgtacaaaccaaggtttaggagaacc

SEQ ID NO: 18444 - DNA, 893 bp, Zea Mays
caactgtataatgggattaggaagagctccagacaagcggcaagatgcttagggagaacgtgctgcgcgtgacgatcgaggtgccggacgccggcgaggtgaacttccactgcacgcacctggaccacctggacgaggggtggaggatgaagcaggtggacgccatcatgcgctccggcggcgacggcccgcacatcctcgccggcggcctcaacgcgctcgacggcaccgactactccgccgaccgatgggccgacatcgtcaagtactacgaggagatcggcaagccgacgcccaaggtggaggtgatgcagtacctcaaggcgaagcagtacgtcgacgccaaggacttcgcgggagaatgcgaggcggtggtggtcgtggccaaagggcaagacgtgcaggggacgtgcaagtacggcacgagggtggactacatcatggcgtcgcccaactgcccctacaagttcgtgcccggatcctacacggtcgtctcctccaaagggacgtcggaccatcacgtcgtccgggtcgacgtcgccgtacctcacgccagagagcccgatgacgccgaggccaccgcgaacgggcagcgcagcagagtggtcaagatgaccaagaagagctcgagaaaggggatatggggagctaaatgaatgaacagggtagttttgtgtgtgtgtgtgtttttttctctcaaagtttcttttggccgcgttctttctttttttatctgggggtgatgtggagggtgggttgcttggaattgtgtatatgcctgtggtggttgctttgaggccgaaggtgcctggtttgcagtggctgctgcgatagatgtggccaacgagtggaaactggaaagcaacgtatttttggcccggtttcacttttac

SEQ ID NO: 18445 - DNA, 1038 bp, Zea Mays
gtaagcagttgcaaaaacagtggaacttattaaagcaaaaggaggaacagtcacaagggagccaggccctgtcaaaggtgggaaatcagtaattgcctttattgaggatcctgatggttacaagtttgagcttatagaaagagggcctactcccgagcctttgtgccaggtaatgcttcgagtgggagatcttgatcgtgctataaatttctatgagaaggcatttggcatggaacttcttcgcaagcgagacaattctgagtacaagtatacgattgcgatgatgggatatggtccagaagacaaaaatgctgtattggagttgacctacaactatggggtgaaggaatatgataagggaaatgcttatgcacagattgctattagtactgatgatgtctacaaaactgcggaagcaattagagtaaatggtggacaaattactcgtgaacctggcccattacctggcatcaccaccaagataactgcatgcacagatccagatggctggaaaacagtgtttgtcgataacatagattttctgaaggagttggaagaatgagctttgctagagatctcaacttggtacatcaagctccatacggttgcaccccgtgagttccatgcatgacctgcaaaatctttgtaaagccacagcctcaaactgaggattgtagataggtcgtccaatctacggcatcatcgcaattgatagttgatagagcattagattttccttgcagatctatatagatgcgcaaccgtttttgtattatgcattttaatgcataagttcaatggaaatgattcatgggtaagaaaatcgtcttctttcaagcggcaatataagggctggtttggtgacttgaatagcaagtgatttatttttccatgaattctctccaatttcattgtcaacaaaccacaaaccagctctgaagtattagagctaccataggctcttagggctagtttagaaatcttacgctcttagggctagtttagatttctatagattaatcctacaggagatttatt

SEQ ID NO: 18446 - DNA, 944 bp, Zea Mays
gcaaaagcgaatggaatcctcgggtccgtccggccacgcaagcggcggcaccaccattcatctacgaatccatgggaggagattggagtggggccagctaacggatcggagtcggagtccttcttgtgcttctcctgctctgctggtgccgctgccatgggtttccccagcacccccaacctgaagctggagcctcgccctcgcacgcggaggctcctgcgctgcgccctcagctctgagcctgtgcctcccatgactgtttccatcactggagccacaggtttcattggacgcagattggttcacaagcttctatcggatgatcacaaggtttgcatcttaacaaggtctgcctccaaggctgcgtcagtttttcctgcttccacctatcctggactcacaatagcccagcaaggggattgggaggcatgcgtcagaggctccactgctgttgtcaacctggcaggcatgcccataagcactagatggtcacccgagattaagcaggaaatcaaacagagccgggtcaatgttacatcaaaggtggtgaagtacatcaaccatgctggaaacgctgatactcgaccctcagtgtttgtgagcgcaacagccattggctattatggtaccagcgaaatccatagctttgatgaatcaagtccctcgggcaatgactacctagctgaggtgtgcagagaatgggaggccacggcatgccaagtaaaccaggaggatgttaggcttgtacttctccggattggggttgttcttggcaaggacggcggtgctctagcaaagatgatacccctttttatgatgtttgctggtggtcctctggggacgggacgccaatggttttcttggattcatctggatgacctagtcaacctcatctatgaatctctaacgaaccctacatacaaaggtgaactcacacattctct

SEQ ID NO: 18447 - DNA, 440 bp, Zea Mays
cctccgatcagaaatcaacggtgcgtctctgctcttgtccggaaggttctcgcaggcgcggcgacctcggttttgaacacctgctcttcttcctccttccaatccaagcttcgtacgggacgaggagaaccgaagaaggaattggacgcgaggagactcgagtactcgacagggaaaagtcgaggcctcggatccatcgactcgtgaagatgtcctcgcccgccgagtactacaaatcacttccacctataagcaaggcatatgggacattgtgtttcttcaccactgtgctagttcggctccatatcctgaatccgctgtttctgtacttatattaccctcgggtgttcaagaagtttgaggtatggaggatatttacaagtttcttcttcctgggaccattttccataaactttggtattcgccttctgatgatgttg

SEQ ID NO: 18448 - DNA, 344 bp, Zea Mays
gtcgtcagctcccatggcggagccatggccggcgaaggccatcccgcgccccggaccgtcccgaggatcaccggtgatcgaaaaggaaggtagtaccaaaggtcccgatgccagtaacactacccaccccgcacggcggcaccatgtctctggcgtgcgattacctgggctccggatgacaaccccgcacaggaagccctcgcccatgtttgggattcccatgcgccctgctcgaacctgtcgttccgcccggagcggcgtcgcctatgagttgccccgtgcggcggtggcgatgtcctttgactcaatccctcactgtctgagcggatggtgctcggttccaa

SEQ ID NO: 18449 - DNA, 473 bp, Zea Mays
tcggctgtgcgcccgcgcgagggccgcgctcatgtgccgggccgccggcctacgccgtgccgctggggtcgctccggtgcccaccggccgagcctgcgtgcctgccggtgaagcttgggcttggggccgtgcgccgccgccggggaaggagccggagcaacgccgtgggggccgcgacgacgacgagtctggccacacgctgacgccacgcctggccgaagcgcatcaacgtgaggtcgcgccgtcatggccttgggcgccgccgccaggaagaaatgacgatcggttagggttccaaccctaacagtttgttcatatggactcccataaataggcctcatagaccaccttggtttggctgggcagattaggcaaatgttttatcattttaattgctatttttttgcaattatagaccatgtgtctatttgtatcacaatttgtcggggaccataattaggggtaccctcaag

SEQ ID NO: 18450 - DNA, 2318 bp, Zea Mays
atgctaattttccgatgtacaacttatagcacactcttctacctgcacctctataacataaatatactatataactaactctctcatatgatttaggataatatacaaatatattatatgtataaatatataaacttaattagttttgtctaaattataattattaaaatggaattcaattccaacgaaacaaacgggcccttaggtttatacaatcacatttttcttccatctgaaatgacaatattaccagcaagcttaggagcctccacatgcatcctcagttctgatatcttgcatgatgagaaagttatatagatcaggtgcgtttgtttctcttattttactaccctgtcccctctgatctagaccaatgatttgacaccatactttttaatgagatccgaatgcgtggctgctatagcatgtgcttatcaattgtgcttattctttattaaactatttttcatatcagctgttgttttgaagccctcctttcactgagagcatttagtgtcagtaagcaatccatgaatgcataatttctgctccagtatttgtgttttaactaagttagattctggtttagatgcctatatgacactacattcttgttaagttgatcatttaattagtttggtacctccagcaaatactgtaaatatgtttatggaatatgttaaatacttctgtatgtttgcttgccttatattttgtattttttctgtatagggctttgtaaacctgtcatcctttggataggagtgcatgaaaatctgcaatccatgtgtctgaatcatgacctgctattacttttactttatcttcctaagcattaaccttgcttctttgtatccccttaactggtggcttgataacactttgtattatgcattaaccttgcttctttgtatccccttaattagtggctcttggtaatgctttgtacacctgcattacattatagtcaagtattatgtttcataccttgcagtctgcactaacttgtaaaatagttcagataattggcacaagaacgaaactggcttatgcccttgcaaagcaatggtttggaatatacacaagtgcagaggagtccagtgacggctaactgctcagtatgtgaatctgatgttagtggtgcaactgctttgagctctactgctgcttcaagtgatttatatggaactcaagcaatcggttcatatgggaaagttcgttcattgaaagctgtagctgttttcaaatgttggagaagcagatgggaccagactcatttcggaagattttgcaggtgatagtggctccaagtcgtgcataaaatctaggcatgagcttcctagcctctcttctcaagcaaattgatcggttcttgcaatttgacaactttatgcctggttataatggggtcttgactgtcagctgcattcgtacccttgtacgaatagcaaagaaggtgccatcttttgtatgccttgatcacatttttgaattggttgcccctttccgcaacatggacaaaccatggaaagttcgaattgaagctagcaggattcttattgatcttgagttacaccataaaggactcgatgcagctcttttgttgttcttgaaatatgtggacgaagaaaagtctttgcgaggttggattgctagagtactttttgatggttttgtatgctttgctatcttttgacatggaagctgttgaaggagcgacaaagttggctgttcatgtcttgcgtatatgtcaaacaagtattgttcctcacgccaatgatcaaataaattttggcaactctagttaggggtggtaacgggccatttaatttagcctagcaaatttacggatcgaatcaagttagggccggatcataaaacaatacaattttgaactaacaaaattaagggctttgttggtttgtgaagcaagtattagggtcatgatccattaccacccctaactctagttggtcttcttcatctgcttgctggcacaaaggcatacaataacatatttcttcgtcatcaagtgttctgcatattgcaagttgctgctggaaggttagtgagtttgttattgcatatgtattcattattttgtttcgttgattacttgttattgcattgacatctgtactacataaagcaccagttttcacggttcaaatttccaccgtcgtcgtgctctcccgcatttaaatggtaaaaacgctatttttttcacaaatggggattcaaaccatgattgttggctctaaacccacttaggcaacaatgttttattttatactctatacttaagcgtaaatggaaac

SEQ ID NO: 18451 - DNA, 852 bp, Zea Mays
catgtcatagtcatgagctactcagtacataaataaattccaggcactggaccttgggtctctgttaaagactatgctgcaaaagttgtctaagcagcttaatgacccaccattcaattttatggtccacagcgcaccatttaagatttcatcatcctgcctgccttatacacactggttcctccagattgtgccccagttaagtgtagtaggcggatttgagcttggaagtgggtgctacatcaacccagttttccctgaggatgccgcaaagattctcagggaacttgactgctcagtctagtggtggtcgacgtctaaccttttaactagataggaacgagggatgtgttcctctgtacttttctgggaagcaaaaataccatgctaataatacaagcagacagctaacttgattatgtaacatcaggccctgctttggcgagggtgatctgctggggtatctttcttgcccttgcttcaaacaggaagcatgccaagttgggctttctttcttggccctgagattgatgttgcctgtctgtacagttgtttgatatctttttatctgatgatttggtttatgatatgatctaaatgttttctggttgttaacgtaaattggttacgtgcaatatatattagtattaactcctgatgtactcgtcgttggatgattgcctggaaatacttgcaagtacatagattcatgccgattgatgcacaaaatacaaagtttgagttctttgaagtccgcctgccagattttgagtaaaaaatggtgaaccaggaagaattgatgcgttttcttttcttgacaagtcattaaactgtttgaacctgaaaaaagaa

SEQ ID NO: 18452 - DNA, 2783 bp, Zea Mays
cccgccccgccacccttccaaccgctccctccccttcctccgtctccacgtcgatcgcgcccccccagaggccagaccgtgcgtcgcgcgccaaggggaagatgctgagctcgtcggcgtcgaggcgggaggccgcggcggcgcgggcaaccaagaacggcgagctccccaagtcggccgctgccgtcgcctggaaggacgtcgcggccaccgccaggagcggcgagctgtccaaggcggtgactggcgccgagctctccaaggcggtggccgccgtcagggacgccgcggccgtgcaacacgaggggtggatggtgcgctacggccgccggaagatcggcaggtccttcttccacacgcgctacttcgtgctcgagagcaggctgctcgcctactacaagaagaagcccaaagacaacatggtgcccctcaagtcactgctgatagatgggaattgcagggtggaggatagggggctaaaaaatcatcatgggcaaatgatttatgttctctgcgtttataaccagaaagagaaggagcatcaaatcacgatgggtgcacatgatatcgaagatgcattggcctggaaaaagaaaatagagctcctcattgatcagcaaccagactctgcagttaaaacccataagtcgttcgctacaatagactttgacatggaccttggagggcagttctccttgtcagatcatgacagtgcagctgaagatgaagaggaacgacctactttagttcgcaggacaactatagggaatggtcctcccgattcaatacatgattggaccaaagatgctgattttggtatgtccggtcagaatgagcccactcaactctattctaagaagaattggcgactacttcgatgccaaaatgggttgcgcatttatgaagaacttctggaagttgaataccttgcaagaagctgtagccgagctatgagggctgttggagtagtggaagccacatgtgaagccatttttgggctgatgatgagcatggatgcaacaagatatgagtgggactgtagctttcgccagggtagtttagttgaagaggttgatggtcacactgcagtactatatcataggttgcaattgcattggtgtccaaggttgatctggcctagggatctgtgttacgttcgatattggcgacgtaatgatgatggaagctatgttgtgctatttcggtctacagaacatccaaactgcatccgtcagcgaggatttgtgagagcttttattgaaagtggagggttcaagatttgtcctcttaagtgtcgcaatggaagaccccggactcaggttcagcaccttatgcagattgatctgaagggatggttcttgaactactctacttcctttcagtatcattctttgctgcagatactgaactgtgttgccgatgatattcatataactccaaggattcctgcaatggagagcatggctgatgtgaatttagcacaaaaggacgagaagcttaaagaagttgactccaaaactaaaccagaagatcaacaacaagcagaaaataaaaatatgggaacaattgatgaagaatcagatgacgatgaggactatcatgttcctgaagctgatatagaggaaatcactaacaaatctgacaatgaagctaaacacacagatgagcctccagaaaaaattgatttatcttgcttttctgggatacttcatcatgatccggatgagaaaagccgcaactgttggacagtacctgatagcaagcttttcaagttcgtagcaagaatttcccaaatgacaaatcgaagatacctgctgcaagttatctcatggagcttgcagccattgattggtttaaggacaccaagcgtatggataatgttggcaggcagaaaaattgtgttgctcaggttgctgctgagaaagggatgcatacattcattgtcaacttacagcgcttctttgatggcgatgatgacttccgtaacagcaggctgaagctcataccatcggttccaaagggctcatggatagtgcgacagagtgttggcagcaccccttgtttgttggggaaggctgtggattgtaactattttcgaagtcctgggtatttggaggtggacgtcgacattggttcttctgcagtagcaaacggagttttgggcttggtgtttggtgttgtcacaacattagtagttgatatggctttcctaatacaggcaaacacatatgaggagctcccagagcaagttataggcgcagctcgtctatctaacgtggaaccgtctacagcagtagttcctgaccttgaaaataacagcgacggcaacaaagataacagcagtaacgacgctacgtcctctgaggatgattcgtcaaagaagaccaactgattctacctttctttaaagatttcgaaagaccaactgattcaacctttatttgaagatttcgatgagagccgcaggtgtctagttcattttttctccttttaacttctgtgctgtgcacgtatcttcgcgggcttgcaccagattgcagtctggtacatctcctttggcgccttcaattgagtccagaatttcacatgatctcctgtatccttctccattacagtccgctcttgccttatccatgtacatgctgctaccagacttggtgtagatagtactatgtgatgaacacgttcaactcagtaactgatcatctgagttgtagtgcttgctttgtgtgggtaaccaacacatgatggtggtgtgcttagcttaatgcgtagatatcaac

SEQ ID NO: 18453 - DNA, 1747 bp, Zea Mays
taaatgactgtagtctgtaccaaatggtggtacaattattttcatgcgtggacaagataagctctgtagaatgggcaccagattcagaatacattttatgtggactttacaagcgacccatggtgcaagcttggtcactgagtcaacctgattggacctgcaagattgatgaaggtccagcagggattgcatatgctcgctggagtcctgacagtcgtcatatattaactacatctgagtttcagctccgtctcactgtgtggtctctcgtaaatacagcatgcgtacatgtccagtggccaaaacatggttctaaaggtgtttctttcaccaaagacgggaaatttgctgcaatctgtaccagacgtgattgcaaggattacattaatttactatcatgtcactcttgggaaataatgactgtctttgctattgacacggtagacttagctggtgttgaatggtcaccatatgatagtgctattgttgtttgggattcacttcttgaatataaggttctgatatattcgccagacggaaggtgcttgttcaagtatctagcttatgaaagtgggttgggtgtgaaaactgttgcttggtcaccatgtggacagtttttagcagtgggcagctatgatcaagcagtacggactttgaatcacttgacgtggaaaacttttgcggagttctcacatgcagggtatattcgtagtccttgcaatgctgctatatataaggaagtggatgacccatggcaacttgatatgtcagaattatgtctaagtgaaggcctctctcgaaacatgccagacaatggtgcagattattgttctgtatcatttgatagaatgattgatagagaaacccatgaaggacaaccctggcacaatgaaaatggcaccgagggaggaggctctagagttaaatatgctgtgatggatgttcccatcaccttaccttcgttgaaaccagcttttgacaagcctaaccccaaacaaggcattggtatgctgtcatggagcagcgacagccactatttcttcaccaggaatgacaacatgccaactgttctctggatatgggatatatgccgccttgagcttgccgctgtgctcgtgcagaaagatccaatccgtgctgcagcatgggaccctacctgcacacgccttgttttatgcacagagagccctcacttgtacatgtggacgccatccggtgcctgctgtgtcaacatcccctttctgaacttccgaatcgttgatttgaagtggagctcgaatgggagctgtctcctcctgaaggagcgcgaatctttctgctgtgccacaatcatatctgccctgcctgaggaagaacctgatcattctgatgatacttctgaagatgaatgagtggcctcatggtatgtctagcagcttatgcgaatggaactgggaactaacagtacaaatgatcttgtgatggtgaatgagtgacactgactgactacttagctacttgtagaatccagagtggattgcgataccatgaatcgataaggtcatttcgctgcttagatggcaaatgctctatcaccaggcactacagaatggacagagaactgtgtggttctatttgttgtattcttgctcttgtttgtctgttgtagtttctccaaggttgtactgcttgaccttacttgttggatcttaatcttacatatccagtcaccagggtattttcaatctgggagtacatacttaggccg

SEQ ID NO: 18454 - DNA, 1050 bp, Zea Mays
agagaaaggtgtcaagatttttctgactcgatcggttttggaaaactttggcgtctgcaaggtgatagcatctgggcaccaggatttcaaggttggcgatcttgtgtgggggatgaccggatgggaggagtacactctcatccataacccggagtcatttttcaagatcaagcatcctgaattgcctctgtcctactacacaggcgttcttggcatgccgggccttactgcttgggctggatttttcgatgtgggcaagcccaagaaaggcgactatgtcttcgtctcagcagcatcaggagccgttggtcagcttgttgggcagtttgctaagctcacaggatgttatgttgtcggcagtgctggttctgacgagaaggttaatcttctgaaaacaaagtttggcttcgatgaagcattcaactacaagaaagagcaggacctcgatgccgccttgaggaggtacttcccagagggcattgacatctacttcgagaacgtgggtggcagcacactggaagccgtgcttcccaacatgcgtatccatggtcggatccctacctgcggaatgatctcgcagtacaatctggaggagccagagggtgtgcacaacctatttgaaatcatcactaagcgcctgcgcatggagggtttcatggtcttcgactactacggccagtaccacaagttcgagcaagagatggtcgggtacctcaaggcggggaagatagcctacgtcgaggacattgctgaggggctagagaaggcgccggaggcactcatcgggctcttcaccgggcgcaacgtcggcaagcaactggtcgccattgcgcgggaatgaatgctgggcatccatattatatctacgttgagaataatgtcagcatgcgtgttcagacgtgttaggaattgatggtttgtagtgcttgcagttttgtgctgttcgtgtgaaatgtttcgattttctgccgtttgttttctgggcgatatgcgtgtgaaaactcaggacacgcgcttcttctgaggagaaatagacaagcagttttgctg

SEQ ID NO: 18455 - DNA, 369 bp, Zea Mays
atttattttgtggtcatgcaggagctgctggctattcagcagcaaggacctcgtgcaataggtttctttggaacccgcaacatgggatttatgcatcaacagcttattgagatcctcagctatgctatggtcataacaaaaaatcatatatttacatctggtgcttctggaacaaatgcagctgttatcaggggtgctctaagagctgaaaaaccagagctgcttactgtaattttacctcaaagcctaaagaagcagcctcctgaaagccaagaactgttgtctaaagtacaaaacttgatcgagaaaccacagcatgatcatttgccactaattgaggctagcagtggcaactgttgcaatcttcag

SEQ ID NO: 18456 - DNA, 4043 bp, Zea Mays
cgcccataaacaaattccccagcgtctcctctcctctcctctccttccccggcaccgtgctctgttgtgctgtttggttccgtcgcgtcgcgtcccgtgctcagatcagatctctcctctcccccgaccccgagtggagtgcctccctccccccctcccgctccagactagcggagagagatctcggcaccgccgttcgtcgccatggcggcggccaacgctcccatcgccatgcgcgaggcgctcacgctcaccagcctgggcatcgcgccgcagttcgtcaccttcacccacgtcaccatggagtcggagaagtacatctgcgtccgcgagacctccccgcaaaacagtgtcgtcatcatcgacatggccatgcccatgcagccgctccgacggcccatcaccgccgactccgccctcatgaaccccaacaccaggatcctcgccctgaaagcccaaatacctggaacaacacaggatcaccttcaaatatttaacattgaggctaagactaagatcaagtctcaccagatgccggagcaggtcgtattctggaaatggatcactcccaaactgttgggtttggtgacacaaacatcagtttaccactggtcgattgaaggtgattctgagcccaccaagatgtttgataggacggctaatctggcaaacaatcagatcatcaactatcgatgtgacccagcggagaagtggcttgtacttattggaattgcacctggagccccagagaggccacaactggtgaagggaaatatgcaacttttctctgttgatcaacaacgtagccaggcacttgaagcccatgcagcgtcttttgcaacatttaaggttgttggtaatgagaatccatcaacccttatttgtttcgcctcaaagacaactaatgctggacagatcacttcaaagttgcatgttattgaactgggtgcacagccagggaaacctggtttttctaagaaacaagccgacctcttcttccccccagatttccaggatgattttcctgtagctatgcaggtttcacaaaagtatgggcttatctatgtaattactaagcttggccttttgtttgtatatgacttggaaactgctgcggcagtttacagaaatagaatcagtccagaccctatattcttgacggcagaatcttcctctactggtggattttatgccatcaacagaagggggcaggttttacatgccacagttaatgatgcaactgttgtaccttttgtcagtggccaattaaacaaccttgagcttgctgtgaatctggccaagagagctaacctccctggtgctgagaacttggttgtgcaaagattccaggaattgtttgcacagacaaaatacaaggaagcagctgagcttgctgcagaatctccccagggtctcctgaggacgcctgagaccgtggcaaaatttcagagtgttcctgtgcaagctgggcaaacacccccactcttgcagtactttggcacattgctaactcgagggaagctcaatgcctttgagtcgcttgagctatctcgacttgttgtcaatcagaacaaaaagaatcttctggaaaattggttggcagaagacaagctggagtgtagtgaagaactaggagatcttgtcaagactgtggacaatgatcttgcactgaaaatttacataaaggctagggcaacccctaaagttgttgctgcttttgctgaaaggagggagtttgacaagatactgatatactcaaagcaggttgggtacactccagattatctcttcctcctccagaccatcttgcgtacagatccacagggagctgtgaactttgctcttatgatgtcacaaatggagggaggctgcccagtagattataatacaataactgatcttttccttcagagaaatatgataagggaggcaacagcttttctgttggatgttctgaaaccaaacttgccagagcatgcttttcttcaaaccaaggttttggagataaacttagtgacttacccaaatgttgctgatgccattcttgctaatggtatgttcagtcattacgatcgccctcgtattgctcagctgtgtgaaaaggctggtttgtacttgcgagccctccaggtcagtgcctttgcattggtgcagctgatatctctgctttgctttcctgtttaactaaccttacattttgtaacgcagcattacgcagagttgcctgatatcaagcgtgccattgtaaatacccatgccattgaaccacaggcacttgttgagttttttggcaccttgtcaagagagtgggctttggaatgcatgaaagaccttctacttgttaatctgaggggaaatcttcagattgttgtgcaggctgcgaaagagtactctgaacagctaggggttgatgcttgtatcaaattatttgagcaattcaaatcttatgagggcctttactttttcttggggtcttatctgagctccagtgaggacccagagatccatttcaagtacatagaagcagcagcaaggactggacaaatcaaagaagttgaacgtgtaaccagggagtcaaacttctatgatgctgagaagacaaagaactttttgatggaagcaaaactacctgatgcccgtccactgattaatgtttgtgaccgctttggttttgtgccagatctcactcactatctgtacacaaacaacatgcttcgatatatcgaaggctatgttcaaaaggtgaatcccgggaacgctcctttggtagtgggccagttacttgatgatgaatgccctgaagattttatcaagggcttgatcctctctgttcgttctctccttcctgttgaaccactggttgatgaatgtgagaagaggaatcgcctacgtttgctcactcaattcctggagcacttagtgagtgaaggtagccaagatgtgcatgtccataatgctcttggtaaaatcatcattgacagcaacaacaatcctgagcatttccttactaccaacccattttacgactctcgtgttgtgggtaaatattgtgaaaagcgggatcctacacttgctgttgttgcttacagacgtggacagtgtgatgatgaacttattattgtcaccaacaaaaactcattattcaagctgcaagctaggtatgtggttgagagaatggatggtgatctgtgggataaagttcttcagcctgagaatgaatatagaaggcaactcattgaccaagtggtttccactgcattacctgagagcaagagccctgagcaagtgtctgctgctgttaaggctttcatgactgctgacctgccacatgaactgattgagcttcttgaaaaaattgttcttcaaaattctgctttcagtggaaatttcaatctgcaaaacctgctcatcttgactgctatcaaggcagatccatccagagtcatggattatgtcaacagacttgataactttgatgggcctgctgttggagaagttgctgttgaagcacaactgtatgaggaggcttttgctatattcaagaagttcaacttaaatgtgcaggctgtcgatgttctcttggacaacatccggagcatagaaagagctgaggaatttgctttccgtgttgaagaagatgctgtttggagtcaggttgccaaagcccagttacgtgaaggtcttgtcagtgaagcaattgagtccttcattcgtgcagatgatgctgcacacttccttgatgtcatccgtgctgcggaggaagctaatgtgtacaatgatttagtgaagtaccttctgatggtaaggcaaaaggcacgggaacccaaagtcgatggagaactcatctttgcatatgctaagattgacaggctcagtgatattgaggaattcattcttatgccaaatgttgccaaccttcaaaatgttggcgaccgtctgtatgatgaagaactatatgaagctgcaaaaatcatctatgctttcatttcaaactgggctaagctggctgttaccctggttaagctgaagcagttccaaggtgc

SEQ ID NO: 18457 - DNA, 1799 bp, Zea Mays
atgcctatagtcctatacttacagctgaccaggcgatcaatcacgcacgccgctggtcagcagtcagcagcaagccgcctcgtcgcctcgtcgggagtcgggagtctggtgagcgagctggtgatcaggtaccttggaggcctggcttgcttggacgctccattgcttcgacttcgaggtcgtcgcgggtttggatcctgtgtggagggggtaacaccgtgtagctcaactgtcccctagcgccgccgcgcgaaactccctaccggtccattttgtttgtagccattaagctcttcggaggtggagatctgggctgtcgtttccaggaccctggccgcgtcggctgtgatgggtcgaagcgccttggcggttcggttggcttcccttcttgcgtttggtttggtgctcgtctccgtcgaggccagcctcggggatgttgatccgcgctacagaacttgcgtgagggagtgtcaagctacagggattgttggggagaatgtcatcagccattgtcagtccaaagagaactacacttctgttggagtctcttggtataaccaggagcaaatttacatccagtggaaggaactgaactgtaggacagactgtcgctatttttgcatgatgcagagagaaggggaacgacagtcacttggtctgagccctgttaaatatcatggaaagtggccattcttacgtgtttctgtgttccagagacattgagttgactgagaaactggactattcttcagctgtggccttgcttggctactcgttgatcctttcattgctaagggctttcaatgtcaaggatgaggctagcagggtgatgtttgcagcccctattttggcattcgttacaacgcacatcttgtatcttaacttctacgagcttgactatggatggaacatgaaagtctgcgtggtgatggctgcggttcaacttctgacgtgggctgtttgggctggtgtaagccggcatccatcacggctgaaactctggacggttgtttttggaggagcactggtcatgcttcttgagctctacgacttccctccatacatggggtttgccgatgcccattcactgtggcatgcaagcaccattccactcacctatctctggtggagcttcatcaaggacgatgccaaattccgcacgtcaacactcagcaagaaggcaaagtagttaagcaaagcgcgacattcttagcatagggtcagagaggatcagattccgattccgtggtctgcacgggggacattttgggggcacacgtgttgtcggacatcatggaacctcggtacatttgccctccccaaaaaagacattcatcttcatccactcaggtttttggcccacaaaagtcaacatactctttagggcgcatgttctgcccttacgaattatctctttactgacctgaacgtgcatcctgtgattgaatcggcatcttatcattgtagtgttggtggggtttgggagattttgtcatcgccgaatcagttttgtgaaatcagacagaacaatgaacatcagtggtgtgtttcctattatgtgtggagttttgtaaattcctgaagcccattttgtatgagttttccaacgttacgaaaattcctgaacaatgaacacgtgctatgtttgaaacaagagggcacggtagctaactagctggcaggcagtggtgggctacgggtttaaactttaaaccgaggacagtcgaggatattttttttgatatgtcatattgtgtataattcgaccacatagatatatagttttcatcaattcggta

SEQ ID NO: 18458 - DNA, 1088 bp, Zea Mays
gtttaattagcttcctgttggaacgtggattactacgcaggtttacagacttaactggaacagattacagtaaaggagctgttgaacttgcaagaaacctagctgctcgtgatggcttctcttcaataaactttttggttgatgatgtacttgagacaaagttagataggaaattcaaaattattacagacaaagggacattggatgccatcggattgcatccagatggtcgtgcgaaaagaatggtatattgggaatctgtatcaaacttggttgagcctggtggcattgtggtcataacgtcatgtaatcacacaaaggatgagcttctgcatgaagtagaagatttcaccaagagaaaatttggcaaggagaacgtggatgaaggtgcacgagatgcgtctgagatcttccggtacatagaccatgtccgaacatatcctaccataatgtttggaggaattgagggctctcaagtctgcactgtggcctttcagcgggtgtgactgaaagctgaggcacacatagttcttggcctgacgtgtcacgttgggtccagaagaaatggataaaaaattttgtgcttcgcctgtgggactgttcctaccgtattaaggaacagtccaaactgtgtcttcttctgttgttagctcatctatccaggatggtcgtgtaattttagatggaccagactatgagacgaatcagtcctgtattgttgtcaccgtgaacatttccttgtatttccgttcctcttatacatactctagccttaatttattactctttcttgtaaggaggtttcaacttgctaccagtggattgtttaagtgatcatcatcttgttatattggctagatcagaggaacgagttttcttgtctcggatcccaggactgctggacggctgtcagcttgcctgctccataatgttggacacagtctgctggactgctggacacagtctgctgcaacttgcctgctccgttctcttcccgtatgtattaaattgatgtaatggtctagaaaatcaacaaggttctccaaaaaaaatctgaacgcaaaaatcatcatcaggggataaaaaaa

SEQ ID NO: 18459 - DNA, 1478 bp, Zea Mays
attatgaattgatgaaaaataacttactagaccgaaatgaatcgcatgcttttttcagttcctcgaccatgactctaccctatcttactgaaaataaaggccagagcaacgttgagatggcactgccttataaacttaccataaacaggtgcaaatgagaattgaggaattgagaagagactggaacctgcttgaagagtttcagttttcttacatggctcttttgcatgcatcagttgctatggaaagaaaacttgtagtcgagtgggttccttcctgcgatctggaagattcttcagctaaagagacccctgaagcccataaaaaagcatggaaattgctgaagggtgcagatggtgtactcgttcctggaggattcggagataggggagtccagggcaaaattcttgccgcaaaatatgcacgcgagaacaatgttccttatcttggcatttgcttgggaatgcaaattgcagtgattgagtttgcccgttcggtgatgaaactacgaggtgccaatagcacggaattcgatccagctacaacatcaccctgtgtcatcttcatgccagagggctcaaaaacccagatgggagctacaatgaggcttggatcgaggagaacctatttccatgtcagtggctgcaaatctgcaaagctgtatgccaatgccagctctgtagatgaaagacatcgccacagatacgaggtgaaccctgatatggtcccagacttcgagagggccgggcttcaattcgtgggcaaagatgaaagtggaaaacgcatggggatcattgagcttccctctcacaagttcttcatcggtgcacaattccatcctgaattcaagtcgagaccaggaaaaccatctccgcttttcttagggctgatagccgcggcatctggacagctagagcctttgcttcaacgcagcaatccgacaacaaaagcatgtcctatgagtaaagtcccgaaactgaaactgtacccaactggacctgtgaataatccactgaacagcttggtaaatgggtactacccaaatggcactggcatccacacctagaagcataatgcttagcgatggtctatttgatgtttgttcctatggttttgcttgtacccctttttatgtttgtttttcagtttgtatttgtctctgatcaactgggaaggctaagattcagcaagccccagctccagcaacacatggttccgacattttaacgaggaacgtcctccggtccgttggagcaaactagctatagagtggtgaggtctagtgtgatttttttgagccctggaattaagcgcgggaagtgttttggtagcgttagtagagcctggaatctcaactatttgtacattatggaagaacttatctaaggactgaatacacaaatgcttggccatgatttgctttgttgccacaatattaacaaccacaatcagatgtagaaaaaaaaacctctaacaaa

SEQ ID NO: 18460 - DNA, 1585 bp, Zea Mays
gcgccggcctggcgccggggccggggagcggcggcggcgagggatggacggccacggcggcggggcgggggccggcaagctgacgcggacgccgtcctcgctgctgcgctcgcccacggtgcgcaactgctcctcgttccaggccgtggttgtcgacgacccggagcccgacgacaagaaggcgcaggcgcaccccaagcccccgccccaccacttgcaccccggtggcggccccgcccacccgcggctcgtcctcgcgctcccgctcgccttcctgctcgtgctgctcctcctccgcggcggcggcgacggccaccacctcgccctcctttcggcgtccgcggccgtcgcgctcgccgccgccgcgggggccgcgcgcctgctccggggacgtctgcgccgctcgccaggctccggctcggtccagtggttcatcggggacgacgacgacaagccgcagaagcgggcggacaaggccgccgcgccgcacggccgcgtcgtgcgggagggcgtcgagttctacagcaatggggactgctacgagggcgagttccaccagggccgctgcaacggcagcggcgtctacaacttcttcggcaagggcaagtacgagggcgactgggtcgacggcaagtacgacggctacggcatcgagagctgggcgcggggcagccggtaccgcggccagtaccgccagggcctccgccacggccacggcgtctaccgcttctacagcggcgactgctacgcgggcgagtgggccggcggccagagccacggcatcggcgcgcagacctgctccgacgggagctcctacgtcggggagttcaagtgcggcgtcaagcacggcatcgggagctaccatttcagaaacggtgatcggtatgcgggcgagtactttggggacaagatccacgggtttggcgtctaccgcttcgccaatggccactgctacgaaggctcctggcacgaaggcaagaagcagggatttgggatgtacacgttccggaacggcgacaggcgatcgggggactgggattctgggactctcaagacccccttgccccccgctgatccttccgtccagcgtgctgtacaggccgctcagcgtgctgcggagaacgcatttcgcctgcctagagttgatgagcaggtccacaaggcggtcatagccgccaacagggcggccacggccgctcgagtagcggcgatcaaagcagttcagaacaggatggatgggaagttttgcgatacctgtgtgtgaatcgctgcgtgcgagaccatgttctttttgtttctccttctaatctaactgtacattagggtagtgaaggacaataactaatcagagtgaggtcagacgaccggggcagcacaaccgcgtgctccgagtcagggttcatcaacgaacgggagcggacctggcaaaaaaaaaacatttgcgagaaacggctctgatcctgccatatcgccatggccatcggaggttcccttcctccttccttgcaacaagctgtaactgtacatagatccaagtgttgtatcaatggaagagcgagtttttccagcgccccttttcagtgct

SEQ ID NO: 18461 - DNA, 1674 bp, Zea Mays
tcaagcaaaaccctacctgatcccaccagcgtggtagagtctgctcaacaccaaacttcgacgactgcgccggccgtcggccgtcgctgccgccctattttgaccccatcgccggcgacgataatcgccagctgaaggacaataactatcatggatgctactgcaaattcagatgtgcaaagggctgaggaatttaaacttaaggcgaatgatgccttcaaggcaaacaagttctcgcaggctatagagctttacagtcaagccattgagctgaatagttcaaatgcagtttactgggcaaaccgtgcatttgcacacacaaaattagaggaatacggaagtgctgtgcaggatgctacaaaagccatcgaaattgattctagatattcaaaaggttattatagacgaggcgcagcttatcttgccatgggaaagttcaaggaagccctgaaggattttcagcaggttaaaaaaatctgcccaaatgatccagatgctacaagaaagttgaaagagtgcgagaaagctgtccaaaagatccgttttgaagaagcaatatctgctggggatgatgagaggcggtccgtggcagactctattgactaccatatcatagaagtagagccacattatgcgggaccgagaattgatggggaagaaataacgatagagtttgtcaaagcaatgttggatgaatttaagaagcagaaatgcatacataaaagatatgcttaccagattgtgctaaaaaccttggatttgctgcgatcgatgccttcccttgttgatgtggatgttccaaacggtggacattttacagtttgcggtgatgtgcatggccagtactttgatttgctcaacatatttgacctcaatggccttccatcagaagaaaatccttacctcttcaatggcgattttgtggaccgaggatctttctccgttgaagtcatactcaccctttttgctttcaagtgcctctacccaaaagctatgtaccttgcaagaggaaatcatgaaagcaagagcatgaacaaaatatatggctttgagggggaagtgaggtcaaagctgggtgagaagtttgttgaactttttgctgaagtcttttgttggttacctcttgcccatgtcatcaacaacaaggtctttgtggttcatggagggctatttagtgttgatggggttaagctttcagacattaggtccattgatcgtttttgtgaaccacctgaagaaggtctaatgtgtgaattactatggagtgaccctcagcctcagcttggaagaggtccaagtaaacgtggtgttgctctttcctttggcgcagatgtgactaagaagtttttacaggaaaataacctggatcttattgtccggtctcatgaagtaaaggatgaaggccatgaaattgaacatgatggaaagcttataacagtcttctctgcgcctaattactgtgaccagatgggcaacaagggtgcatttattcgcttcacagctccagaaatgaaaccagatattgttactttctcagctgtgcgatccctctcacgcatgagtttgcatagcatttatggaccacaatagtttgctccctctttaaacatgaatactaggttcaatggatcaattaaatctctggcatagaattgaaagcatcatgacgtcagg

SEQ ID NO: 18462 - DNA, 131 bp, Zea Mays
acttacccgactaaagaaaagactctcaaggatatgctggtttgtcgggaatcaaggtaaagcttatcaactttcaaagactcattttcgtagaaaagcttactagtagtggatccttatgcaaaaatttt

SEQ ID NO: 18463 - DNA, 1775 bp, Zea Mays
cagtcgtccctgtccctccactcctcccgtcgagcacttggcactgccaatggcggctcccgcccacaccccttcgatgcgcgcaagccaccttctttccccgtgagatcgacgcacctccccctctcgtgcttcattcccgctcgtcgttcgtttcttcggccccgagccgtcgcgcggtcgcctccacatctcgtcgtgctttaaggtctttggcctccgccgttcttggacaggggcacaccactgtccaccggtgcccactacgcgaaatacgagtccctcgtgcggctccgtagggtggaagagatccatcaggcggtgagtgggaggggcggcgtccacacaaccggaggggaggggggcaatggcggccgtggcaggcccactctgcacgtggctcgtcgccgcgtgcttatctgcggcatgcgacgctgaagagcacaagcagaagcatttctgcgcaggcggaagccgcgctgggggcggtgtcatgctcggccagcgccgccgcctcggcgcgcggcgtcgcggcttggcgcgctctggaatgactatggctgttgccttacaagctgaaagaagtgtcattgaaaagaagaaacccgatatcaaacaaaggagggtggttgtcactggcatgggtgtagtgacaccattgggccatgatcctgacgtgttttacaacaatcttcttgatggtgttagcggaataagtgagattgagaggtttgactgttccaacttccccacgagaattgcaggagagataaaatccttctctactgatggttgggttgcacctaaacttgcaaagcggatggacaagtttatgctatatctgataactgctggaaagaaggcattagaaaatggtggactcactgaagaactaaggaatgagttggacaaaaccaggtgtggggttcttattggttctgcaatgggtggcatgaaggtttttaatgatgcaattgaagcactgagggtctcttacaagaaaatgaacccattttgtgttccttttgcaactacgaatatgggctctgcgatccttgcaatggatctgggatggatgggaccaaactattctatttccacagcttgtgctaccagtaacttctgtatccttaatgcagcaaaccacatcagaagaggcgaagctgacgttatgctctgcggtggttctgatgcacctcttatcccaatcggattgggaggttttgtggcatgcagagctctttcacagaggaacagtgacccaacaaaagcttctcggccttgggacatgggacgtgatggttttgttatgggggaaggggctggtgtcctcgtattggaagaacttgagcatgccaaggaaagaggtgcaacaatatatgctgaatttcttggtggaagcttcacatgtgatgcttaccacatgactgagccacatcctgaaggaagagggattactctctgcatcgaaaaggcactagctgatgcaggggtagcaagggaagaaatcaactacgtgaatgcccatgcaacatctacacaagcaggtgacttgaaggagtatgaggctatcgtgcgctgttttcgccagaaccctcaactgagggtgaactcgaccaaatcaatgactgggcatcttataggagcagctggtggaatagaagcagttgcttctatacaactctcggtgttttgggcattttggcttcaaccagcatgaattgaaatcacaacagagcatgtgctttgttatcggtttcattgcaaaactggct

SEQ ID NO: 18464 - DNA, 2255 bp, Zea Mays
cccagatcgatttgggccgcactacaactacgattcatctcggaacagcccaactagcccattcaacattcctgtaagcgcggagtcggcgacgcacggggagaagtcgaacagcggccgcgcgcggggaagttgcccggcggcggcggatctcggaggcagcgacgcgcgggtggaggagctcagtgacagcgccagtgcctatcgagcgagcgaatcgaggagattctccccactgtttctttcctgctgattccgatttcgcgttgaaacaccggggggagaagaattgcgggcgaccataactcggcaagaagcggctccaaaaagggcatctacctttgccgattccggcaccgatggatcccgcggcgtcggggaggttcgacaagctccagagctcgttcaagctctccatccagtgcctcctcaccgcctgctcccgcgaggatgtcaatgacgctttctcgtccttcactgatgctgagaaggagcgtttgcaccggatgctcacccttgtgatgaagaatctgcatgccaacgtagtggatgagtttgacgacttctgccaagaaacacaggtggctgctgcccttgaaaagatagatgactttgttgaaaagcagaatcttgatgcattatcttcagagaagactactgttgaagaaatcgaagaaaaggtatcaagagcaaaaaaggatgaaattgaatatttgactggtttactgaaaaaggttgaagaaagtaacaatgccaagaaagctcgaattgaactcctgaagaaagaggaggatttaactgctgcaagagatgtcctcaataagatgacgcagtggaactctgcactcgtggagaacattaacccttgaatctgtgtgatgacgattcattggcgtcaaaggacatctttgtataggggtgtgttagattggatgacatgtgaatgtgattcatggatcagcctggatgttctgttatgattaagaactgctatgtatcgtgcaatagacacatcgtctgtactttggatgttattatcaggtcccaaacttcattatatccaatatgttacaatatcattttggtgacttaactacaatgtcagctcgtgccaacagaaaaagaagaaaagaaatgggcggtggttgcccgacaagtccttgtcagccgcacagtcttcacacgaccaggggccatgagcaccactcttgccttagccacggcccacgggcagcacagcatctccatctatccaaatggcagccagcagccgtccccttcctccaccctctgccatcctcgcagtcacagcccctcaccatggctgccacactctcctccgtggctgccccttccctccccaagcacatccccgttaccagagctcagcagcaggcgcctccttccatcatctcggcatcaactcagaagactgccttccatggggtgtcgctggtggtggacaggaggtgggcggccggccaccggagaggcggcggccggcggaggctgctgcaggtgaacgcgaggaccgccgccaagaacatcgaggtggaggtcgagaagccgcttggcttagccttgggccagaagcccggtggtggcgtcgtcatcacttctgtggagtctggagggaatgcagccagagccggtctgaaaaccggggaccaggtcctgtacacaagcagcttcttcggagacgagctgtggcctgcggataagcttgggttcaccaagacagccatccaagcgaagtcagactccgtctacttcgtcgtgagcaggggtgccgaagttgacgtgaagcgcctacctaagaggccggcgccaccccggtttggacggaagctgactgattcacaaaaggagagagcaacgcacgtctgccttgattgtgggtacatatacttcctacccaagccttttgacgaacagcccgacgactacggttgcccacagtgcaacgcgccgaagaagcggtttgcgaggtacgacgctgccaccgggaaggccatcggcggcgctctgccgcctatcgccgtgatcgtaagtttggtgatcggcatcgctggggtaggagctctgctcgtgtacggcctgcagtagcctgctcgttcttgttcagaacctttttttttttttgctgtgctcaagaagctcagctgactgctgctgtactctgtctcacaagacattccgagtgatatacatacataaaagggaagaaggaaatacacagtatttgaggctaaaaa

SEQ ID NO: 18465 - DNA, 633 bp, Zea Mays
ccttcacaacttgggtttatgatatggagaccacctacctacaggagactaatcaatttggaagtgtgctgaagggtttcgaatcttttttgtcatcctcaaaaaacacctctaaccttaagcgctctcggaaatttcaggctgacgagaggttattctccctgtcatccgttacttctccagcggttgatgaacatttggctggacgagatgatggaagagagtatggagcaggtcgttctaagggtggaagcacccctgcgaacgggcaaggcaaaccgaagaagggagggcgccctggcgggcgagacggcaagagactacggccgtcgaatgacccagacctggacgacgaagatgactactaactcctccatcatgtaggcctactgtagcgggttaacttcaatttagcgtctagcagcacatgattctttacgaattgcttcccttctcgtttgttttgcttggttgcatcttcgcttccttccccaactcttccgatttgtaatataacataggtcaatgaaaattagccagattgttaaaattttgtgcaaactttgttctcagacggtagctttttctggatttccgagttaatatatcttcgttacatccttgaatcctagt

SEQ ID NO: 18466 - DNA, 788 bp, Zea Mays
tatataaataagggtcccccagaataagtagtcaatctcatcttccactctgcactccatatttttacatgtaaggaaagtcaggcgaatggttggatttcgggattttgacagaacagtggtgaagctggaatgggtactcaactggactacctttgtaacagcaagggtgatatgccatatcttgattacttacaagctcatctctgatgcccacaaatttgggaagggcattgagcttccgctagctctacttggtatggcaggaatgaatctgcttaacatatttcttgggctcgatctacttaaagcattcacacgagaaagaaataagcagaaccatcaggattgaatgcacctttcttgatgacggtgtactctaaattttgagaaggctgtagttccgttcttgtagggacatagaggtatgtttaagtcttaattaatcagcaactacactggaggctatggattctttatgtatcaacacgtgctaatgctaagatctctacaagaaagggttgttaatgtgtaatcatgtaggtataacattattgttcattaggagaattaagagagtgcaggcgggtaactggatgcaggatttacatacattttgcaatcaggaatcggaaagaagagaagcgtaccatgtatcaaaccccttggtcccaactctcatacctcatctaaagtaacacctaagcaacttgtagattggcactgtgactttgaggctacaatgctcttgtttattaatatttataatatttgacgatatcttgctg

SEQ ID NO: 18467 - DNA, 5198 bp, Zea Mays
cactcccagcctggcatcttccctctccacgccacacgcacggctccatccttctgtccacgctcgcgccgccagggcgctcgagctcgccgtcgtcatctcgtcgggccgccgcctcgcagcttcgcccgcggctctggtccgcgccccgccaaggcccagccccaagctgccagcggcctccggcgttgctcgccgctcactgcgcgccgtctcgcgctctcgcgccctcgcccagtcctgctctcccttcgtcgctccgcggctccgccggcgtctgggcatccggccttcgggctttggtggcgccccccaccggccaccggcccaccccagcgggcagcggccactgcaactctgcggctctgccaggaacaaggaggaacagtggcgattctgccagggacagggaggagcagtggcagacaacgtccttccttttgtttggcccggggcttcggaattatctggagccgctactgcccccagcgttcggactcccgggtcgcaggcagccacgtctcgtcctggctctgggctcgccgcgctatcgtctcggccattcgctccgacgtccgtattcaatagatttgccctactcgtgaccacgagaatccggcgaggagggagaccgctcgtgcggagtctataatggctgacgggcagcatattcaggcagcatcagaggaagtggattcaatccacttcagcttctatagtgatgatgaaattaagaggatcagcattaaaaagatcaccaagtcggagcgccttgatgccaaaaaccttcctgtgccaggtggattactggaccctgcaatgggacctatcaatgatattgatatctgcaagagttgtggtcagcattctgttcgttgccctggtcacttcggtcatattgagttggcaaaaccattgttcaatcctttgctgtttatgagtctgaaaaaccttctccatgtcacgtgtttccattgtcacaagttccgcctgaacaaggaacaggttgacagatatgtgaatgaacttgaacttttagtaaagggtgatattgtctgtgctaaaaatttggaagactcagtagaagaagcatatctttccaaggaagatgaaaacatgaacaagaccacttcaggtgataactcatcttctgtgaaagacaagaaaacctggacatctatccaattgaaagaggttttgtctattttttccaagataatgaaaaagagacagaagaagtgtgcaaaatgtgacatgaagagcccaacaatctcaagtcctatatttggttggctggtcaaggacacaaaggcttctgctgtaagaacaaatgcaattgctgattttaaactcaagggagatggtgatattcacaactcaggggaaacaggggtttctggtcttgaggaagagtcatcttcacctggaatggtgtctaaagactcaatcaatgaagttagaggtctttctgatgatacaattaaagaattggtagcatcatcaggaaaaaaacatctattgcctacagaggttgaatctattctcaaggacttgtggaaaaatgaagctaggttctgcatgttactttgtgatttccagaagaatatgtcaagtgaaccagaaaagagaaggggctatgaaatgttcttcttgagtagtctccttgtggcaccaaatagattccgcccatcaactagctctagtcttggaattatggaacatcctcaaagtgttctgctaagtaaagtgcaagaatccaatcttgcgctacaacataacaatgcatcttctaaccatatggatgttcttcaaagatggatggatctacaacggagtgtaaatgtgctatatgatagtagcaaaggccttgcaagaagcgagaagaatgctcatggtatacgccagctattggaaaagaaagaaggaattcttcgacaaaagatgatggggaagagggttaattatgcatgccgatctgttatatctccagatccgtacttggctgttaatgaaattggcattcctcctgtttttgcgacacgattgacatatcctgagaaagtaacaccctggaataccaaaaggctccaagaagctataaggaatggtgccgatatacatccaggtgcaacacattacagggacaacaatagcatgtataagttacaggcagtccctgccaaacgccgttccattgctaagatgctacctgcatctagaggatcaatttgtcagccagggagagatcctaattgtgagtttgaaagcaaggttgtatatcggcatcttcaagatggtgacattgtacttgtcaataggcagcctactcttcacaagcccagcatgatggctcattttgttcgggtgttacctggagaaaagacgttacgaatgcactacgccaattgcagcacctacaatgctgattttgacggagatgagatgaatgttcatgttccgcaagatgaaatatctcgtgctgaggccatgaatattgttgacgcaaacaagcaatacattggtcctaggagtggggatgctgtcagaggtctcatacaggaccacattgttggtgctgtactattgacaaaaccagacacattgctaagccgtgaagaatatagtcagcttgtctttgggtcttgtgtgccgtcctcaaattgtggctctcatcaccctgctaaggtgtctgctattgaggattacgatacacttgaacttgtccatcctgctatttggaagccaaggcccttatggacaggaaaacaggttataacaaccatcttgaatcatttaacaaaaggttgtcctccatttactgtggagcagaagggaaaaataccaaaagaatatctgaaagaagatccttccgctcaaaaggaaaaagaagatccttccgctcgaaaagaagctcattctgctaaaaaaggaaaacgagaagatccttccgctcaaaaagaaaaagattcttcagttaataaagaaaaacaagagaagatacaaaaacaaaaacaaaaagatcgttctgaactggtcttatatattcacaataatgagctcataaagggcataatagacaaggcccagtttgggaagtatgggatagttcatacagttcatgaactctatggtgcatatacagctgggatactgctctcgacattcagccgcttatttacactgttcttgcagttgcatgggtttacttgtggggtagatgacctgctactattgccagagaaggataaactgagaagtaaaattcttagtggaagcgaagtgcgtagtaatgaagtccactggaaatttactggagctgacgaagatcataaaggtgatctggtaaaattgcatatggaggttgagaaggctgtaagaagtaacggtgaatcggacacggctaccttggacaatgatatgaaaaatgctctaaatgggataacaaccgacgtcaataaaatattatttcctgatggtctacaaaagccctttcctggaaattgtctctctcttatgactacaactggagctaaaggtggtccggttaacatgaatcaaatatcatcattactaggccagcaagagctagaaggaaagcgtgttccacggatggtttctgggaagactttaccgtgctttccgccatgggatatttcttcaagagctggtggctttatcagtgatcgatttttaactggtctgcgtcctcaagagtattactttcactgtatggcaggcagagaggggttggttgacacagcagtcaaaacatcccgtagtggataccttcagcgttgtcttatcaaatgtctggaatcgttgaaagtctcctatgatcacacggttcgggatgctgatggatcaattgtacagttctgctatggagaagatggagttgatgtgctgaaaactagctttctgaacgagttcaaagaacttgctgataacagaaaagctgtccttgccaagctcggtggctgcagtaaggatcccacattatcaaaatgtaatggatacattactgaactgcctcctaaattgattgataaagcggaagagtttcttaagcattcaaaggaatgctgtcgttacaacattgaggcaaaggaattaaaggagttacttaaagtcaagttcctatccagtcttgtagatcctggtgaggctgttggtgtggttgctgctcagtcaataggagaaccttctacgcagatgacgctcaacacttttcatcttgctggaaggggtgacatgaatgtaactcttggtataccccggctgaaagaaatactgatgactgcatcagataatattaggacgcctgttatgaagtgtcctttgctcgaacatatttctgaggatgatgctaaaatggtggttgcaaagcttaggagggttcgtgtggctgatgtagtggagaaaattgaagtctgcacagttcctttttacaactctaatgggcgtgtttcaaccctgtacaagttacagatgaaactctatccacaagaccagcttgagtcaggtcttactatagatgagtgtcaggcaaccttgagaacagtttttgttgaggcaatggaacatgcaattgaaaagcatctagatctgctatacaaaataaatgaaatccgtgctgttaagatagaagatacagagggctcattattaaatggtgatgaagaatctcaaagtagacatgctgatggaggagacactggtactagtgatgatgacgatcaaaatgataatgatgttgacttgggaactgatgcagaaaagatgaaacggcaagagaaagatgagatggagtatgatgatgatactgaaaccgaggagggaatgggtagcgaatctgaggagagcgatgaggatccagctgagtcaggtgatgattcacaagaggctgacaaagaacacacgatctcgaagtctgagacgacttcagtggatgacctgccatattctgtaaaaaaggggaaaaaatcaaaagatgatcgtggaacagctaaactagaagagaaaaatcaaaatgagggaagattagatgaccagaaacagggtcaaataaagaagcgcaggaaaaagttaaaacatactatccatgttgaatccagtgatttggattttgagattcactatgcctttcatgatgaacctcatattttactagctcaggattgactacatataacttgaca

SEQ ID NO: 18468 - DNA, 2085 bp, Zea Mays
tgtgtgccgtctgaaccggtccttatatggtcttaatcaagcacctcgagcctgatgaattggagaagatggctgagaaactcaagctgacagaatctctccttgaaagcaaaaaccttgaagttaaaaagataaatgatgagagaaaggctgcattggctgcccagtttgcagcagaagcaactttgcggagagtacatgcagcccagaaagatgatgacatgccaccaattgaagccattcttgcaccacttgaagctgagctaaagctttctcgccaggagattgcaaatctccaggatgacaacagagctttggatcgtctaacaaaacaaaaggaggcagctctgctagaagcagagaggactgtgcaaattgctatggcaaaagctgctatggttgacgatttgcaaaacaagaaccaagagttgatcaagcaaattgagatctgccatgaagaaaataaaatcttagataagctgcatcgccaaaagattgcagaagttgaaaagcttagccaaactgtgagggagttggaagaagctgttcttcaaggtggtgcaacggctaatgttgttcgagattaccagcgcagatttcaagaaataaataaaagagaacacttgaccgtgaacttgcacgtgcaaaagttacagcaaacagggttgcttctgttgtggccaatgagtggaaagattctaatgacaaggtgatgccagttaaacagtggcttgaagagcgtaggttcttgcagggggagatgcaacaacttcgtgacaagctagctgttgcagaacgtacagcacgatccgaagctcaactgaaggaaaaataccagttacgtttgaaagtactagaagatggactaagggggccaccaagtggctctagtcgtccaactactgaaggaaagagctttagcaatggcccttcccgccggttatcacttggtggggctgataacatatcaaaattgtctccaaatggcttattgtcaaggagatctccgtcttttcattcaagatcatctcttttgtcaaacagcagcttggtcctgaagcatgctaaaggcacttcgaagtcatttgatggcggaactaggtcactagataggggaaaaatccatggaagtggagctcatttactcaacagatctacagatgctgttagagataaggagactagtgatagttggaagggcgatatggatgagagaactaatgagagggcagacaacaacacagatgagaaaagtaacgaaaccacaaataaaaactcagctgagacagtttctggtttcctatatgatatgctgcaaaaagaggtaatttctttgagaaagtcatgccatgaaaaggatcagattctaaaagataaagatgatgctattgagatgttagcaaagaaagtagacaccttaaccaaagcaatggaagtggaggctagaaaggtcagacgagaggttgcagccatggagaaagaagttgcagcaatgcgtgccagtaaagaacaagaaaccagagccaagctgcttggtacgaaaggctctggtagttcacaactgcttcctggaaggaacgcagcacgaactgggtcgatgcgcaacttccagtgatggcagcactaacacgaagcagcattcttggatagatccttctccgttccaccatttgttctattcctatcctattaattttgtgtctaaaattatagtagagtgagatgacccaacggtacctagatcagggtaaagagtaggctcggatctgatgagaccattgtgggagtgaaaccgagcctgtgtctaaccttgtggcgcgccctcttgtttctttgtccaggaagcgcacccgatgcttgtataggctggggccgctggggatcttcggatgcccagtctgcaatgtatcttgagtgctcagttacacaggacacccgttgcccaggttgtgaatattgtatcctctcacatgcttgtttgcgctgctcaatttgccccgtgttctggttggaatttttagcacggcttctggcttatccgaattctgttgattacgtacacatttattggcaactgccaactga

SEQ ID NO: 18469 - DNA, 758 bp, Zea Mays
ccatttttatcactgcacaccacatgcactgcagaatctccaaatacagcgtgccctacaaaagctcttgaagttgaggacctaagctggcttgttgacaacaatagactaaggtccttagcggaactgaaagggatccaagacgctctcagggatcctgaactgcagagaatgatacttcaaattgatgggtcttccgaatcagaaaaagaattggagaaagtgatggaaggtcaagcttttcgcgagttcactgataagattcttgacattgtcaacccacaagaataaccgtctaccctgtttggtgggattctgacgctagagtaaacagaagcatccgggcaaacaaagcaaaagtggagctcatctctgttttcctttttccaggatggtataattcataacatatcttgagtcgcctgtttttccatgatggggtagactttagaacacatactgtgtcgcctggtgaaaggaaattacgtctgctgaaaaatctctcttgccaaatatagtttttcttctgtattctagtgttgtattctagtgtggtagacagcgactctacactgactactgagggtgtgtttggtttggttttgacttttgctctctaaaaacgaaaagcaaacggcccgagccagaaagcagcttttttcaaaagcatgctttcttgcaatgcaaattgaaagcacatttgaatctatttttagcggcttttgaatggaaccatgtaaataatatggaagaacttg

SEQ ID NO: 18470 - DNA, 2757 bp, Zea Mays
ccattttcgagcgcagaagcgagagagatccggagcagccgcagtcccaccgacctcgccgccggtcgccctccatctcctcgccgctgcctctcgatacgagcatagactacaggctcaaagttccaattccaacccacccgacgtccgacgacagctggtccgggtctcctccatttcccggggacccgtccgatccgatcccagtcctcaacgccaacggtgggagatctagatcggagctagccagccagccggccgacgctgtccgccggccgccccggcgattctgacccgagatggcggtcgtccctgctgcagagaccctcgacgggctcaaggacaggttcgatctcggggtcttcgtaggcgacctcgccctcgatgaggaagtcaccagtgacgacgagtccctggaggggctgcagcaggagcttgacaactgcaagaatgaccaggaagtcgcaaacattctagccagtggcatcaaactgcgcgagtacacaaaaggcgtcgagaataacatacgccaaatcgagctggattctatccaggattacattaaggaaagtgaaaatctagtttctctgcatgatcaaatttgtgattgtgacaatattttgttacaaatggaaacagttctgactggattccagaaattggttccataagttcagagataaaggtccttcaggagaaatctatggacatgggattaaagctgaaaaatcgtaaggctgcagaatctaaattgtcaaaatttgtcgaggatataatagtacctccaagaatgattgacataattgttgatggagaggtcaatgatgaatacatgaaaacacttgagactctaagcaaaaaaatcaaattcatcgatgctgaccccatggttaaatcatccaaggctctaaaagatgttcaacctgaggttgagagactacgacagaaagccgtctcaaagattttcgagtttgtcatccaaaagttctatgccttgagaaaaccaaagactaatattcagattctacagcagagtgttcttcttaaatacaagtacacgataaatttccttaaggaacatgctaaggagatatatgcagaagttcgtacggcgtatattgacaccatgaataaggtgctaagtgcacatttccgggcttacatacaagcattggagaaactacagatggacatagcaacttccactgatttgcttggtgttgaaaccagaagcacaggcttcattttctccattggaaaagaacctctgaaaacccgtccttcagtgtttgctctgggtgaacgaataaacattttgaaggaaatcgaccagccagcattgatacctcatatagctgaagcgaagtcacagaaatactcgtatgaagttcttttcagaagcttgcagaaacttcttattgatactgccacttcagaatacctgtttactgatgatttctttggcgaagaatccatattccatgatatatttgcaggaccgattcaagttgttgatgaacatttcaatactgtactcctgaactgttatgatgcaattggcataatgcttatgatcagaataattcatcagcaccagctcatcatgtttaagcggcgaatcccatgtttggactcttacctagacaaagttaatatgtcactctggcctcgcttcaagatggtgttcgacttgcatttgaacagcttgcgaaatgcaaatattaaaacactttgggaggatgatgtccatccacactatgttacaaggagatatgctgaatttacagcttctctagttcatctcaatgttgagcatggggacggtcagcttgatctaaatttggagcgattgcggatggccattgaggatttgcttgttaagttggccaagatgttttccaaaccgaagctacaaactgtctttctgataaacaactatgatttaacaatttccattttgaaggaagctggaactgagggtgggaaagcacaacaacacttcgaggaggttcttaagagcaacatcgcaatatatgtggaagagttgctcctggagcagttcagtagtttgatcagattcgtcaaatctcgtccagcggatgagacggctgcaaattccgagaaagccagcattgccgaagttgagccactggtaaaggatttcgcgagccggtataaggccgcgatcgagctgatgcactatgatgtgatcacatctttcagcaactttctttgcgggatggagatcttgagagcgacgctcgcacagctcctgctatactacaccaggctctccgagtgtgtcaagagaatcaacggcggctctgctctcaacaaggaccttgtctccatatcctccatcctgttcgaaatcaagaagtattctaggacgttttagttgtttcacccccttccatgtacactaggacggctagctgaggggtagctgtgtatccttactttgtaactggtatgtgcgactgcaggggaaacaagggcattttgtcgtggtttgtatcttcgtctgtgttacccgacttgacccctgcccctttccagcacagaactatgatctctaggctgtctccacagttatcctattctatcttctgtcctatcatctattttaaacttcattttgtaaacagtatcgattatagtgcaaatctacaattttatacgatccgctgtggataaccatatgctgcatactaatgaatgcgtaccaaacgcttgccttaatgttatttttatgac

SEQ ID NO: 18471 - DNA, 13094 bp, Zea Mays
cgagataccaccggcctttttcagggagaagccactccatctttctttttttcctttttccaactttcttcttcttcctcctccttctcattctgatctggaacaatggcgacagaagacgaagagcgagaagcagcagatgggacggaagtcccagtggaagctgtggttttgggaacattccatttgcatgcacacccagaaggcaagctttcatctctgatggatatcaagagcatgggagaaaccatcgattcaactgaaggaacgttgaagattccagaggatcaagttttagtagaagcaccctctgatgtccaacttcctccagaacataatctaaatggtgaagcatcttctttgaatggccatacagacaaagaagagaaggtttcagtcgagcagccacatgacaatgatcaggaagaagcagaactagatcagaacaacagaatcaacaaagaagatgcggctgatggtttaagtcatggagagagcacaacagaagacagctgccttctgaagcacaagaaagatgaagaatccaagggtgatgaacaacaagatttaggtgttacagtggatgatgacttggtgcaggaagacacgctgaaaactgacaatgctattgagcaaacagatgatggtcagcaagaccaggatcaagaacctgaaaaggcaaacgagaacacagaacctgcaagcatcgcaaacaatgacgatgttgagattgtagctgagacacctactggactccaagctcctgtggagtcacgtatgaatgattctgatggcattccggagactattgatgaagagacagaaacagatgaaccagctcaggcagatggcgttgttcatcctgaagacgtggccaaagtagaagatcaacagagtcaacaagatgacacggtggatgcagatgtggccccagaagaggttaaatgtgaagaaactgatcagcaggaagagaagcccaaatctgaagctcatgagccaacgattgatactcgagaagcgttgaatcaagaacctgctgaagaaactgatgactcgatgaataaaaagattgaagaaactgcacaccagaggaacatggcagctccaaaggagacaacactagaacatgaagcaacaatgagtgctacaccagtaaatacacaagtgcaggaccaggaaccattagaagaaatagaagataccgaaaaaggaatccaaccaagcagtggttctggggatgcaattccagaagatcaatctaatttaagtgttactatagacaatgacactgtgaatgaggatacagtgataggtattgagcaacaggatgatggtcagcaagatgaggatctagaaccagaaaaggcaactgaggatacacaacctgcaagcatgacaaacattccccaggttgaggttgtaactgaagcatcttctggagtccaaactcctggggacctgaatctcaacaactctgatgctgttccagatactattgatgcaaacacagaaacagatgagccatctaaagcacactctgttgttcatcctgaaaagaaagagagatttctagaagacgcaaccactgaggaacctacagaagaggtggtcaaagtagaagctcaacagagccagcaagcagatgtgatggatgcaaacatggtgcaggaagaggtgcctaaatctgaacatgctgatgagccagcaactgatgcttttgaagtgctgaatcaagaatctgttgatgagccagcaattcaagcacctgtaactattcaagtgcagaaccaggaaccattagaagaaatagaacttgctgaagcagttgatactgaagcaacagtgcaacaaagcagtgctgcttttgaggagtcggttccagaacatcaatgtaatttaggtgctacacataacacagagcaggaagacacgctggaagctagtgggcaatcaaaaggaggtcaggaataccaagacctaggaccagaaaatgcaactgaaaacacacaacaagcaagcatgacaaatattcttgatgttgaggttataactgaaacaccctctggaattcaaactcccatggagatcaatctggttatctctgatgccattccagatgcaactgatggaaacacagaaacagatgaaccagctaaagcacacactttcgttcatcctgaaaagaatgaagtctttccagaaaatacatttaccaccaaacctacagcagaggtagtcaaagtagaagatcagcagaaccagcaagatgatgcaatggatgcagaagtggtgctggaagaggtgcctaaatctgaacgtgctgatgagccagcaactgatgctcttgaagtgctggaatctgttgaagaaactgatgacccaatgaatgaaaagactgaagaaacaacccaacagagcaacataccagcatctgaggagacaacggcagaatatgacgcgacaagggagccacctgcaaataatcaagtgcagaacaaggaaccagtagatgaaagagaatctactgtagaagaaagagaagttgctgaagcagttgatactgaagcaccagtgcaacaaagcagtgttgcttttgatgaggcagttccagaagagcaccataatttaggtgttgcaaataacacagtgcaagaagacacaatggaagccactggacaaacacaagaaggtcagcaataccaagatctaggaccagaaaatgcagctgagaacacacaacctgcaagcacggaaaacattcctgatgttgaggttataaccaaagcaccttctgaaattcaaagtcctgtggagatcaatctggacatctctgatgccattccagatactaacgatggaaacacagaaacagatgagccagctaaagcaaacactgtcgctcgtcctgatacggaagagagctttgcagaagatacatctactggacctacagaagaggtggtcacactagaagatcaacagagccaacaagttgatgcaaaggatgcagacgtggtgcaggaagaggtgcctacatcggagcacaccgatgagccagcaaccgatgctgttgaagcgctgaatcaagaatctgatgaagaaacagatggcccagtatatgaaaatactgaagaaacaacacaccagagcaacatgcccgcatctgaggagacactaccagaaaatgatgtgacaacaagggagccatctgtaactattcaagcacagaaccaggaatcattagaagaaagagaagttcatgaagcagttgatactgaagcaacagttcaaccaagcagtgcttcttttgaggagtcagttccagaacatcaacataacttaggtgcgacaaatgacacagtgcagcaagacacactggaagcaactaagcaaacaaaaggaggtcagcaataccaggatctaggaccagaaaatgcaactgagaacacacaacctgcaagcatggcaaacattcctgatgttgatgttataaccaaagcatcttctggaattcaaactcctgttgagatcaaccgggacatctctgatgccattccagatgctactgatggaagcacagaaacaactgaaccagctaaagcgcacagtatcattcatcctgaaaagaaagagagctttcaagaagatacatctaccgcagaacctacagaagaggtgatcaaagtagaagatagacagagccagcaagctgaagcaatggatgcagacgtggtgcaggaagatgtgcctaaatctgaacatgctgatgagccaacagctgatgctcttgaagtgctgaatcaagaatctattgaagaaaccaatagcccagtgaatgaagagactgaagaagcaaccaaccagagcaacatgccagcatctgaggagacaataccaaaatatgacgcggcaacaagggatcaacctgtaaatattcaagcgcagaaccaggaaccagtagatgaaggagaagctactgtagaagaaagagaagtggctgaagcagttcatactgaagcaccagtgcaacaaagcagtgttgcttttgaggaggcagttccagaagaccaacataatttaggtgttgcaaataatacagtgcaagaagacatgatggaagctactgggcaaacaaaagaaggtcagcgataccaagatctaggaccagaaaatgcaatagagaacacacaacctgcaagcacggcaaacattcctgagatactactgatggaaacacaggaacagatgaactagttaaagcagaaggtgttatccatcctgaaaacaaagagagttttctagaagatacatctaccacagaacctttagaagaggtggccaatgtagaagatcagcacagccagcaagctgatgcaatggatgcagacgtggtgcaagaagaggtgcctaaatctaaagccgatgagccagcaactgatacccttgaagtgctcaatcaagaatatgctgaagaaaccagtggcccagcgaatgaaaagattgaagaaacagccaaccagagcaacatgctaacatctgaggagacagtaccagagtatgacacagcaacaagggatccacctgtaaatattcaagcacagaaccaggaatcattagaagaaagagaagctactgtagcagaaaatgaagttgctgaagcagttgatactgaagcaccagtgcaacaaagcagtgttgctcttgaggacgcagttccagaagatcaacataacttaggtgctacaaataacacagcgcaggaagacacgcaggacgctattgggcaaacaaaagaaggtcagcaattccatgatctaggaccagaaaatgcaactgagaacacacaacctgcaagcatggccaacattgctgatgttgatgtaacaaccgaagcaccttctggaattcaaactcctgtggagatcaatctggacatctctgatgccattcctgatactactgatggaaacacagaaacagataaactagttaaaacagaaggtgttatccatcctgaaaagaaagagagttttcctgaagatacatctaccgcagaacctacagaagaggtggccaatgtagaagatcagcaaagccagagagctgatgcaatggatgcagacgtggtggatgaagaggtgcctaaatctgaacatgctgatgagccagcaactgatgctcttgaagtgctgaatcaagattatgctgaagaaaccaatgacccagtgaatgaaaagactgaagaaacaggcaaccagagcaacatgccaccatctgaggagacaacaccagaatatgacacgacaacaagggagccacctgtaaatattcaagcacagaaccaggaatcattagaagaaagagaagctactgtagaagaaagtgaagttgccgaagcagttgatactgaagcaccagtgcaacaaagcagtgttgctcttgaggatgcagttccagaagatcaatataacttaattgctacaaataacacagtacaggaagacacacaagaagctattggacaaacaaaagaaggtcaacaataccatgatctaggaccagaaaatgcaactgagaacacagaacctgcaagcacggccaacactcctgatgttgatgtaataaccgaagcaccttctggaattcaaacttctattgagatcaatctggacatctccgatgccattccagatactaccgatggaaatgcaaaaacagatgaactagttaaagtagatggtgttatccttcctgaccacaaagagagcttttctgaagacacatgtgttgtagaacctacagaagagatgatagaagtagatcaacttggtcaacaagctgatgcgatacatgcagaggtattgcaggaagaggtgcctgagatgatagaagtagatcaacttggtcaacaagctgatgtgatacatgcagaggtattgcaggaagaggtgcataaatctgaacagtctgatgagccaggggtcgatgctcaagaagtgctgaaccaagaatctgctgaagaaactgatggcctggtgaatgtaaagactgatgaaactgagcacaagagcaacatggtggtccctgatgacacaattccagaacatgatgcacaaacgagagagccacctgtaaatattcaagaacaaagccgggaatcagtaggagatgctgaagcagtcaatactgaagcagaaatgcaacaaaacagtgttgcttttgaggagacaactccagaaaaccatgtagcaacctcagagccatgttctgaaatccaacatgcacatcatgtggaaccagaggaaatcaatggccctgaagatggcaaagatgatgagatcaccaacatgagcagcagagaatatctagttcgagataatgttctgcagagtggaccaataatagatatacaaccagttcaggagttggaacaaattaaaacggatgaagcttctaaccagactcatgctgttatcttcaatgacctagctcaggaagatgctacagcaacaagtgaaccacaagtgactgaaacagaactaaaggacattgaagccactgaagctgaagaaatcaccaaacttgaccatgttactcattccaaggaacttgcagtagaaaatgattcaacagcagatgaaccacataagggtgaaatccatcaaactcttgaacaagatttagttgaagttaaggacactggaacttaccatgaaaaaacaatatctacttcagaggacacagtacaagataatttgacagaagatgagccaagttttggtagtcaagaagtagatgatgcagagtcaacagaagaaactaagcaaaacatagctgagaatattgcagaagtctctgatgtggcgattgttgatgacgcaattgaacagaatgtgctacagactgaggatatcgttgaaatgcataaacaggagctggaacgagaagaaacagagagaatagaacctgttgaatcagaggaagcttctgatcagaggaatgatgcaccattcgattattcagctcgagaagataatacaaaggaaagtgagatacagcagacagaatcagcaacggaaacaaatgaaattgaacccactgaaattgaagcagttcctcgagaaagcaatacctgtgtttcagaggagccttctcaagaagatcatataaaagaaagtgaaacaagttttgacaatcaagaagtgaacatcacagaatcttcagaagtaaatgatagtcacaaagatataatatctggaggaatctctgacccaagcaacacagcttctgctggggattcatctgaaggaagcaatgtccctgaaggcgagccacctgaacaggctgtgcaggaactgggatcagaggagataaagaacactcaaattgatgaagtgaatgaaacatcccttgaaatgaatgctactgtctttcagataccaagtcaagaagaaaatccagacacaaccaaattgcatgaatcaacagaggtgagcaacattgaagccacagaaatgcacggaaacccccaccaaagtgatctggctgctcagtcagaggagcaaacaacagaaggaatatcaagtggtctgaaaccagaatcaattgaaggtaatgatacagaagccaaaaaatgtcaaagtacctctcaggaaaaaacaatctctgcctctgagtctgtcccagaagatgcaaccactgaaccagatgttgatcaccaacaacttcaggatcaagaatctgccaaactcaaggaaaccgaagctgataaatttcaagaaattgtctcatctaacactctttcttctgaggagttcacatcaacagaaccaagttctgacaccgaagcagacaattcacagttagcagaagaaactgaggacaccgaaattgtgaaaagtaatactgctcttgctgaggcagcagctccagaaacagatgcaactgctgatacatcatctttccatgagacagatctagaagagaacaaggacacaggaacaattgaaacagaggatggtatggtatcaagtgactatacatcagaaaagatggacacggaaaccatggagactgaagcagtccctcatgatagtagtgatgcaaatataaaagaacacactgaagacgatacttcaacaccaaatgccccacatgctggtactgaacctgttcatgagctagaatcagttgaagtcagcgctgacacaacggaacatccaggagagacccatgactctgcttctgatgagcttactccaacagaagaaaatacagcagtaacagaaccatcttttagtacacaggaagtgcagaatctgacatctcaagaaatcaaggacagcgaagatgacaaaactgatgaattctcagatatcaatagctttcctattcctggagaggcagaccaagtaccaagaagtgaaacaactcctgatgtccaagaagtggaagaactgggtttaacagaagaaacaagagacattgaagccatagagcctggagatcagcaagaagacatagtttctacccttgagaagccagaaatagacggtgaaccaagtgctgataatcagcaggttcatgaggacaaactaccagaagtggaagacaataaagcaattgaagctgaagcctccaagcaaagtaatattgccactcctgataatgcagctgaagaaaggaatgaactggaaagtgatccagatccatatgcccagccagcagaacaggtagaattatccaaagacaatgagaacagccagcttgtgaagacagaagaaacctcagaccaaagcaattttgtcgtccttagaaggactacagaagattctgttgcaagagaaattgacccacctgttgccattaaacaagagcaaccagtggaagaaatcaagggtgtcgatgccactgaagctgaagaagactttcgtacaacccaagctgttgcaatagagaaactagcttcagtcaataaaatagcaacagtagaaccgacttatgatattcagcgaatggatgacttggaagcaacagaggaaaagaagcacgctgaagccattaatgaaggagatcaatccaatattgctgtttcagaggaacaaactccaacatataatggagaaacaccagaagatcatcatgtagaatcaaatgaaggaacgatggggaatgaaactgacaatatcattttggcacacggaatcaaagatgaaatacagaagtcagcagaactaaaggacggtccatgtgatttgtctgaaactgttttaacaactcggagaagtgagaacatgattgatgaagataatgttcaaacttatggcaatgatacagtagaggcttcaaacagtatccatcaagtcaaagaagagccagatgctggaaccgaacataattcaagccaaatgataagtgaatgtagtggagagaacgaaactcatgtccaagatagagatgtagacatgtggattctcacagaaggtgtcattgcagaagcatcacaggctttattggaaaatgatcctcaggcagcacaagatactatagaaaaggatgatacaacgaaaagtagtgagccaatcagtgatcacgatagcaggcaacattgtgatgtagaagcacttcaacaacaaagttgtgagacagaggccttatccattttggaacaagatgaggctctgcaaaagattgactcagatcaaaagcagaaagaagttgaggagattgaaagtcagaatgatgaacttcaggtagatgaacagaaacatgaagacaagagggatgatttagccaaagaaccactagtggagtaccagaatttcgaaaacagagcttcaaacaacacaaaagacaatgatgcattcaaggttgaacaaacagaggcagccaatagtgagattctcaagaataaagccctacatatatccaaggaatccaccccaagcattatggctatgaaggttgaaaacattaaggaaacaagtgaaggaactgaagaagatgatgctgccaaaaatgataacaaagatgaacaggagaatgcagaaaatgttgatatagtatcaaaaacttctactaatgaacaaggccaaacaactgatgaaattagaaaagaagaggatcctgttcacatcattcaagcatcagagaaagagatcgcagatgaaatagaagaaagtaaagaaatacatgaagacaatgctatttgtcatgataaattacagacaaattctgaaaaggaagagtcacctcaaccgcattccaatgaaccatacaatgtggatgctaaaattgatgatacaacatctctatgcgaagaaataatccatgacaatacaagtataaatcctagagaaattgaagagataggagaaaacaaaggaccagacttcacttctgaaccttctgtagaatcatccatacagaacaatgttgaagactcaagcagtcatcacaaggttgaagatgaaaagctttcaatgtctgagaaaaatgatgtagatactgaagctatgcaagaaataaatgatgaatctggcgcggatataaaccaaacagaacaatgtcaagaagaaattactgcagatgatgttctgcaacttgaaacagaaggaaattcatttgacaagattgaagagactgcttcaaatgaggaaacagagactagtacagcagccactgaagcagtaacgttcaatgaagatattactgacaaggttagcggagctgatggagcaccgtctaacggaagtctcaagacctttactgacactggaagggatattgatgttccattggtaattacaacatcaaaggaagaaagtgtgaacgacactatggaaaacctcaatcttgaccttcctggacatcaggcacaggatggcaacaccgctgaaaaggtgctcagcttagaggaaagagaaagagagatgccttcatcagagaagctccttcaaactgaaccaggagagaatcaaattcccaatgaacaggatgaaaaggacatacgagatgagaatcaaactctaaaagaaaaggatgaagatgacatgcaagatacagaatttggagaggctaagaaagaagttcaacaagaattacctgtctcccattttctgatgaatctaatattgggaaaagagagcagtgatgcaaatgaagattcagaatctgaggctgcaaggaagcaaggtgaagcgacagaagatgacagctgcacgttcatttctgaacaagaagaaagtctggggtcacttcctacagaaaataaggtggatgacaatcccacctttgttgaacaagaaaaacatgaagttaaatgctctgaagaaacacaggaaatggtcgaagaacaaagtgatgatcagctgcacacagaaagatcaattgaaattgatgaggatatcaaaaagaacactcgtgctttagaaataccagcataccaagacaatccccaggatggaatttctggtgaattgcagacagaagaagcagctggtgtttctacaaaaatggtaactagagatattgatatttcgagtgttgtgctggacaacagaacagttggtactgtgtgtcaggaaaaaatggaggtatcaacaaaaaatgaaaatggaagcttgaggagcagcctgaatgactcaacaaacacaatggctccccaagacgatactctaggagaaggacaatcaaggctcgtgcttgaacctttacctgaagacaaaagtgttgatgtagtttctgagcaagcacctttgttgacagaatcaggaatgactgacgcgaatgacttatctagcgatactacaagtgctcaaaaccctgtgtctacaaaacccactgaatctgccagagttgaggccacatattctactgatattcaactggagaatgaagaagtagataagaaagaagaggaccagcatgcaaacacaaccaaagatgaagtttctaaagagattgtagaaagttcacatataaatctgcagaaaataacaaggcctgaagaaaaatctaatgagctagaaactcaaattaccgaaccagtttgtgacagtcaggcaattttggcccatgaaaaggaaatatctgaagaaaactttccaacagcagtcgaaattcaggctgatggtccaaacatgcagatcaaccaagataagcaagatgaagctgctgacatcgaaactgaaatgaagccagaaaaattaggggaatctaattttcaggaacaccaggacaatggtactgagcaaaagtctcctaaagagactgatgaaggagaccagcaacttgtggccaagaaagagattctgacccaagaaatggatgtgcatgagacagttgaaagacctcagcaagcagttgaaagtcctcagcaaacagtgagcataacatccaatgaagaccaggaactgtttgattcaaaggtccaggaacgtgatctcaatgtagtttcacccagagaagcttctgaggctgaagaaaactttgtggacgtaaccaagccagaattcagcacagatgaagaacaaagtccaaaggctgatgcagaagagaagatttatgacgagaagataaaggacatagagggaactaagaatttaactgatgaagcagcaataaaaactgaagcaccaggagcagcccagaagacacgtaaaaaatatagcctattgtctggcgtgggatcgaaggtaaaacaccaactcgcaaaagtgaagaaagccattgtaggcaaacctgggcacacaaaaccagtatctccgacggcataaaactccagtcaccttagaacatgtacattattgtattgtttgtagtcttgtgagccatttatttcggtggtagtgtttgcgatgggctaggagaaggtcctcttcacaaccatagcattggaattctatgatgttgcacatgaaacaccccccccccccctcgagagtatgttgaagatgtttgtaaatatgtctagtgtgtaaattcaagtttccctgaaactttgaggtagaatcaaggacatgtaattggtcaattgtttgtattcttcgttgaaatgcacaagcagtttgtggtcatgatgcagcttgcagcat

SEQ ID NO: 18472 - DNA, 665 bp, Zea Mays
atcagttgtgagtacaacaattatcttctctccctgctgtcctccacttatgtgcacaaactgggatagacttggggtggacaatatggagctcgagattcagtcaccccctctacagaaaattcaccccctctacagaaaaatatcagtttgcaccattgagcctatccacaagggaagtccctttctgtttattactgtcttcagaactggacataattagataattgtgttgtacctgtggtattggaccaggttcggtgtctcaactgtgcagatgaaccaatgtggaattgatacttgggagccacgtttgtaagcccctattgtgctggcgcactgggaaacactccccacagcatggttgccatgtgcagggacacctgcccctatattcagtgccttggggctgaattttgtgaagttctcccctaccctcaacctctagccaaagtagctgcttgtgcgttgtagttcctgtctccacgacagttttagctcccctcctcagccactagatcgatctgcccttgttcatcacaaccaactcctgtgtctggtgaccacaacagcaatccttcaacctcatcatggccagggttcgtggagattgtctcggccgtgttgtgcccattccttgttcctcacaggagaagttttattcc

SEQ ID NO: 18473 - DNA, 2778 bp, Zea Mays
tctcgtatcgagtgctactttctccgtcttgctacatcagctccggaagcgtgggcccaatgaatcccaagtccaaacatcagtcagattttgacatttccgcagcgtttcaccgagagccacaagcccgcaagcaacaaatccgcgctccctgattcgccatcctcttcaccaagttaggcgacgactggcgcccatcgtcgattccccgttctccgtttccgtctcgcgtgtttggtgctttcgatctccccaaggcggcaggcggcagcgccgtacgcgttgcgggaagattttggttggtggattgttggtggcggctccactccgtcccagtgcactggtccaatccaaatggcggccaataatagcgacccgatccaggatcagctgggggaaggaggggcgggcgtgaggcacgaggctgaggaggaggaggtgggggaggagacgtcttctgccgcggcgcaggcgaccgcgacgacgatgctgccccggtcgagctcgcggccgcagctggacctcagcggcgcggcgatccacgggacgctggaggaccgtaaccctaccatccttttgcccaaccagtccgacgacatctctcacctcgcccttgacatcggcggatctcttataaaactggtgtacttctcgcgacatgctgagctctccactgaagataagcacaagatatccacaaagagaagacttgggatgtttaatggtggcaggagaagctacccgattcttggagggaggctccacttcgtaaagtttgagactgggaagctaaatgaatgtttggacttcatttcttccaaacaactacatcgtggtggaattgattcaccttcatggcgctctggggctcagtctgatgacattgtaattaaggcaacaggtggtggagcattcaagtatgcagatgtcttcaaggaaagattgggagtcagccttgaaaaggaagatgaaatggactgtcttgtggctggagcaaactttttgcttaaggctatacgtcatgaagcttttacacacatggatggccagaagcaatatgttcagattgatcagaatgacttgtttcccttccttcttgttaatgtcggatctggtgttagtataatcaaggttgatgggcatgggaaatttcagcgagtaagtgggacaaatgttggtggtggtacgtactggggattggggaggctaatgacgaagtgcaaaagttttgatgagttgctagagttgagccagcgtggagacaatagcaccatggacatgcttgtaggagacatatatggtggtctggactactccaagattggcctttcagcatctacaattgcctctagttttggaaagataatttcagaaaacaaggagctatcagattatagacctgaagatatatcgctctctctgttacggatgatttcatataatattggccagatttcctatcttaatgcacttcgttatggactcaagaggatattttttggtggattcttcatccgtggtcatgcctacactatggatacaatttcttttgcagtgcatttctggtcaaaaggagaggcacaagctatgtttctgcgccatgagggctttctaggagctcttggtgcatttatgagttatgagaagcatggtcttgatgacttaagggtacatcatttggttgaacgcttcccaatgggtgctccatatgttggtggaaagattcacgggccacctcttggagatctcaatgagaagatatcatggatggagaagtttgtgcaaaagggtactcagattatagcccctgtacctatgggagttccagctacgacaggtatgggaggctttgaaaggccgactgctaagggtgacatcttgcggtcagatgcaagtgcagcgctaaatgtcggtgttctccatcttgtacccacattggatgtatttccattgttggaagatccaaagacgtatgaaccaaacacaattgatcttgaccaggatgagttcaagtactggttcaagattttgtcagatcattcgccggacctcgtggacaaggcagttgctagtgaaggtgggactgatgatgccaaaagacggggtgatgcatttgcacatgccttttctgctcatctggcaagattgatggaggagccagctgcttatggaaagtttggtttggccaacctgttggaattgagagaagaatgtctgagggaatttcagttcgttgatgcatatattagcatcaagcaaagggaaaatgaagcttcactggctgttttaccggatcttctgatggaacttgatagtatgaatgaggaagctaggctgcttgcactaattgaaggtgtccttgctgcaaatatatttgattgggggtctcgagcttgtgtagaactttatcacaagggaactataatagaaatctatcgcatgagtcgcaagaagatgcaacgtccttggcggattgatgactttgacatgttcaaaaagagaatgcttactgataggaaggaccaatcatacaaaagagcactgctttttgttgataactcaggtgctgatgtggtccttggaatgcttcctttagctagggagcttttacgccatggaacagagggagttcagacccttgcgcaacttcttattggaagggccaataagggtcaagcttacttcctcccaccagtcatcaaaggaagtagaattgagactaggagtgagatgctgcaaaccgacagctttcaggatattaaaccaaacttcccttga

SEQ ID NO: 18474 - DNA, 1843 bp, Zea Mays
gcagtatcaggcggaagccgccaacctcgccaccgccgcacccacatgcgctcgccttccactgtttggccgcacacctacaaacaaggccctcctttccctggcttgtcccgctatcgccccgcttccgcccgctggccgctgtccgtcagctctcgcgctaccggctgcgggataaggcaagcttgtcgctcgccttggtggtgtgcttccagttccagccaccagcgctagcttcctctgcgttgcacgtcggaaatggattcctctagcagaggcatccgcttcctcgtccaccgccgcgcgctgctgctgctgctgctcgtcgcgtcgtcgtccctcgtcggcacatcgcgtggcagggaggcgcagccgctgcccgcggcggcggccacggccctcggcagcaggcggtcgccggagcggcacggcctggcgctggacttctacgccaggacgtgccccgctgtcgaccagatcgtcgccaacgtcaccgccgcccagtacagggacttccccgccgccggacccgccgtgctccgcctcttccaccacgactgcttcgtggaagggtgtgacgcgtccattttgatcgcgccgacggccgacgcggccgcgcccgcgcgcccgccgccacccagggtggagcgcgacatggaggagaacaggaacctgccgcaggaggcgttcgacacggtggagctcgccaaggctgccgtggagagcaagtgccccgggatcgtctcctgcgccgacgtcctcgccctcgccgcccgagactacgtccagctggtacgtgggtgggccgtactacgcggtgaagaagggccggaaggacagcaaggtgtccctggcggggaaggtccgcggcagcctgccgcgggccaactcgacggtggacgagctcctgcgcgtgttcgcgggcaagggcctgggcgcggcggacctggtggcgctctccggcgcgcacaccgtcgggttcgcgcactgcgtccacgtgctgggccgcatctacgacttccgcggcacgcggcggccggacccggtcatggacgcccgcctcgtgaaggcgctccgcatgtcgtgcccgtcgtcgggcggcagcgcccgcgtcgtggtgcccttcgacgtcagcacgcccttccagttcgaccacgcctactacgccaacctgcaggccaggctgggcctgctggcctccgaccaggcgctgttcctggacgcgcgcaccaggccgctcgtgcaggacctcgccgccaacaagacccgcttcttccaggcgttcgtggccagcatggaccggatgggctccatccggatcaagaaggggaggaaaggagaggtcaggaaagtctgtagccagcacctgttttcagcctgatctgcgtctgcattcagcagcatgcgtccgtacgtcgtcgtcggtgtcagctcatcagcgtgccagcaccagcatacacacgggactagctcgttcgtggttactacgtttggggcctcgcgttgcgtgattagagctatctttgatgcatgtgacggcagtttagtttagagaggagtagcttggccattggttttagggtcgcgtgtgtttgtgcaagaaaatgtgtaattgtgtatgcatgcaactatgcaagtacagtgttctgttgtgtgttttttatttaggcgtgcctaggaatttatacgagcatgccggctatgctagtttgtctgtgtgacattccatctgtttgattatattgaaaaactgcatgatgcagagcacaataggcacgtagcggcctaggctatccgtacatgtacaactctatatttctaccctaattaaaacaaatgttct

SEQ ID NO: 18475 - DNA, 1521 bp, Zea Mays
tgtccgtctgtctccaccagctaccgagccagccagcaaacaagcaagcaaccgactgcccccttgcccgtacgcagtacacctcgcgccggtgagcgagcgaatgccgcgggagctctagccctcggctcctcgcccgggccggcgtgtcgttccgatccatgaggaagctgccgccagcgcaccgcctccggtggatgcgcgcgctgctcctcgcgctcccgctcgtctcgctccccatcctctacgcggcgctcggcgcggcgcgctcgtcggcctcggcggcgcggccgccgccgccgccgccgcagcagcagcagcagcggaggccgccgccgaggctggcgtacctcataacgggcgcaggccccggggacggcccgcggatccggaggctgatgcgggcgctctaccacccctggaactactacctcgtcggagtggcgggggaggacgagcggacggatctcgaagccttcgtgcgcgcccaggaggcgccgcgccggtacggcaatgtccgggtgtcggccgcgggggagtggggctccgtctcgcggaggggccccaccgaattggcctccacgctccacgccgccgcggtgctgctccgggagttcgacggctggagctggttcatcaatcttagcgcctccgattacccgctcatgccccaagatgacatccttcatatcttctcatacatgccaagagacctcaatttcattgagcacacaagcaatattggttggaaagagtaagcatatgatttcaatattctgtggttctttattcttaacctctcttttttttattatgattcttgggttgcatgttgcaggtatcaaagagcccgaccaatcattgtagacccagcattgcaggtcccaaataaaactgaggttgtaacaacaaaggagaaaaggagtatgccctcagctttcaaaatatttgtaggttcgtcttgggtgatgcttagtagatcattcctggagttttgcttactgggatgggataaccttcctcgcacactactcatgtatttcaccaacttcctctcgtcctcagaaggctacttccacacagtgatctgcaactcagagtactaccagaacaccactgtgaacagtgatctgcgcttcatggcatgggataacccacctcggacgcaccctgctaacctcacaacagagcattttgatgcaatggcagacagcggggcgccgtttgcacactcatttgccaatgataactcagtcctggatatgatcgacgccaagttgttggggcgagcacctgaccgcttcacgccgggtggatggtgcctgggtagctcagtaggcgggaaagatccgtgtaccttcttgggaaggtcctttattctcaggccgaccaaaggctcggccaagctagagaagttgctgttgaaacttttggaacctgataacttcaggcctaaacagtgtaaataacactcattttacatggtagccagttcttttttttttttgtgtctaaattacg

SEQ ID NO: 18476 - DNA, 209 bp, Zea Mays
aatatctatggcatttcattagccaccctaacttgtttggggcttaaaggctttgttgttgttgtattccaggatatgcatagttcctccaagtaaaatcaacacgatgaaagttccaaactatcagtttcaatgtgtttacctgcacattaccgatcagcaatgcaaacagaactaagcctgatatcgagacaaaaactgcgaataaa

SEQ ID NO: 18477 - DNA, 2774 bp, Zea Mays
gccactcaagaaagaattccaaggacttggacgaaatagatgaatacggcgattataacatggaggaacccagttccagcaaaccaacagtcaaaagacttatggaggacgagctacgaaagctaaaacagctgaagcttccaaatgatgaggttgagagaatattagctgacctgggacatggtgcctgcctggacaaaagttcagcccaaaacagcaaagcgaagaagggagaccaaaatcacatcagaggtatcaccaccacggctgctccatctggatctttggatcccactgcttccaactgcataaaagaagcagaagaaaatgagcttgaatttgccttggcagatttcttaggacggatccatagaaattgcaacaataatggggagttatgtacggagatgaaagccctaatccaaacaaagattgcagagctagataatcctccgtgcacatttgcttatgagcagcaaacttcacggggtgacgaatatgatactgctggtggcaaacatcgatgtagcagtagtaaaactcagcccaaaaaattcagagatgcgctggagatgctaagctcagacaccgaacttttctttcagaagtcaaattcacgtattttggagagcgcccaaagaaaccaaaacagactgatagggaacaatctagagcccacaaaaatagcagataataccgactccaacaaagatccaaagagtctgaaccagcatgagttggccaccaggagatatggtaaagagagcaggaatatctttttctggaagaaggaaagatcctcaccaaggcagactgcacaaggaaccagtagttctcagccagttaacaaaatagttatactgaagccaaatccaaggagagagatcggccatgctgtggctgttagttcaacccaagctccaaaactaggtgcaaccgagagctcaaaattttcaattaaggaggtcagaaggagattcagaatcgtgactagtgaagctacaaaaggaataccctcagtgtctgaagataacctccaaaaaggtcagcattggctcaacagttcagctttcacaataataaaagataccagacagctcgctgaacagacctcagaagggaaattctcatcttcagttatgaaggattttagatcatcaaacagcggtaggcaaaagaaaagaaaaaatgatgggccaaccgaaaaaaacagtagcataattacgtcatccaaggatgaatctgtcttctatgacgaggccaggaaacatctaacagagattctcaaggacaaaagacaaacaaccaagcagcacccgacacttgagatctcaaggtccttggtgaggatgctttccttccctcagtccagcacatcatcacctaggagtagccctagggcaaaagactgcatttacctctcacctgaagaggcaagcattcgtgccatatacaagtcaaataaagatcttttagaagaagaaagccagtctggagaatttccagagaatgttgtgtgtgatcctagtgaagcactgcatgagcaggctgttcaggaaaggtggtgcgtcaaagaagaaagtcaagaaacaacacaagaagaacttgacactctgcgcactaaagaaattgacaagctggattgcatgggaaaaaatagcaatgcatggggcaccccagcaaagcaatgcacatataaaccatcacaagatatggtgggagaagcagagccaggacaaaggcatgtcaggacgtttccaagctcccctgagaacgactttgaaaaactggaatgccaagagcccacgactccccgaccgagtgcacagatcgaacagatatcacaattttctcctgatggaaaccacgaaaagcaagaacagccgagccctcaatctgttcttgatgtgttcttcctcgacggtgagttgcacaaagatatcttgaggacacgctacaacaccacaggggatggttcagaccaagggattttctgggaggacaagcatccgaggttatgttacataaaggaattgctagagctgtcagaattgtgtgcaaaccagaacttagaggtatggtatctagaagatgaattaatcagcccttgcttgttcgaagaagtacatggaggcaatcaaattgatggtacgaagcttttatttgactgcatttgcgaagctgtgacagaaatccaggacatatactttagaaaccctccatgcctatcttctctcacacacagcataagggcacctcctccagcgggacaaaaccttatctcagaaatcaataagcgtgttgaacgccatcttcactatcgatttccaagcacattagaccagctggttaacatggatcttgaaggtggcagttggatggatcttggatcagaaagcggagaggtcgctgtagtaatatgggactgcacactagatgagcttttggaagaattagtttacgacctgtggatttcaggcttcaatctcgcagccggtaaccatctgtagatttggtagagtcataccgttaaatagaagtaacatgtttgtgtggcaaaatcctgtgatttggacatggagggctgcatgagtcgttcttaaaggcatgagcatggtacgggatgttcactcatgtgaatttcatcgtgaccctcaacatattattatgtgtctagtgtcagttaggcctagtttggatactctagtaatgagtaggatttgagtggattaagatgtattgagagagtatttaatctattggggatttacacc

SEQ ID NO: 18478 - DNA, 5491 bp, Zea Mays
tcgatctaagcttctggttccttactatggcatctgaaagttttgcactacccaaatacctggaacaacacaggatcaccttcaaatatttaacatcgaggctaagactaagatcaagtctcaccaaatgcccgaacaggttgtattttggaagtggatcactcccaaattgttgggtttagtgacacaaacatctgtttaccactggtcgattgaaggtgattctgagcccaccaagatgtttgataggacagctaacttggcaaacaatcaaatcatcaactatcgatgtgacccagcggagaagtggcttgtgcttattggaattgcaccgggagccccagagagaccacaactggtgaagggaaatatgcaacttttttctgtcgatcaacagcgtagccaggcgcttgaagcccatgcagcatcttttgcaacatttaaggtactgtttcagttctttgtgatgcttattgccttatattcttgtttttatttttagtatttagtaattaagcaaactttctttatctaattgtctaggttgttggtaatgagaacccatcaacccttatttgttttgcctcaaagacaactaatgctggacagatcacttcaaagttgcatgttattgaactgggtgcccagccagggaaacctggcttttctaagaaacaagcggaccttttcttcccaccagatttccaggatgattttcccgtagctatgcaggtttcacaaaagtatgggcttatctatgtaattacaaagcttggccttttgtttgtatatgacttggaaactgctgctgcagtttacagaaatagaatcagtccagaccctatattcttgacagcagaatcttcctctactggtggattttatgccatcaacagaagagggcaggttttacatgccacggttaatgatgcaactgttgtaccatttgttagcggccagctgaacaaccttgagcttgctgttaatcttgccaagagagcaaatcttcctggtgcagagaacttggttgtgcaaaggttccaggaactgtttgcgcaaacaaaatacaaggaagcagctgagctggctgcagagtctccgcagggcctcttgaggactcctgaaactgttgcgaaatttcagagtgttcctgtgcaagctgggcaaacacccccactcttgcagtactttggcacattgctaactcgagggaagctcaatgcctttgagtctcttgagctatctcgacttgttgtcaatcagaacaaaaagaaccttctggaaaactggttggctgaagacaaactggagtgcagtgaagaactaggagatcttgtcaagactgtggacaatgatcttgcactgaaaatatacatcaaggccagggcaacccctaaagttgttgctgcttttgctgaaaggagggagtttgacaaaatacttatatattcaaagcaggttggatacaccccagattatctcttcctcctgcaaaccattttgcggacagatccacagggagctgtcaactttgcattgatgatgtcacaaatggagggaggttgtccagtagactacaacactatcactgatctcttccttcagagaaatatgatacgggaggctacagcttttctgctggatgttctgaagccaaacttgccggatcatgcttttcttcaaaccaaggttttggagatcaacttagtgacttacccaaatgttgcagatgccattcttgcgaatggtatgttcagtcattatgaccgtcctcgtattgctcagctctgtgaaaaggctggattatacttgcgtgccctccagcattattcagagttgcctgatatcaagcgtgtcattgtaaatactcatgccattgagccccaggcacttgttgagttctttggcaccctttcaagggagtgggcactagagtgcatgaaggaccttctactggtaaatctgaggggaaatcttcagattgttgtgcaggctgcgaaagaatattctgaacaactaggagttgatgcttgcataaaattatttgaacaattcaaatcttatgagggcctctactttttcttgggatcctatttgagctccagtgaggatccagatatccatttcaaatacatagaagcagctgcaagaactggacagatcaaagaagttgagcgtgtaaccagagagtctaatttctatgatgcggagaagacaaagaactttttgatggaagcaaagctacctgatgcccgcccactgattaatgtttgtgaccgctttggatttgttccagatctgactcactatctatatacaaacaatatgcttcggtatattgagggctatgtacaaaaagtcaatcctggtaatgctcccttggtagttgggcaacttctggatgatgaatgcccggaagatttcatcaagggtttgattctctctgttcgttctctgcttcctgttgagccactagttgatgaatgcgagaagaggaaccgcctacggttgcttactcaattcttggagcatctagtgagtgaaggtagccaagatgtgcatgtccacaatgctcttgggaaaatcatcatcgacagcaacaataaccctgagcatttccttactaccaacccattttatgactctcgtgttgtgggcaaatactgtgaaaagcgagatcctacacttgctgttgttgcttatagacgtgggcaatgtgacgacgagcttattaatgtcactaacaaaaactcattgttcaagctacaagctagatatgtggttgagagaatggatggtgatctgtgggataaagttcttcagcctgagaatgaatatagaaggcaactcattgaccaagtggtttcgaccgcattgcctgaaagcaagagccccgagcaagtctctgctgctgttaaggcattcatgactgctgaccttcctcacgaattgattgagcttcttgaaaagattgttcttcagaattctgcattcagtggaaacttcaacctgcagaacctactcatcctgaccgccatcaaggcggatccatccagagtcatggactatgttaacagactagacaattttgatgggcctgctgttggtgaagttgctgtcgaggcacagctgtacgaggaggcttttgctatatttaagaagttcaacttaaatgtgcaggctgttgatgttctcttggataacatccgaagcatagacagggctgaggagtttgccttccgtgttgaagaagatgctgtttggagccaggttgctaaagcccagttacgtgaaggtctggtcagtgaagcaattgagtccttcattcgtgcagatgatgcagcacacttccttgatgtcatccgtgcggctgaggaagccaatgtgtacaatgatttagtgaagtaccttctgatggtaaggcaaaaggcacgggaacctaaagtcgacggagaactcatctttgcatacgctaagattgacagactcagtgacattgaagaattcatacttatgccaaatgttgccaaccttcaaaatgttggtgaccgtctatatgatgaagaactatatgaagctgcaaagatcatatatgctttcatctcaaactgggctaagctggctgttaccctggttaagctgaagcagtaccaaggtgctgtggatgctgctcgcaaggctaacagtgctaaaacatggaaggaggtctgctttgcttgtgttgacgcggaggagttccgtcttgcacaaatatgtggtctcaatattattgttcaggttgacgacctggaagaagtcagtgagtactaccagaacagaggatgcttcagtgaacttattgctctcatggagagtggtcttggacttgaacgtgcacacatgggcatcttcacagaattgggagttctatatgctagataccgctctgagaagcttatggagcacatcaaacttttctccacccggctcaacattcctaagcttattcgagcttgtgacgaacagcagcactggaaagaacttacctacctgtacatacagtatgatgaatttgacaatgctgccaccacaattatgaaccactctccagatgcatgggatcacatgcagttcaaggatgtctgcgttaaagttgcaattgtcgagctatattacaaggcagttcacttttatctgcaagagcatcctgatctcatcaatgatatgctaaacgtgcttgcacttcgtttagatcacaccatagttgtagacataatgcgcaaggctggtcagttgcatcttgtgaaaccatatatggttgcagttcagagtaacaatgtatctgccgtgaatgaagccttgaatgagctttatgtcgaagaggaggactacgagagactccgtgaatcagttgacatgcatgacaactttgaccagattggtcttgcccagaagcttgagaagcatgaattgctggagatgaggaggatcgccgcctacatttacaagaaggctggcaggtggaagcagtcgattgctctatcgaagaaagacaacatgtacaaggactgcatggagacatgctcacaatctggcgaccgtgaactgtcagaggacttgctcgtgtatttcattgagcagggtaagaaagaatgttttgcttcttgcctcttcatttgctacgacctgatccggccagatgtggctcttgagcttgcatggatgaacaacatggtggactttgccttcccgtacctgttgcagttcattcgtgaatacactagcaaggtggatgatttagtgaaggacaagatcgagtcgcagaaggaagaaagagccaaggagaaggaggagaaagaccttgtggctcagcagaacatgtatgcgcagctgcttcctctcgctttgccggcgccgccaatgcctggcatgggtggtcctccacctccgatgggtggaatgggcatgcctcccatgggcgggatgggtatgccgccgatgggccctggtccgatgccagcattcggaatgggaggctactgagtggtggttttgcagggagcttagatgatgatgtgaattgttccattgcaagcataagtggaacctcattggagctgtagatggttttacagtttgggaaatcaatattctttattgtaccaggaaacttttttttgggcgagtgagtgaaatcagcctgacccatagtttgagaagcgcaacctgtgatatgttttacgatgggatcggaaataggatgattaggttgtttcagcatgagctgttaaaagctggtaccatgtgtatgtatagtggtgtgataaaatcttttgcgtgtcggcagagtgaagatagacaaatgtatgtttccttgttacgacctgttaatctatatattagcccgacttgtagttcaaatgccctacattattttcttctagctcctccaacttgtagttcaatcggtaatactatatttattaataaattcaatggatatgttctctat

SEQ ID NO: 18479 - DNA, 2731 bp, Zea Mays
gcagctccacaacaattcgtgcctgcctgccctgcctctcggacacctccctcgtcctccccctcctacgccgcccccgtcctcggcccccacgcgctcgcgcggcgcacgaggcgacgaacccgacctcctcctccgcgcccgtccctgccaccggtcgccgatgagctcggagggctggggcgctgacctgagttttatggagagaggatgccagagctgcgaagcagtactcgccaagcatgcctaaggtcgaagaagcttgaagatctgcagctaggagagccgcctgcgaaaccggtctcacctgctccgccgagggcaggaaagcgtgctcctacacgtgctgctaggggcagaaagggtgccactgggaaaggagtgccccctgcacctacgactagaagaaagcggggtaatattgtcgacttggaagctgatccagcttgtgaagacccccctaaagctgtcaagggactggaagttgctgctgctgctgcacccaagaaccttcctttgaaggaggtagccgaggttggtgttctgaaaatgaatggtgtgagtgcagagaagattattggggctgaagatgaatcaacagcgacacctgtgccagagagggttcaagtaggtaattctccagagtacataactgacaggaagttaggtaaaggtggttttggtcaggtctatgttggtcgaagggtttctggtggagctgcccgcactggtcctgatgcatatgaggtcgcattgaaattagagcatcgaaacagtaaaggatgcaattatggccctccatatgagtggcaggtttataacactctcaatggttgctatggcataccatcggtccactacaagggtcgtcagggcgactactatatacttgtaatggatatgcttggtcccagcctttgggacgtgtggaattcaatggggcaggcgatgactccaaatatggctgcttgcattgctgtagagagcatatcgattcttgagaagctccattctaaagggtttgtgcatggtgatgtgaaaccagagaattttctgcttggtcagcctggatcgcctgacgataagaaactttaccttatagatctcggtttagcatccaagtggaaagagaataatggtcatcatgttgattatgatcaacggcctgatatctttaggggaacaattagatatgcgagtgtccatgctcatttggggcgcactggtagtaggagggatgatttagagtcactggcatacacccttattttcctgattagaggaagattgccttggcaaggctaccagggagataccaagagtttccttgtttgcaagaagaaaatggctacttctccagagatgctttgttgtttctgtccagctccattcaaacagtttcttgagattgtcacaaatatgaaatttgatgaagagccaaattatgccaagcttatctctatttttgatggtttgattgaagcacctgcgtcgagaccagtcagaattgatggggccctcaagaaacgtggaagattgcatgcaaatctagaagatgaacaacctaaaaagaaggttagattagggagcccagcggctcaatggatttcagtttataatgctaggcgacccatgaagcagaggtaccattacaatgtggctgactcaaggctaagtcaacatatagaaaagggtaatgatgacgggctttacgttagttgtgtggcttcctcggcaaacctttgggcactcatcatggacgctggaactggtttctgttctcaagtttacgagctctcaccagtttttctccacaaggactggataatggagcagtgggagaaaagttactacataacagcaattgctggatcaaccaatgggagttcattggttgtcatgtccaaaggaactccttacacacagcaatcatacaaggttagcgaatcgttcccttacaagtggatcaataaaaagtggaaagaagggttccatgtaacatctatggccactgctggaaatcgctggggcgtagttatgtcaaggaactcagggttttctactcaggttgtagagttggacttcctgtaccctagcgaaggcattcatcggcgatgggagagtggttacaggataacttccacagcggccaccaatgaccaagctgctttcatcttgagcatgccaaagcggaagccgatggacgagacgcaagaaaccctccggacctctgcctttcccagttcacatgtcaaggagaaatgggcgaagaatctctacatagcctcgatctgctacggacgaacagtgtgctgatagtcgaagagaggggcggccgcgctgactcaatacggtggcttgcgtcaagagattagagatgtgagatgaacattaaatcaaaaccagttctaatgatgataggatcagtagatctgatgatacggtatggtatcctaccgtagctgtaaagaaatgttgtacccagtgccggccgcgagaccgttactgccatgaagtgaagctaatgcattttggagtctcttcccgggaaaatggaacacaatataatgctcatgtgcaaatcatataggtttaatttcttgcgcactagagtttgcacgtcaaaaaaaatcataatctgaaaaataggccttcatatatatatatacatatatatctatctatatatatatattatatagctaaaataacacaccagtttgaagcaaag

SEQ ID NO: 18480 - DNA, 1967 bp, Zea Mays
aatagggaacacaagtgcgtcgtggtggtgctggcggttttgagttttgacccaccattcccgcattccttctcttctgcagtggcggcagcggcagccaggaaacgcaaacgaggaagaggagcggtcgattcccaatctttatacgctccccttttgcagcactagttgtttctcagcctgcttggagtttggagggggcagagaacaccatcctgtcgattcaagaaaaaggctgagccgatgggcagtaagagcggcgtgcgactgcaatgcgccgaggccaaatcggcgacggattggagctgctgcttcctggccctgccaccggcagcaccatccggtgttgatggcgatggcgggtttaacctctcgtggaacctccgcaagtccttccacccgccggcgggactcttcgccagcatgggccagcaggttggggttgggttcccggggacttcttctaggtccccgtcgccggagacacctcgggatccgtacatgaagtacgtctcgccggaggttgtcgagacacctccgtcgggggaaggggtggcgttgagggacaaggggaagaagaaagccgtgaagctcaggattaaggttgtgaatcatcacctcaagaggctgatcagtggagcactcgcaggcacagtgtcaagaactgctgttgcacctttggagacgatcagaacgcatttgatggttgggagtaatgggaattcgtcgacggaggtgttccagtctatcatgaagcatgagggatggactgggttgttccgtggtaactttgttaatgtcatccgggtagccccaagcaaggcaatcgagctttttgctttcgatacagctaacaagttcttgacccccaaatctggggaggaacggaagatcccagtccctccttcactagtggctggggcatttgcaggtgttagctcaacactgtgtacataccctctggaattgattaagacacggttaactatacagagaggggtgtatgacaatttccttgacgcgtttgtcaagatcgtccgcgacgaagggcctactgaactctaccgaggcttaaccccaagtctgattggagtggtgccatatgctgcaaccaactacttcgcctatgacaccctgaagaaggtgtacaagaagatgttcaagacaaatgagattggcaatgtcccaacgctgctcatcgggtctgctgcaggagctatctcaagctcagcgacattccctcttgaggttgcacggaagcacatgcaagttggagctgttggtggcaggaaggtttacaagaacatgctccatgccctcctaagcattcttgaggatgaaggggttgggggcctctacaaagggttggggccaagctgcatgaagttgatgcctgctgctgggatttcctttatgtgctacgaggcttgcaagaagattctgatcgaagaagaggatgagtgaagtgtgtgcggatgcattgcgtcattagaactcagttttgcgacatcctgaattcctgatagcaggcagcttctttcggtatttctttgagtcgactggtgctggagttggttgaaactcaagactgaggttactgctgcagtcagcataagttctttttttttgatgagtcgaccaaggggggagaggcccccaccagatccactgcattatgtagctcttcgagttcaaagtacacgccaagcacatattcttaacccccactttgcacccagtttgatcttataaattcacctgtttttttccagatttaaacttttacttttgggtacaagttgtgttgtcgaaactcatgactgcgatgtgtgaaaacgttcagatgccataggcaatcataattcacaagtggcaaagctgcacctgacctgtgttcttgtttctcatatgttggtctgtgatgtcacaacagtgaccattaattccacctaaatgaaaaaaaaaca

SEQ ID NO: 18481 - DNA, 2119 bp, Zea Mays
gagactctttcatttccttctaccgcagcctcagaattcccccctcccccgtagcgaaaccctagccgccacgccaaaaccaaatcccgccgagcccgaaaaattccggcgggttccttgccgcgaatcgattgatttcgagcgattcgattccttgtgatctctcggcggggtagagcgcggtcgaccgtcggccatgtcgaggtgcttcccctacccgccaccggggtacgtgcggaacccagtggccgtggccgagccggagtcgaccgctaaggtcttaactgttgtcagggaagtaacgtgttcaacatgattgtaaacgaatacaattctgttgctaactgtgtaatgatgagaaggataattgaatagtctttgtgaagtattactgtctgaactgtacgcaaatgctacattcattctgtgttcatgtaaatatcattatacataaaaatgctgcattgcattcccgtcgtccgttctaaatcagaactgacgattgctctggtggctgaagctcctgaaagaaaaggaaaaggccgaaaagaagaaagagaaaaggagtgacaggaaagatcccaagcagtgtgagacgtccaaacactcaaagcacagccataagaagagaaagcttgaagatgtcatcaaagctgagcagggtcccaaaagagtacccaaagaatcagttgagcagttggagaagagtggactctcagaagagcatggagctccttcttttgtacatacgatacgggactctcctgagagctcacaggacagcggcaagagacgaaaggttgtcctgtccagtcctagccaacctaagaatggaaacattcttcgcttcaagattaaaagtagtcaagatccccaatcagctgttctggagaaaccaagggttcttgagcaaccattggtccaacaaatgggatcaggttcatccctgtctggcaagcaaaattcaagccatcataagatgaatgtgagatctacctctggtcagcggagggtcaatggtgactcccaagcagtacaaaaatgtttgattacagaatccccggcaaagaccatgcatagacttgtcccccagcctgcagctaaggacacacatcctgttgatccccagtcagctgttaaggtgccagttggaagatcgggcctacctctgaagttttcgggaagtgtggacccttcgcctgctagagttatgagaagatttgatcctccacctgttaagatgatgtcacagagagttcaccatccagcttccatggtgtcgcagaaagttgatcctccgttaccgaaggtattacataaggaaaccggatctgttgttcgcctaccagaagctgcccggcctactgttcttcaaaaacccaaggacttgccttctatcaagcagcaggagatcaggacctcttcctcaaaagaagagccctgcttctctggtaggaatgcagaagctgttcaagtgcaggatactaagctctcccggtcagatatgaagaaaatccgcaaagctgagaaaaaagataagaagttcagagatctgtttgttacctggaatccggtattgatagagaatgaaggttcagatcttggtgatgaagactggctgttcagcagtaaaaggaactccgatgctatcatggttcaaagcagagctactgatagttcagtgccgatccatccaatggtgcagcagaagccttctttacaacccagggcaacatttttgccggaccttaatatgtaccagctgccatatgtcgtaccattttaaacatctggcgaggtagatgagaattagatgagatgttgggagagagctgtgtggatgtgggagataatgggttccctgccgcagttttccagctttgttccatagtgtttctttgaggccaatagagttctggcagaacttataatgtaatattgattaattatttcgctcatgtatgtaagcagttgaactgcaaaatcttgtttctaggatgttactgttttatgacacgcagtatttgttatattgaccttttgcctcgtttatttcagttgcattaatttcgagataatgcgaagaggtattttgttcttatgattcatgtaatatgct

SEQ ID NO: 18482 - DNA, 2547 bp, Zea Mays
gggaattgaaggcgcagatcgctgaccgcgccgccgtcacttgccgagcacgcaccgcggtagtagccgacaccgccgcgcacaacgttccgttcgtctcccctcgaaccagtcctcccaccaaaaacgcactcccgaacccgactctcctcttgctcgctctcggtggcgtctccgcctccgcagtccgcactcgcgcacgcttcccttcccttcctcgcccacgcggacgcggccacggccgctccaagctagcagcagagcgagagcagccaattttggcgcacctctctcactctccctccctccgttcagcagcgttcgtttcgttgctcactcagatccagccattcaggtgagagagtaggggcagcgatgcccacgccgccgctccgtggggcggggctcctgctccgtatctgcctcttcctctgcctctcactccgcccccgcctggcctcctccgagcccgacgccgacggccccggccccggctggacgggggtcacctgcagcgcggacggcgcgcgcgtcgtggcgctgcacctcccggggctgggcctctcgggcgccgtgccgccgggcacgctcggccgcctcaccgcgctgcagctgctcagcctgcgctccaacgacctctccggcccgctccccgccgacctcctgcgcctgcccgcgctcgagggcctccacctccaccgcaacgccttctccggcgcgctccccgccgccctcgcggggctgaccgcgctccaggtgctcgacctctctttcaacgccttcgacggcgccgtccccggcgcgctcgccaacctcacccgcctcgtcgcgctcgacctctccaacaactcgctttccggccgcgtcccggacctcggcctccccgcgctccgtttcctcaacctctccaacaaccgcctcgacgggaccgtgccggcgtccctcctccgcttccccgacgccgccttcgccggcaacagcctcacgcgcccggctccggctcaggcgccgccggttgttgtcgctccgcctcctggcctcgctgcgcctccccccgcgaggcggcggcccaggctcagcgaggcggccatcctcgccattgccgtgggagggtgcgtcctcgggttcgccgtcgcggcgctgctgctcctcgcattctgcaacagcagcagggagggccgcgatgaagagacagtaggcggcggcgcggctgcagggaagggcggggagaagaaggggagggaatcgcccgagtccaaggcggtcatcggcaaggccggggacggcaaccggatggtcttctttgaggccccgtcgctggcgttcgacctggaggacctgctccgcgcctccgccgaggtcctgggcaagggcgcgttcgggacggcgtaccgggccgtgctggaggacgccaccacggtcgtcgtcaagaggctcaaggaggtgaacgccgggcggcgcgacttcgagcagcagatggagctgctcgggcggatccgccacgacaacgtcgtcgagctccgcgcctactactactccaaggacgagaagctgctcgtgtacgattactacagccggggaagcgtgtccaacatgctccatgggaagaggggagaggacagaacaccattggactgggaaaccaggctaaagatcgccctgggagcagcacgaggagtggcacacatccacaccgagaacaacgggaggttcgttcacggcaacatcaaggcctccaacgtgttcatcaacaagcacgagcgcggctgcgtctcggaccacggcctggcgtcgctgatgaacccggtgacggtgaggtcccgttctctcgggtactgcgcgccggaggtcgctgacacgaggaaggcgtcccagtcctcggacgtctacagcttcggcgtcttcgtgctggagctcctcacggggaagtcgcccgtccagataaccggcggcaacggcggcgacgtggtccacctggtgagatgggtgcagtcggtggtgcgggaggagtggaccgccgaggtgttcgacggcgagctgctgcggtaccccaacatcgaggaggagatggtagagatgctccaggtcgcgatggcgtgcgtgtcgaggtcccccgagcggcgtcccaggatggcggacgtggtgaggaccatcgaggaggtgcgtcggagcggcagcgggaccgcgaccgggacggggacgcggccgtccaccgaggcctccaccccggccaccgccgctgaagcggcccagagcagggcggaggagggcggctcgtcggcggtggcgcagtgaccggacgcgacgcaggccgagctgcttgctggtggctcgtagcttggatgatcctgtgctttattttggcgggtgctgtaccattcgttctttcgtgttacgaaatcgtaacagaatgtcacgtggacgtggacacggtggtcggatttttggcagcaactgctcgctgctgactattgattgactctttgtacaagtgtgaaggaagaaaggcagctgtctcatctgttgatcaaggatatgcttgagtac

SEQ ID NO: 18483 - DNA, 645 bp, Zea Mays
agtcggccacgcgacggtgcgtgtgtggtcggtgacaagtgaagcggcgcttcagcctgtggtcggtgctttcgtccataaaaagtggggaggacggctcggggagcttgacgacactgcacacctctcaccagtccccacacggccacaccacacccagctgtccccatcgcgcgcacactctctcggtctctccctcccagtcccagcgtttgcggtccagtccagagagctcgagcagccatggcggctcccctgttcctcctcctcctgctgctggctatgttcacaggctcagcagacgcggcgttctgcgtgtgcaagacgggcgtgcccgaccaggcgatgcaggcggcgatcgactacgcctgcgccaagggggccgactgcgcctccgcctccaagggcgcgccctgctacggcaacggcaacaaggtggccgtctgctcctacatctgcaacagctactaccagagccgcagcgccacgggcgccacctgcgacttcaacggcgtcgccacgctcaccggcaccgaccccagctccggcacctgcaagttcgcctccggccccaggcaggtcgatacagtcggatcacatgcgcattctggagtgcgcgcgatggcgctgggcgaaacaggacgc

SEQ ID NO: 18484 - DNA, 3524 bp, Zea Mays
gcgtgcggccgtgcgtcctctctttctttctcggcgcctctgtttctggcggccgcgactggcccagcgccaccgccgacctagccaggtgaccaggtcttcgtcaggaccatagccagcgaagaacacccaagtacccaacagatgagttcgaagaaggttccgtaccacaagcatagggaggctgaggaggcgaggaagaagagggaggaagatgaagcagcacgtgtatatgcggaatttgttgagtccttcaaaggtgatagttcatctggggctaagtttatccgaggtggtgtgattgaccccaatgcaaagctgaagactgactcggaaggtatgttccatccttcttgccaccatcatttgcaaaagagcctgagaaaaagaaggaaggggagaggccaaaggaaaaggaaaaggaaaagggaaagccacgagtaatagatagattcttggaggaaatcaagcttgaacaagagcagcgagagaagcgccatcaggatcgagatcaccgccgtgaaggtcgccatggcgatagctccatgtcctcgagccggtttgatgaactaccagatgaatttgatccgactgggagatttccaggatcatttgatgatggtgatcctcaaaccaccaacttatatgttggcaatctatctcccaaggtcgatgagaattttcttttgaggacatttggtcggtttggacctattgctagtgtcaagattatgtggcctagaacagaagaggaacgcagaaggcaaagaaattgtggttttgttgccttcatgaatagaacagatggacaagcagcaaaggatgaaatgcaaggtgttattgtgtatgactatgaactgaagattgggtggggtaaatctgttgctcttccgtcacaggctttgcctgctcctcctccaggacacatggcaatcagaaataaggagggtggtacagctacagtcatactttctggtcctggcggccctgctgttgcatctattaaaccacaaacctcagagctggtccttacaccaaatgttcctgatattgtggttgctccacctgatgatgggcatcttcggcatgtgattgacacaatggctctgcacgtacttgatggtggatgtgcttttgaacaagctgtaatggagagagggcgaggaaatcctttatttgatttcttgttcaatcttaaatctaaagagcacacatattatgtttggaggctatactcatttgcccagggtgatactctacaacgatggagaacagaaccctacatcatgatcacaggaagtggaagatgggtcccacctcccttgtcgtccaacagaagccctgaacgtgaaaaggaatctacatttgctgctggtagaagcaggcgtgttgaagtggagcgtacattgactgactcacagcgtgatgaatttgaggacatgctgcgagctttgacattagagaggagccaaataaaagacgccatgggatttgccttggataatgctgatgcagctggcgagattgttgaggttcttacagaatccttgacactcaaggagacgtctattccaacaaaggttgctcggcttatgctagtgtctgacatccttcataacagtagcgctcctgtgaagaacgcatctgcattccgaacgaagtttgaagcttctttgccagatgttatggagagctttaatgacttgtatcgcagtatcactggaaggattactgctgaagctctgaaggagagggttatgaaagttctacaagtttgggcagactggttcctgttttctgatgcatttcttaatgggctgagggctacttttcttagatcaggcaactctggtgttgttccgtttcactcgttatgtggtgatgcacccgaaattgaaaagaaaggtagctctgaggacggaaatgatggatttaagcttaatgaagacggtgccttggctactggaaaggcagcagcgacaaaggagctattagggctcccgctagctgaacttgagcgccgctgtagacataatggcctctctctgtgcggtggtaaagaaatgatggtcgccaggctgcttaacttggaagaggctgagaaggaacgaatttacgagaaggatgttgacgtgaaatatgtgcagggtgaacagcatgtggttggaagagaggacagtggtgtgaatgctcatagtacttcaaggtttggtgaaggttctaatggtgatgaattagatgtctctcggaacagtatgagagctggtaaaggacgttctggaggatctgcttctgccgaacttgaatcatttccaagcaagaagccgaaatacgatcctgttttgccagcttctaaatggagtcgagaggatgacatcagtgacgatgaagataggaaaggtggccgaggcttgggattaagctattcgtccggaagcgatattgctgatggtctcggaaaggtcgatacaacagaagctagtactgaccacacaagtcatcatcatgatacgattgttgatgaagagcacaggcagaagttgaggcagattgaaatttctgtcatgcagtaccgtgaatctcttgaggagcagggtctgcgtgacttggatgagattgagaggaaggttgccagccatcgaagacgtctccagtcagaatatggtttatccactccaactgatggtgctaacagcaggcgatcttctgaaagaacatcatcgtcgtcggagcggaaagagaggcatggcgatgcacatgatcatcctaggaaacgtcgccggagccagagtagaagctgcagtcctccaaggaagtctcaggagagggatcgagagcacaatcgcagtagggaccgagatagggtacgcgagaaaagtgcaagccgagggcgagacgaccaccacgacagaagccgagatagagaggacaggagaaaggggaggtgaccgacccgaaaaacctcgtcactatgcaccatttgccctaaccgaagggcccaggagcatcatttgagctgggctacacgcccaccagcatctccatcggtaaacatatattccgcaccaggcaggttaccctggtctgctccatgcttcgtctgcaataggagtttttgaggattaagttgaggttttgtaaagaagacttgttcgttactttttttgtggattattaagatatatcctatgtgtagtttatgcttaaaatttaaaaccaatgttgaatacagccagacccagaattgtcagtatcagacaaccgaggtatggactgcgattctgttcttccctggtggtgggctgttacgtgtagatctttgcacggcgtgagaataccgtcggttgtgcgtgggcgcatgcgtcgacgacaatgcatgctgcttaacgtgctcacgtggacgagaatgtgttgcatcatgctctagcatgcgaacatgtgcggtactgacatggtgcgtagctaagctattgtacacttgctttttcatgatgcctcgtgttaacgttgtcagagatctgaaa

SEQ ID NO: 18485 - DNA, 1519 bp, Zea Mays
cggctcccctgcctcacgcttcctgttcgaactcttcgtcgcctcacactggtgctcctcctctccccatcgctccgccactcccatggcgtccctcttcggggctggccgccggcgatcaccggaggacgacggcgaggacgatagatccggcagagggaggaccaagcgcttccgcctctccccggaggaggacgcagcgtcgccggcggaggcggggcccggcgcggcgacggagaccggctggctctccggcttcgtctacggagcgaagagggtcatttcttccgttttactgttctcctcgcccgaggagaccggctcgggggaggacgaggaagaggagaaggacgacgacgacgacgaagagggcatccacttgaatgaacatgaagctactcatgacactcatggagcaatagttccttatagcgagccaaagcttactattgagcaaatggttatgaaggaaacattctcaagggatgaatgtgataggatggtagagctaataaaatcaagagttagagattctacttttcctgaagcccatgagtatgtaaagccagaagaaatccctagtaggaatgcaggcattacacatgacttcacaggaacatggcgctccttgagccgtgatcggaatgtccctgaatcagttccactctctagtatgagaacaagacctggtagtttttctcaaggctctccactccaagcatcacctgagctatgcactgcagcagttacggaagcaaaaaaatggttggaagagaaaaggcagggactgggcttcaagcctgaagacaatggaccatgcacactaaatactgatatacttagttctcatgatgactctgtctctgacctgggttctccagttgatttagcgaaatcatacatgcagtcgttacctccttggaaatccccattcttaggccgtcagaagtttaacacaccaccctccaaatattttatctcatcagcagaggtaactacaaaggaggactacctttccagcttttggacaaaattggaggaatcacaaagagctcgtattggatcatctggaggttctgctgatgctcctaaattctggaattatggttctaattccaggttatttgagaatgacacctctatattttcattgggcactgatgaaaaagttggagatcctaccaaaatctataatgggtctgggaaatttgcagcaacagaaccagttggtggatgctgcttacctattacacccactgaagatagaactgatggtattactgagcctgtggaccttgcaaggaacaacgggaatgcaccccaagaaaaccaggttgcatctgaaattctccctgataaagttccagagggtaacgatgtgtcttccactggaattactaaggacactactggccatagtggagatgttaaagctcccacttcagaaccacatttaggggaaacacgtatcaactcagcatcaggatggggcggcggggctcgtcttcgcatgcacaac

SEQ ID NO: 18486 - DNA, 426 bp, Zea Mays
gggctgtgcctgcctgcctgctgttgcctcgtctcctcgtttaaacgggcgaactcaagattgcaacagggtcgtccgccgccaccaattgctagcgcaatcctagccctagcccagcgccccctccggccctccctgcttcgtgcttggtagcgatggcgtcgttttctgaagcgcccccggggaacccaactgctggcgagaagatcttcaagaccaagtgcgcgcagtgccacaccgtcgacaagggcgccggccacaagcaaggtcctaatttgaatggtctgtttgggaggcagtctggtacaacacctggctactcttactcttcggctaacaagaacatggctgtgatttgggaggagaacactttgtatgactacttgcttaatcccaagaagcaatattaaaagtactatgttttcc

SEQ ID NO: 18487 - DNA, 770 bp, Zea Mays
ctgccctctctctctctctactggtggggcccacccgggccccgcatcttcctctgcctcagctcgcccgcgtggacgcacacggcgctgtcgccgccccgtgctttggcaagcacgcccggcgcctcacctccctgccgtgacccctcgcctcctctcaccacctcaccctcccatgcaagtaacggctgcccgtttcccctccatctcctctacccattcactccaagaaggaatggccgccatgccattaatggcgttgaagacaccgaccagaatcgctgtcggttcgctgctcgccgccgttcgacgtccggagccgaagccgatgccgcgccgacgacccccactgctgaggtcgtgccctgcttccccttgctgctccatcggtcatcgcaccctgctcctttaccgaccccctgctcttcaatttcgtccacacgcaagaaccaagggtgaggaagaagactttgcagatgatgtcgacaagtactaagtctaccgatgcgccagtcaccttcctgtggaagagtgtccaagcttaattctgttgtactttgataatgatactttttaagacactatggtctggatgatgtaataaagttactctactctctttacgcctttattgcattgtcttttaatatattacacttgtgacgtcaacatatgtgtggaaaatggatcctggcatacaatatgctatgcatttggttttgcccccaaagccggctatgacaccatgttaggtggtgctcttatcttag

SEQ ID NO: 18488 - DNA, 1728 bp, Zea Mays
cgacagaccgtgtgtcagtgtgtggcctcactcactcaccgatccctcgccaagccacaggctccccgtgagctccgccacgcgggcgcctcgcctccttcgtccttcctcaccgcagtcagcaggagcaatggcgatggcagccatagcctccccgtcgtcgaggaccctgatccctccgcgacaccacggcgccgcgccctccccgtccacctccggcgactcctcgctccgcctcctctgcgcacacccgcgccacggacggcgcggccgggcgatgtccgtctcgacgcccgcggcgcggagccggccgttcgtcttctccccgcgcgcggtgtccgactctaagagctcccagacctgcctcgaccccgacgccagcacgagtgttcttggaatcattctcggaggtggtgctgggactagattgtaccccttgacaaagaagcgtgccaagcctgcagtgccattgggtgccaactatagactgattgatatccccgtcagcaattgtctcaacagcaacatatccaagatctatgtgctaacacaattcaactctgcttccctcaaccgtcacctctcaagagcctacgggaacaacattggagggtacaagaatgacgggttcgttgaagtcttagctgcacagcagagcccagataatccaaactggtttcagggtactgcagatgctgtaaggcaatacttgtggttatttgaggaacataatgtgatggagtttctaattcttgctggcgatcacctgtaccggatggattatgaaaagttcattcaggcacacagagaaacggatgctgatattactgttgctgccctaccaatggatgagaaacgtgcaaccgcatttggcctcatgaaaattgacgaagaagggaggattattgagtttgctgagaaaccgaaaggagatcagttgaaagcaatgatggttgacaccaccatacttggccttgatgacgagagggcaaaggaaatgccttatattgctagcatgggtatatatgtttttagcaaggatgtaatgcttcagctcctccgtgaacaatttcctggagccaatgattttggaagtgaggttattccaggtgcaacaagcattggaaagagggttcaggcttatctatatgatggttattgggaagatattggtacaattgaggcattttataatgcaaacttgggaataaccaagaagccaataccagatttcagcttctatgaccgttctgctccaatctatacacaacctcgacatctgccaccttcaaaggttcttgatgctgatgtgacagacagtgttattggtgagggatgtgttattaaaaactgcaagatacaccattctgtagttggactccgttcttgcatatctgaaggtgctatcatagaggacactttactaatgggtgcggactactatgagactgaagctgacaagaaactccttgccgaaaatggtggcattcccattggtattgggaagaattcacacatcagaaaagcaatcattgacaagaatgctcgaattggagataatgtgaagatactcaacgctgacaatgttcaagaagctgcaagggagacagacgggtacttcatcaaaggtggaattgtcacagtgatcaaggatgctttactccctagtgggacagttatatgaagttgcaaatgttacatctttgctcgaatttgcaagcctgcctg

SEQ ID NO: 18489 - DNA, 1970 bp, Zea Mays
taccaagtcagcggcatcacagtggaacagtcatgtgcgattttctttctcaaaaacagtgaagatgctcaggctgtctgtgactctgggtgactcttgtcttccacacatcgccacgccactgattggctcgcgattatgtgattcttgaaccttcttgccatggggatgtctgcagcgtctcatctctgtgcttcttcgtccctgcgagctttaaccgtgttgtttttgttggcagctcttgtttcagatgtagaggggcgacatcatcgtcatgtctgtcctcatttctcctgcggtggtttaagcaatatatcgtatccatttcgtcggcaaggtgatccatctgggtgcggtgtccaatcgtatgagctggtttgcacggatacagatgctacaattcgcatcggcagtggaacatacaaggcataccggtgcccaagaatacaagctatccagatgttgttaagttaatgaggaatggatttggccttagatttccttcttcgattggtgaccgcggcatcagagaatgtttcgcagagtctgtgcggtatctgatcatcctatcctattttcctcctatgcatgactttgtcatctgaaaaccgtccgttgcattcccttcgtaattcttttatatgctatggcatggtcttgcagtaatttccttaaagagccaagaaagtatcagattgtggacattctaatggtcgaggaattatggtcttgttttctcgatcaacatggatcaactaataatgttgtcacttctgttatcatcgacattatcaaaacaataccaatatgtatgtggcttctgaaatctacacatgttttttgcaggcttgtattgatgccgctagcagtatttgtcttcctagcccataaatactggaaagcaaggattacaatagatgcagtcgagaagttcctgcggatgcagcagatgctcgttccgatgagatatgcatacacaaacatcattgctatcaccggtcatttcagagaaaagctcggacaaggaggctacggttctgtatacaagggggtgctacagccaggtgaagtacatgttgctgtcaagatgttaggcaactccaactgtaatggagaagagttcatcagtgaggttgccaccattggcaagatccaccatttcaatgttgtgcgcctcattgggttttgctccgaggaaaatagcagggcacttatctacgagttcatgccccatggatctctcgataagtacatcttctcgtcggagaagagtttctcatgggacaaactcaatgagatcgctctgggcattgctagaggtctcaactacctacatcacgggtgcgatatgcaaattgtacacttcgacatcaagccacacaacatccttcttgacagcaactttgttccaaaagttgctgattttgggcttgccaaactgttcccaagagacgacagtttcgtgccactgagcgctatgcggggaacgataggctatatagctccagagatggtatctcgaagctttggtgtcatctctagcaaatctgatgtgtatagctttggaatgctactgttggagatgacgggcgggcgaaggaacgcagatcctcatgcaggaagctctagtcaagcatactacccatccttggtgtacaaccagctaagccaaggagatgtgggcgagatcagtgaaggtgttgatatgcacgagttaaagaagaaactatgtatcattggactttggtgcatccagatgaagccgcaagatcgaccaacgatgagcgaggtcatagagatgcttgaagccgcaggatcgaccgacgatgagcgaggtcataaagatgttttgtgataatttgatgtcatctaaaatacctccatgaaccccttttttatcaaaaactcctcaagaacaatttgtttgcctacaaacagaggatcacggtcctagacgttgtattcttgaa

SEQ ID NO: 18490 - DNA, 1781 bp, Zea Mays
aaggtctattctgcaaaaaagaacacaccgtaagctcccgtcccggacggggaagacctcgtgctgccgccagatctaaccaaaccccgcgccctcctcaccgtccggcgagctacggactcagcagatcaccgtcgctcgagttgtacctgaaggcgcgcccgtggaaccggccgcgagataagggcggcgggaaggcgggcgacgatgccggtggcagcgtcggccatctacttcctcaaccttcgcggggacgtcctcatcaaccgcctctaccgtgatgatgttgggggaaatatggttgatgcgttcagaatgcatatcatgcaaacaaaagaacttggcacatgccctgttcgtcaaataggaggctgctccttcctttatatgaggatcagtaatgtttacattgtgatcgtagttagcagcaatgctaatgttgcatgtgctttcaaatttgttgtcgaggcggtggctctcttcaagtcctacttcggtggagcttttgatgaagacgctatcaggaataactttgttttgatatatgaacttcttgatgagatcatggattttggttatcctcaaaacctgtcacctgaaattttgaagttgtatataactcaagaaggtgttcggtcaccattttcctcaaagccctcagagaagcctgttccaaatgcgactctttcaagtcactggcgctgttggttggagaagagagggacttgtgtacaagaagaatgaggttttcttggacatagttgagagtgtaaaccttcttatgtcttcgaaagggagtgttctaagatgtgatgtgacgggaaagattcttatgaaatgcttcctttctggaatgcctgatctgaagctgggattaaatgacaagattggacttgaaaaagaggcccaactaaagtccagaccagcaaagagtgggaagactatagaacttgatgatgtcacattccaccagtgtgtcaacttaacaagatttaactcagaaaagacagtcagtttcgtgccacctgacggtgaatttgagttgatgaagtatcgaatcacagagggtgtaaaccttccattccgtgttctgccgacaatcaaggaattgggccgaacacgcatggagatcaacgtgaaagtcaagagtgttttcggtgctaagatgtttgcacttggtgtcgttgttaaggttccagttccgaagcagacagctaagactagtttccaaacaacatcaggcaaagcaaaatacaatgcttcgattgattcactggtgtggaagatcaggaaattccctgggcagactgaggcaactatgagcgcagaggtggagttgatttctactatgggtgaaaagaagtcatggaacagaccacctatccagatggaattccaggttccaatgttcactgcttctggtttacgtgttcgcttccttaaggtttgggagaagagtggttataacactgttgagtgggttcgctacatcacaagggctggatcatatgagataagctatccacagagatcaatctgtggcatcatgcatgatcataaagcgcatatattgtgacacaagtatctgaaactttgtacttcaacagagggtggggcagggcagatcagacaattttctgtgtttcttatttccattgtagtctgggatctctgttcttccctccatgccctgtttgtagtagggattattttttgctcgtatatttggctgtagctttccttgtttgttgatcaatacacctgttcagtttgtaaaaata

SEQ ID NO: 18491 - DNA, 987 bp, Zea Mays
agcccgatgcgaaaatgcttgaagcctccaagaatctgggtgcaccgctgaggcgctgaccaccacgcaccacctcaccagatctttcttcctgttgcttcctcggctggtttccttctctcgccgcgtcgcctgcttcttcccccaaccaaagacacgaatcagccatggcgctcgcctccgccacgtcccgccccctcctcggtcgcccccgccggcaccgcgcggccccacctcgccgtttcctcatcctcccccgcctcctcgatccgcttcccccgcggcgccgacggcggcgccagcagagcggccgtctctctccgcgcccccacgcctccagcaacatctggtagcattgctccagcaatttcattgactgaaaaggccttgaaacatctgaaccaaatgagagctgaacggaatgaagttttgtgcttgagaattggagtgaaacagggtggatgctcaggcatgtcttacaccatggaatttgaaaatcgagagaatgccagccctgatgattctgttgtagagtatgatggttttgcaatagtctgtgaccccaaaagccttcttttcatgtttggaatggagctggactacagcgacgccctcattggtggcggcttcttgttccagaatccaaacgcaacaaaaacctgtgggtgcggcaaatctttcgcgactggaaaggagaccgaggccgcggcaaccacttgcaacaactagagtagagaaatattgttagctaaacgtgatgtggcatgttgtatagcttgctcatgttgaagccctgtggctacaccacagatacataaagaggcatagttcaaaggaattacaccattaccaatggcctaattcagattttcttgtttggtgatcattccgaagtccttaaacttgtggtatggtctctcaaaatgcattgtattttcaggtatccaaacttgtcttgacgtgtcgtccaggcctacaagtactaaa

SEQ ID NO: 18492 - DNA, 473 bp, Zea Mays
ctctgaattgctgaaattaacagttctggagaaatattgttcagaaaggggatacggtggtcgatgccacatgcggccatgcgggaatgacaatgacacgctcgctctgcttaagatggtggctgacaaaacaggccgtggatgtgtttatgggatggacattcaagaatctgcgatagagaatacttcctcttttctgaaaatggccgtggatgatgaacatcatgtgtgggtttgaactatgaagcttttacctaatttcccctgaagaatgaaatagaaaggagacacttatgaattctgatttgacattattatttactattcagatacagaggatacttgtcatcttctcactgaatatttgatatatctgtacctgtcattgtatttgttttatgtggcagcagggactggtaaaactatttcctatatggtcatagtagaatggaagagattgttcccaaagacgc

SEQ ID NO: 18493 - DNA, 1614 bp, Zea Mays
gtttaggcaatcttgtagcatgcaggaggttgaaaggctccgagctgaaagaaatgcggttgccaacaagatgaaagggaaactagacccatctgttcgccaagcccttgttgaagaaggtaagaacctgaaagagggacttatagcactcgaggaggatcttgttcagctgacagataagcttcaacttgaagctcaaagtattcctaacactacccatccagatgttcctgttgggggtgaggaaagctctgtcctcaggaaagaggtaggcagtcagaggagcttcaattttgcaatcaaagatcatcttcagctggggaaggaacttgatttgtttgactttgatgcagcagccgaggtcagtggttcgaagttctactacttaaagaatgaagctgttttgttggagatggccctagtaaactgggctatttcagaggtctccaagaagggtttcacaccactcataactccagagatcgtaagatcatctgttgttgagaaatgtggctttcagccaagggccaaaaacactcaggtatactcaattgaggacagtgatcagtgtctcataggcacagcggaaattcctgttggaggcatccacatggactcaatacttgccgaatccgctttgcctttaaaatatgtagcatattcacactgttttcgcacagaagcaggtgcagcaggtgctgccactaggggcctctatcgggtacatcaatttagcaaggttgagatgttcatattctgtcggccagaggagagtggaaaatggcatgaagaacttattacaattgaagaggatctttatgcatcacttggacttcatttcaaaactctggacatggcaactggggatctgggtgcaccagcctaccggaaatttgatatcgaggcgtggatgcccggcctagagcgttatggtgaggtaaggggcaaatatccaggcctgtatacatcttgtcaacatttccttgaatcatgctgatgattcctgaccaaactttgcagatctccagtgcatcaaattgtaccgactaccaaagtaggcgactaggcatccgttaccgcccatcaccctcggagcctccatcaacgagcaccaagaaagggaagggagctgcctcaggccctacgcagttcgtccacacgctcaacgctacagcagtggcggtgcctcgtctgatagtttgcattctagagaattttcagcagggcgatgggtcgattgtggttccagagccactaagaccctatatgggtggactagagttgctctccccaaaattcaagtgaccctctacggtcacccgctgttgtgcttgtgtggacttagaactgtctggctgaagtacaagttaaaggaaggtcatttctcactacaaatatacactactgagtttcgtgattggggcttctgtttcataagcagtcgactactctgatctaatctgcatagcattatactggtcggttactctgatctgcatagcactacaaagcttatgtgcatgcattaggccctctatggttcccaagaatcgagtgacatttaaaagtaatctaatgctccttacattctaatgccatgtttgtttcctccct

SEQ ID NO: 18494 - DNA, 300 bp, Zea Mays
gtggccttttacataagcaacccccccgacctcttttccctaccctctctttcgttacctacaggctacagctcccgtctctccgccgcttgcttggaaaacgaagaaaccctcctccaccaacccaatccagctacatccgtctgggtgaactccagggccaggagcagttcgccgccttcgttcgcatcacctacgcggttcgatccaactggcaggaaggaacgtgatggccaagacgagctcgttcaagctggagcacccccttggttaaattatacatatctcgtgccaaaattt

SEQ ID NO: 18495 - DNA, 985 bp, Zea Mays
catcaattcatcacggcatcacccccaatttcttctactccaccgaaacataaatctgtagccagcagaaagatcttgcggaaggtggcagacgcatagatgagggtgagagcatttggcggtagcgcttgacgagcgacgagtaaaccctaatgctttgatcgcggcggcgtcgtttgggacactcccgaatcgatccgcctacatgcctatgaatcctcctcccccgccgcctcctgggtcggcgtcttcggcgccggcggggcccagctacttccctctccctttccacctgcagcagcaccagccgcagccgcagatgccgccgcctatggcggcgagcagctaccaacagtaccagcaacagctgcatcaggcgcatcagctcttccagcgggacgcgcagaccataacccccgaggcgctgcagagcgtcaaggctgctctcgccaccagcgacgtcctcgaccccgccgccgccgcgaacgccaggccctccgatccctctaccagcaagaagcccatcccccgccgcgctgccggacaatcctgggaggatcctaccctcactgactggcctgaaaacgactaccggctgttctgtggagatctaggcaacgaagttaatgatgatgttctatccaaagcattctcacggtttccatccttcaacatggcaagggttgttagagataagaggactggcaagactaaaggttatggatttgtgagcttttcaaaccctactgacttggctgcagcaataaaagagatgaatggaaagtatgttgggaatcgccctattaaattgcgtaagagtaactggaaggagaggacagatgttgaggctctgcaaagacaaaagaatcatgtccaaaggaagcctaaaattcccaagaagagtgttcttcacaagtagagatatataggccctaccgagggtgaagggcagctcatgagttctgatggatgacttatatgttgc

SEQ ID NO: 18496 - DNA, 711 bp, Zea Mays
gccactcaatcttgatgtcaatgacaagatgattacaggtgatcaacttgctattgggaaggaaacaacacgtcgtttgggaatgggtactaaatgtaaggatgagtcacttgcttcattgccaattgatgaattgaccgagaaggctgatggctttgctagagtctttccagcttggttttatgcttcttgcgctgatatggaagtttgacttcccaacatttaccgtccagatcattgccatcctcaatgacgaatgccactctgattgttgtatatgccaactgggcatttgctgctattaagggcattggatggggctgggccggtgtcaaatggctctacatcattgtcttctacttcctgctgcgcatcatcaatttcctcatcctgctatacgctgagtaggagggcatggaacctcgtccttatgtatatactaggtgtgtgcccgtacgttgcaacgggagtatgttaggatgagcatcgacacatatttgatcggatattatattttttgggatctggagaaagtttgctcggaagccaaacatgttaagacctgagcatgtgtatgatatgcaaaggctggggctcgaacgcgcttgtatgagtcttgttaatttgcatgtctcgtgcatagtctctcaccatctattcactataatatacaaaatctgtgtctatctatatttattttaagcttctaac

SEQ ID NO: 18497 - DNA, 1686 bp, Zea Mays
aaaaaaactgggcctgaagatgattgtgttctaattaggtgtgggtcctactgaggatgttgagcgcaaatttcagcatatggcaagttcagtgcataaggtagggatggtgcttgattcagtgcaaaccgacgttatgcagctaaacagagccatgaaggaagccacactagattctggaagcatacagcaaaagattgttctcctagacgctttgctgcagaaaaatcttaagggacaagatgatctcaaagctcttgttgagagcaacaccaaaagcatctccgatcagctgactgttctgaactcctactccaacaaactggatgagatatcctcaaccctttcaatcttgccaaaacaaatagaaacaaatttgaagcaacagcagagtgacaccttccgaatttttagaaaagacatggaggagattgttagagctgttagatctctcaacaataagattgatgcaatccaaatgccaacagaccagagctgcacaaccaatggaaggcccctgatgaaccaactgccagtcgatagaaatgaaaggccccaggtgaaccaaacaccagaggtaacccgggtgagccaaacaccggtagcaaccatggcgaaccaaagaccagtagcaaaaggaaggcacctggtgagccaaacaccagcagcaaatgggaaacctctgacgaaccaaacatcagtagcaaatggaagatccctgatgagccaagtaccagcagcaaatgggaaacctctgacgaaccaaatagcagtgccaaagggaagacccatgatgaggcagaaaacagcagaaggaggaaggccccagatgaaccaaatacctgtagcagatggatggccccatacaaacaaaatacacgcgccggaagtgcggcatcccgtacctttggtgtgccctgcagcaggcccgaggccgaaggtagaggagggaaagctgagagcggttccccaaaagctaactggttgtagatccagggtgacacctaaacaggaagaggcggcgacgaatacaaaggtcgtcgtcggccgggcagcggcaactgagaaggtggtgatattcatcgacgacgactccgacgatggcggcagcgaggcccttgcttcctgcgtgatcctgaggccggcgcccctggggtcaggtgcaggtgagtgcgacctggtgaaggtgggcgcggaggagagccaggagatcctgaggagggccaggaagcggaggagaagagaaatgcaggccattgtggcctgcatgccgcctgagcttgggtactagtagctagctacttctcatatcaatatatcatggatggatggatgcagttcctaatcgagaaaaagggatagttagttgtgtggttttgttgttgcgatggaatgaatcgagcagcatggatggattggttgattattatatcatctataataggggtaaggtgattgtgggtggtggtggatctggcaatctgctgggctggcaaaaaattagtgggaaaaagtgggcctgcactgcatttgcctgacaccgcacgtacggtactcatgatccatcgcaatcgtggtgttttgtttagctgaataataacaacggtggtgttttaattagctgagtagcagctgggagttggtaaccaatccgaggttacacagatgcgcgacatatgaatcctt

SEQ ID NO: 18498 - DNA, 1775 bp, Zea Mays
gcattcttcgttttgttagcagtctatttgttcatgtgaggtttatttacatcctatgattcgggatgcacatggccgaaagatgtcaaaatcacttggtaacgttgttgaccctcttgaggtgataaatggcatgtcactggatggtcttctgaaacgtttggaagaaggcaatctggatccaaatgaattaaacattgcaagagatgggaagacgaaggattttcctgatggcatagcagaatgtggtaccgatgcgctccgcttcgcactgatatcgtacacctcccaggttcttatggcacccagttgagttttttcatgtttaatgtagcatacatggttttatgcaatcccccccccccccccttcagtctgacaggataaatcttgatatcaagagggtggttggatatagacaatggtgcaacaaattatggaatgccattcgttttgcgatgggcaaactgggtgatgattacattccgccggcaactgttgatgtgtctcttatgccaccaatatgcaagtggatactctcagtgcttaacaaggctgttggaaaaactgttacttctttagaagcatacaaattgtctgatgcaacatctgctatatactcgtggtggcagtatgagctatgcgatgtatttatagaagctatcaaaccttacttcagcgattctcaagagtttgaatcagcaagagctgcctccagagataccctgtggatttgcctggagacaggtctgcgtctgctccatccgttcatgccctatgtaacagaagagctctggcaacgtcttccacagcccaaagattctagtaggaggaaagattcgattatgatttcagagtatccatctcttgttgaggaatggagtaatggcggggttgaaaatgaaatggacattgtcttggatgctgtcaacaaaataaggtctctgaagcctccaacagattcaaatgaaagacggcctgcttttgcactttgccgaggccaagaggtcgctgctactatccaatgctatcaatctctaatcgtgtgtctttcttccatatcacatctcaagatcctgacagagagtgatgaaactccagccgattgtgcaactgctgttgtcaacaaagacttgtctgtgtaccttcagctccaaggagatttaaatgaagatgctgagcgtgaaaagctaaggaagaaaaaagatgaaattcaaaagctacaaaatgcactggcacagaaaatggacgcctctgggtatcgcgagaaggctccacagagcgtgcaggaggaggacatgagaaagctcaccgctttgttggaacaactagaggtcatcagtgaagctgagaagaaattagactcaaactgagcctgtaccgaagttggtccccacatttttcttgtttgcaaaaagctcctgtttgctcaggttttcaattgatggttcagatggaagccacacttttgcagcgtgtaagaatattcactggctgtacagaaccatatttttgggtgttcgattttttcaagttagaaacttctgatgatgcatatgggaagtctgtcagaatatgcagcagccgaaatctgttaatcaaatttattagaatggtctcaattgtctcattcctcatgctacacaatttagcttgcttattctttctacgaaaaaaactagagtcagatgacgatggtccactttatatcacaaaccaaacaccctatctcttctattaaaacctaaaacctgaagtgaattcaggcgttgtcc

SEQ ID NO: 18499 - DNA, 1053 bp, Zea Mays
ttgctcgccgccgcacctggatctggctctcgtctcatccaagcacggattaggagtgcacctattttgattctgcgatctgagtaactgattctaaagggcaagaaggctcatttctaagcctatcaagtttttcaatgaaatgcaagagttgtttattaacagcagtgctgatggctctctagccatggaagctacaacttgtatgaatgaaactcatcctggagatgacagtgacttcaatgatgatgtgtgcagtgacttctccaactatcctcagcctgtgcatgatctaggtgatgattctgacactttaccatctcccaatcatcatccatctcaaaacgttgatcatagctcgtcaagttctggactgaagcgcccacaaggagagggagtaccagcgaaaaggaatgtgaaaccaaagagtcgcacaacaaaggtagtagatgaactcagtgctactttggtagaacttcgaaatgatcttaagaagccaccacctccagtgcctatgccttttggtaaccctgatgcaatattgtggcaaaggcttgagaatatgacaattactactgatcaaaagttaatggtaggaacgtatctagcacacaaagatcaaaagggtatgcgtggtttcttatctgctgcatcagacataacatttgagtcatgggtactaaagcatctgagtgatttggacctatgaatcgactaggatgatccatgtaggagatgaatggtgtgatagttgggttttttgcatttcttctaggttgatggatgtcaattgatggagatatttggtggttgtgactgctgttacattgctctttttgttgatttttaactttgagggtaccaatgagcatagtgcatagcaccagtaccttttacaattatggaatctctgcaaagcaaggaaggcattggactgtaataaattttgctccaatttcgcattgcaaatgttctagtagtgtcagatttttctctaatgcttctagtgaaaaatgagaccttttggagacagtttctaaattttgtgtgctg

SEQ ID NO: 18500 - DNA, 1479 bp, Zea Mays
atggcctacacggtcacacggagttatacggaccaggttcggccgttctgccaatatgctgcaacccaacggtttcttccaacattaacccccagcgggcagcggccgcgcactccctcagtccctccccgctcaccaccagtcaccaacgcccaccgggcctcgtccctcgtggcggcaactgggcggccgtcgctgccgccctacgccaggtgccgaggcgaccttcaggcccttggctggcgacgagcaccagtgcaccaccaatactctgagcctggctgccgaaagtgccttttggggttcttgtaatcttgttacattaggattcatttttgatgacttcatcaagaagcaagagcaagagcagaagtaggagccgcagtcgcagcaggagcaggagccgcagtcctcggcgaagagataggttgcgcagtgaacgtgcaccccaccgcagtcgtagccggagccgcagcccataccgtcgcagagaacgacgtggtcacagggattttgcatgcaagaactgccggagacctgggcacttcgctaaggagtgtccatctgcacctatgtgcaataactgtaaccttccaggccactttgcagcagaatgcaccttacaaactgtttgctggaactgcaaagagtctgggcacattgccagtgagtgcaagaacgaggccctatgccacgcctgcaacaagacaggtcacttggcacgtgactgccctacttcaggtgctaacgtcaagctatgcaacaaatgctttaaatcaggccacatcgccgttgactgcaccaacgaacgggcctgcaacaactgccgtcagccagggcacatagctcgggagtgcaagaacgacccggtctgcaacctgtgcaatgtctccggccacgtcgcgcgcgtctgcccaaagacgactctggcttcagtgatacagggcggcccgttccgagatatcctgtgccgcatctgcggtcagccggggcacatcagccgcaactgcatggcgaccatcatctgcgacacatgcggtgggagggggcacatgtcttatgagtgcccatcggcaagaatattcgggctccgcaggctctgaagatcttttcgccaagggctccgctttgttctgatggctgagtttcgccaggatgtttcatttgtttctgacagtattggaacagttttccttctgccgttgtagttgaggaatgattctgtaggatgtgttgcgggtgaaaactccttttttcccccttttaatcaggatagccctttgtgggctcaaacattgctgtaacggctcgtgtgaaaattgccaggtcatgatttaactcttgtgctcgtgctctgctgtgtcttttgaacgcttgttttgtgtacttatactgtattgtaacgtcacgtagaactgtgaaatttgtacggtgacgttggtgatttgatcttgacaaagagatgcctgagagttgggc

SEQ ID NO: 18501 - DNA, 766 bp, Zea Mays
ttgcctcagagatcttggttggtttagaaatgattggagcattgtggaagccagcactacaaggaaacagagtagtcaagcttgagattgctattgcttctaaagatagagatgttagatccaagggcgcaaaacgaggtcgcatgagtgatttggaagccaaactagatgaactgcgtagggatctgtcatccacgggtagcgatgccatatttccccatgcagttcttactgcgcaacaaatttcactactgagcagccagaagccaaccactccagctgagctagaaaaggttatagggaaggtgaagacaaggaagtacggcagcaagatcattgagctgatgaggtcacatgacaattcaggaagtggccgaggcaaggaggctggcgatgaacacagagctaagaagatcaaaacgaaggatgaggatgttgtttgtgttgagagtagcgaggaagaatagaatatgcccttcacatacttggctttttagtctatcatctcatggttaattattttgccaatcatttcctccgacgtcatctttctgtaatttagactttcacggattaatgcacagtcatatttcttacagagaaagcctcgagcatccttttgaccggttcatagtcttttgcttcggtagctttgtatcttgttgatgatcggattaatgtgcgaatacttgggattaatgtgcgaaaactttgtgccaagtgtttgaatgtactatacacatgctgaggaatatggtaatcggta

SEQ ID NO: 18502 - DNA, 2389 bp, Zea Mays
cgcaccgtcgaattccccgtccgaccccactggtcccggcctctgcagggtggcccacccatgacccatcccgcgaccgcgacccgaccgctcccaccttccccgcctcgtcgtccccctgcataaccaccaccccaccaggccaccattccttcctcccctggtcgcccccgcctccatggccctcgcgtgcgcgcccataccgctcccgagtccctaggacgcggcacgcacccttctcgcgggcgcgggcgcgggcgcggggcgcgggagcaggcatggcgtcgcaggtcgctgggtcaaccccggcggtggcggcgcttgggttccttctcccgaccttctgggagatcgaggtcacgtgcgccgccgcgatgatcctcgtggcgctttacgttgcctacgagctcctcaacccgcgctcctcgcaggcggcagcggcgggcgacgccgacgagctcctcgtgcgggggctggacggcgccgacaagttcaaggggggtgtgagcggcccctctgcctatgtagtgaagctcgaattgttggctgcaaaaaatttgatggcggcgaacttaaatgggacatctgacccatatgcattgatcacttgtggtgcagagaagcgtttcagataaatgtcacgatatatgactgggacattgtatggaaaagcacaatccttggctcttttactgttactgttgaatctgaggtaccgagtggaccaatttggcatacacttgacagcacatcaggccaggtgtgtcttcatattaaagtaatcaaggttcatgaaagttcctccagggcaataaatagctcagctgaggctggtgctcgtagaaggatttccttggataagcaaggtcctactgtagttcatcaaaagccaggtcctttgcagacaatttttgaactgcctccagatgaggttgttgaccacagttattcatgtgcacttgaaaggtcatttctgtaccatggacgcatgtatgtctcttcatggcatatttgctttcattcaaatgtcttttcaaagcaaatcaaggttgtgattcctttgagagatattgatgagataaggagaagtcagcatgcagttattaatccagctattacaatttttcttcgaatgggagctggaggatttggtgttcctccgttaggatgtccagatggaagagtcaggtacaaatttgcatcgttttggaacagaaaccatacatttagagcattgcatcgagctatgaagaacttcgtaatgatgatagacgctgagaaacaggaacgtgctcagtctgcattacgtgcacacagtagttcaagaaaaaatagcaagaaggagataaatgtaccagaagattgtgctgcattaacagggaagttacaaccttttgtcaaagaagaagttttggtccctgtattcaatggaacttttccctgtactgcagaacagttcttcagtattcttttaagtgatgattcaaattacataacagagtatcgaacggatcggaaggataaagatataaatctgggccaatggcacgttgcagatgagtatgatggccaggtgagggaacttaattgtaaatcaatatgccatagtccaatgtgtcctccttattcagcaatgacagagtggcagcatatagttctttcagctgacaaaatggatctggtatttgagacagtacagcaagtacatgatgttccatttggttccttctttgaggtgcactgtaggtggtgtgtgaaaactatcagttctaactcgtgcagtctcaacataagtgctggtgcgcatttcaagaaatggtgcatcatgcaatctaagataaagagtggtgctgtggatgagctgaagaaagaagtgaaggtgatgttagactttgcgcaggggtatatgctcaaagttagctctcctgaccaagagaacagtaatctcgcgcagcaagacaacacggcgccggatgcgccttctgatacagggtgacagccgccatcacatgacaacgaatcatgccattacgatgttatacacagaagggcaggtggaccagtaactagtagtccacatgaaccacatctaacatgttaagctgacttccaaaagaatgggtggaccgtgtgtagcgtgttaagttcgtttcctgccattgctctatccgtttttggcagtttggctgatgtatatatatagctgtaaacacacgcaaatataaagtggtggctgtggcaggccagtgtgttgtttgagtataaaaacaaagaaagaaacggaagagagaaatatttgccacagaaccaacgcttctcgagtcacagactcacaggggggcatatgttgtgcaaataaaagcttgatgtcctagaaacaactttgcaa

SEQ ID NO: 18503 - DNA, 87 bp, Zea Mays
gaggtgcctgcgtccacccaacaccggtccactgtggttgcgacgctggagcttgtcctggccactgtccccatccttgtgcctgcg

SEQ ID NO: 18504 - DNA, 3621 bp, Zea Mays
tcacggtgagggaatgccacaacgtggcggacgccaccgccgtggtgctccccttgcgacgcctaagctacttcttttgcagggtttggtacaagtggagtggcccatatgttgtgcggaggagcactggtgaagcctaagaacccttatgtcgatgggcgtggtctcaagggaggtgttgtcagcatgcgagaggctctgcttcatttgcccgtcactgcggacgaggtcccgccatccggtcaagcgctacaagaaattgcttgcagaaatcttccctcggacacaggatgaagaaccaaatgatcgcaagatagggaaactgtgcgaatatatttcaaggaatcctatgcgtgttccaaagattacattttacttagagcaaaagtgctacaaggaattaagggctgagcgctatggttcagtgaaagttgttattgcaatctatcgaaaggtgatatgttcttgtcaggagcaattgccactttttgccaacagcttgctaacaattgtagagacattattggagcaaaatagacaggatgacttgcggaaattggcatgtcaaacactttttgactttataaataatcaggttgacagtacttacatgttcaatttagaaaaccagattcctaaactatgtcatctggcccaagagatgggtgaaaaggagaagatatgcattcttcatgcagctgggctacaagctctttcatctatgatttggtttatgggtgagcattcccatatgtctgcagagcttgataatgttgtttctgcagttctggaaaattatgagagcccatatgcaaatgctgataatgatgccgctattgaggatagacgaattcagtgggtggatgaagtgctcaaagctgaaggtcatgaacctcctgctgttaccattttgacaagggttccttcatggaaagttattagaactgttcacggtgaattaagtttgacaatagaagaatcaacaagtccaaatttttggtcagggatttgtctacataaccttgctagaatatccagggaagcaacaacagtgcgacgagttctggaagttatatttcgttattttgataataacaatctgtggtcaccttctaaaggatttgcactgtgtgtcctactggatatgcagattgtcatggagaaatctggacagaatgctcatatattgttgtctatgttagtcaagcatcttgaacacaagaatgtattgaaacaaccagatatgaatctagatatcattgaagttacttcacgccttgctgggcactccaaagctcagtcttctacagcactaatggcttcaataagtgatatggtcaggcatatgggtaaaagcatgcaatccttggccagcgatgcaggtcctggagacaacatggtcaaatggaatagcagatatgggaaagctgtagatgaatgtcttgttcaattgtctagaaaggtcggtgatgctggacctatccttgatacattagctgtagtgctggaaaacatttcaagttctatgattgttgcacggtctactatctttgcagcatatcgtactgctcaaatagttgcatcattgccaaacttgtcacatcagagcaaagcatttcctgaggcattgtttcaccaactgcttttagcaatggtctatccggactgtgggacacatttaggagcacatcggattttctctgttgttcttgttccctctgctgtcgctccgtgctcattttcagacacttcacggacaaggaagattgatctccgaaggacattatctagaacaacatcagtgttttcatcttctgctgctttgtttgggaaacttaaaagagacatgctttcatttcgtgaaagtccgctccatgataatacaaagctactacccatcagtgaggatgcagatgagatcagcgcaaatgatgcaaaactattcaagtcacagactattcaaaggatggctagtacaaaagatatttctcttccctcttccacagatgcaagtactttgagtgaacaaactccaaatcaggaaaaggatgctgtcacccttatgctcagtgttcgtcaggcaaatcttcttctttcctcgttatggactcaggcactgtcacctgaaaatgttccacggaattatgaagcaatttctcatacttacagcttgatgctattgttttctagagccaagggctcaggtgccgacgttttggttggtagctttcagcttgctttttcattaagaagtgtttcgttacaagcaggttttcttccaccttcacgcaggcgctctctttttactttggcaacttcaatgcttgtgtttttctcgaaagctttcaacgttccagcgctcattccagttgtgaagcatgtgttgacagaaagttgatccatttctttgtttaatagaagactgtagattgcaggctcttgatagtgctgctcagtcttgcaaactctatggttcaaaagaagatgacgatcaagctctgaaatcactctcgaacattgacatgaatgaacatcagtcaaaagaaacatcagtgtctcttatacttgatagcttggaagatctgtcagagatgacatttgtctgggatctcattttactgaaacaccttcgaaatctgcagcacaaaatggaaaactgcaccacaaatctatggaggttattccattcggatttgtttttgaagatgatactctcgttgaagcatctgacagcttagtagaacctcacttgcgacatctgccatgtaacagcgttcttgatgttgaccggcttcttaattcggttttggaaacatctcagcatgttggaaggatgtcagtttcaacagaccaggatttgcctttcaaggaggtagccaaccaatgtgaagcacttctgattgggaagcagcaaaagctatctatctgcatgagtgttcgtgaaaaaaaggatggtgaatcatccatcgagaagtcatctcagcaggatcctcaagcatatacgtttctctgcacagctgatgaacaatggcacctcaattcctgtaagctgccagtgctgtgtccctatgaccggttccttgcaacgtctgggtgctaagatgatctcttctggtacgcggacctttataactatgaatgtgttcagtggactcctaaaaattggcggttccagctcatgcatgccaaaataggtgccctacaaactgatgtccgtcgggccaacccagatgagcccatgtgtgcgtgccagatggcatcatttccatcatatgtaaattgttccctcgtttgtaaaggctagttgagagctaaaatatcagagggggttggaggagttaaaatccatttcttattcaaaattgaataaggagattttagcccctttaacccctccggttttgtggctctcaaactaaccttaaatggttcgtctaccatgggaaatacatggttgattctggcatttttgaggccggagcgaaagttactattgaagccccttctatatccatgagtgtgtatatatgtctatatgtataatatatatacttttatatggaaacttataaacacataattattgatctcaaatagtttttcagtaaatttagttttaaa

SEQ ID NO: 18505 - DNA, 580 bp, Zea Mays
tcgacattgtgtaatcatgctttggtatgcagcttcggcaattatgcaagatatcgggggtaaaggtctgctttgatactgaaaatgctcgtgattctttctacagagcagcagtgaactttgttttagatgattgcagcagagcagcaaaagacatcggtgcagcaaaacttaatggtgaggatccaagggattttctcgccggccttgctagcaatattggattagacaagtttcgtgctgccactcttgtatgtgcatcagttgctactcgtacacggacatgcttcttgcaatgctgggctctagagattcaaggaaaacggccagaagcactggatgaactcgtgaagatttgtagaattcattacatatttcctccagaggacaattctgcagagatggaaatggtggctgctggactagaaaagaatttgcatgttgccgagagggttcaccttctatatctatacaggagcgtttgtactgctggtaacttaaaaacagctgcacaggctcttggtctggtgaacaaagaatgaacatacttcacagcttcagatgttgagcaagtcgagaa

SEQ ID NO: 18506 - DNA, 1669 bp, Zea Mays
cgccgcggaggggcccgcgacgatggctgcgccgcgctcatcgggcgggggccaccctgactacccgcccgagacgggcgtgtattaccgtggtgacctagcgccgggctcagtggatgactccgagtgggaggaggaggaggaggacgacgacgaagaggaggcgtcatcatctgggcgggagccggaaacagaggagaccaggttcaaatcaggaatcgaggggatgctcaccaggctgcagaaggatagggagcaagcgcggccacctccacggagtagtacccacgacacacgggaacaaagtgatgatgatgctttagctggcaacagtggcgctcctagtcatatagcggctggcggcagacatattcgaagggtacctgagaatggaagtgtccgtggatctcattatcaaaatggaataatagagggcaacaacaccttagagagttcgagcaatgatgcatggaaaacatggacccttggcaagggtggtttatctcattttgaagtggctgaggtcctacctactgaaagaagaaaattatcccaacatggtgacattgcatctgtgcaaaatgatgttcaaaggtcatctaatggtgtggctgtaagtgattatcctagtgatggtgttggcactgaaagagatgagatacattcacgtcttcaaagtctggaattggacctttcttctgctctgaagacattaagatcaagatttgataaagtcttatcacatatgtcaaatagtaatggagcaactgtgctagatgacatctctgatgattgggaacttgaggagacaaaggtaatgcaagctcaggaggagcttagatcaatccgggccaaaatagctgtgttagaagggaagatcgcacttgagataattgaaaggaacaaaataattgaagataaacaaaggaggcttgatgaagttgagaaagcactgaatgagctccgtactgtttgtattatgtgggccaaccctgctacagatgttttgctggttgggtcctttgatggctggacaagccaaagaaagttggaaagatcagaaaacggcatgttttccttaaatctgagactgtaccctggtagatatgagattaagtttatcgttgacggtgtttggaagaatgatccgctgcgacccaccgtgcataacaatgggcatgaaaacaaccttctgcttgtcacttgacttgaagtttgcacccggtagcatttttgtagatcatttgcctagcaccttgtcggtcccccatgtaactaatcaactttcccttcaattttttctttcttttctagataggtgtgtgcaacataaacagtgtagggtgttattgaaacctgttgagataggagaaggaagtagatgcatattcttttgttcccatcgttctccccggtgttggtccagcttcatgattttgtttaacaatgttgtgatgtacatatgcagtgaggtggtctattatcgaaattatttcaaaatttgtttgcaggagttacattatcgtcgttctaacccccacatagaatgcagctaagaatcgccggggggattttgtttacggtgggaagggatttcttccagtgaaggtacggcattcgtttatccaggtctgcgtcactgaagtgctgaaggcatgtcatcggagta

SEQ ID NO: 18507 - DNA, 1380 bp, Zea Mays
actccaaaatggctggacgtcctcgcataacctccctacacatatcttcttcacctgacctctcttccttaccctccctcatagcagtcggctgccgtggtccggtgacctccccacgatgcctcccgggaagagatccacacagccctcacggaattccgaagaagaccctcttactgaatacgagaaaatgagggctgtgaatatgatgaagaacaatcaattgtttcaacggctaggccttggacaattaaaaacaatgatcaccgcaacaactacaaacaacaatcaaggcggtcctcaggaatcaggttctttatatgatggtgagaacgttgaggattctggtgaagaggatgttggcatggaattccaagctcgtaagggtgtccctacccacatctccaatgatggtgaacatatgtcaacaaaagtaacaagaggaaataaaagaattatggcacctgtgcaggaacggccagttagagtcactagacaaagagttgctgaagaaagttgtgtgaagaacaaacttaatcgtgaaaaagtacagtatcaacaatgcacaggctctcagtcctacattgcaaaggcttttatattgaagcaagaaaaatataaggacgcggaacctagtgcaatagatcttttcaaggagatgcattgtagcaaaaagaaaggttttagtgaaaatgttcagaaagctattgttgacatggaagaaatggtagcagcaccagttcaggatggacaacaaccaaaatctcctacagaagttgtttctaatgtgctaccaggctccagtgtgttcctacgcaatgttggtcttaagtctgcatcccagaaaagctccacaacgactgtttctgcaaaggttcaacaacttcaggatgaactcgagaccgagaagcaagaaaaagatggccttcgggaagaagtggaaaccttgaaggctcaagcacaagcatctcaggagactgttgatagtatgaagaggtcgatggaagaaaataacaacctccttcgtcaactattaagcttcaatcgaggccaagtgcctccatcataagtctggttgaccactataggacatgcagccttatggctgttatagtggctagttatagtagctctagatttgaagttataagatcatttttcaattctgcttaatttttaatactttgagttgaagttattggatttgttttggattttaagttaaaggatttgcagatatatgttttaaagttatattattctcttctagatgaaatatttgtgttgaacaaattcatatgatattttggttctgatgtgtaatattctatgacgatatgaatgcatatgatgtattccttgcgatgatgattatatttg

SEQ ID NO: 18508 - DNA, 2266 bp, Zea Mays
ctgcctcacgcttcctgttcgaactcttcgtcgcctcacactggtgctcctcctctccccatcgctccgccactcccatggcgtccctcttcggggctggccgccggcgatcaccggaggacgacggcgaggacgatagatccggcagagggaggaccaagcgcttccgcctctccccggaggaggacgcagcgtcgccggcggaggcggggcccggcgcggcgacggagaccggctggctctccggcttcgtctacggagcgaagagggtcatttcttccgttttactgttctcctcgcccgaggagaccggctcgggggaggacgaggaagaggagaaggacgacgacgacgacgaagagggcatccacttgaatgaacatgaagctactcatgacactcatggagcaatagttccttatagcgagccaaagcttactattgagcaaatggttatgaaggaaacattctcaagggatgaatgtgataggatggtagagctaataaaatcaagagttagagattctacttttcctgaagcccatgagtatgtaaagccagaagaaatccctagtaggaatgcaggcattacacatgacttcacaggaacatggcgctccttgagccgtgatcggaatgtccctgaatcagttccactctctagtatgagaacaagacctggtagtttttctcaaggctctccactccaagcatcacctgagctatgcactgcagcagttacggaagcaaaaaaatggttggaagagaaaaggcagggactgggcttcaagcctgaagacaatggaccatgcacactaaatactgatatacttagttctgtaactacaaaggaggactacctttccagcttttggacaaaattggaggaatcacaaagagctcgtattggatcatctggaggttctgctgatgctcctaaattctggaattatggttctaattccaggttatttgagaatgacacctctatattttcattgggcactgatgaaaaagttggagatcctaccaaaatctataatgggtctgggaaatttgcagcaacagaaccagttggtggatgctgcttacctattacacccactgaagatagaactgatggtattactgagcctgtggaccttgcaaggaacaacgggaatgcaccccaagaaaaccaggttgcatctgaaattctccctgataaagttccagagggtaacgatgtgtcttccactggaattactaaggacactactggccatagtggagatgttaaagctcccacttcagaaccacatttaggggaaacacgtatcaactcagcatcagaatccataccaaatgatgcgggccccccaacccagaacaaaaagaacgggtcgacgaccaagaaaacattagtaaacggtctcgtggaccaatcaaatgccaactccgggctagaatcttcaggaaacgataaccctagctacaccaactcgagcagtgctgtgccacccgcaagcacccaaccagtcgagtctgcagccgctgctgtagacgttgattcggtcgagaaaggcccaggtacgacaccagagcaaccggcgaagcgaagggcacccaacgttcgacgaggacagagaagggtgctgcgaagcgcaacgagagaaggaagagcgacgtaggggatattgtgttatagcgaattaaagggggcaacacatgatccctagctaggttaactagagctatagcaatgactggccgtttccacgtacgagatgcgtagtgtgcatcaaactgtatccatgttgtattatcgtaggagtcgtaggccttacagtgaccacgcgtactggttagagttggtcgttcaggaccagtagctgcttgatttgggtttcggtgtcaggatttggttaggtcctgtgtgtagtttgcgcagtcggaaagagactgttggttgtattgcaggttgcaagcagactgtgttgtagcgaccaggtagtaaatccagcgagagctgctcctctctctctctctctctctctctctctctctctctctctctctctctctctctctctctctctgtatgatgatggacgctggtgtttcaggcgatgtactcatgtaacccttgttttgtactgagctatgggcctttctgtgttgtgcgtgctcgcatgcatgagctgcttcctttttttttcctttttctttttttaacgacaatacgctgacaattttttttttctttttctgtgcttgaagcagtgca

SEQ ID NO: 18509 - DNA, 576 bp, Zea Mays
cttttctctgaacagtttgggtacgtgtgcccccgcattctcttcggccggctatgtatagatgagcgaccccctgctacccaattccaacactcaggcaacccagctttggctgcccttgcttgctgctcagttctttgccccctgttcctcctcctcctcttttcgcacctcggcgcctgcttcggcatcaactgcgaccgagatggaggcgcaagacgactgcaagtggcgccaagtcccggcgttcggcgactggaacctgtgggacgacatgcccgtcacccagtactttcaggcagggaccttcttcttcgccgcgccgacgacagagaaggacgacgacgaggatctcttcaaggtgccccagttccctgccacgccctacagctacaagaagtgcgttgttcgagtgaagggggagaaaggaactgctgtgcctccggcggcgaggaagggaggaaggaggcgccgcgtgaacgagcaacagaagtggaagcccaagggagctgtggacgaggacctctacaagatatccccgcagcttctctgcaagcaagtggagctttgccaaag

SEQ ID NO: 18510 - DNA, 1050 bp, Zea Mays
gtcgtctccgttacaacgcagacactgccgccgctccgcgacagtaactctgctctctctctctctcgcatggcgtactcctcgagccgcgggacgaaaccctaatggagaaccggcgccgccgccacgcccctgcgccgtagactcccctcgccgcagtgagccccgttgcaaggtacgactaccgtgctggtttttggggtgtcatgggacgagaatgtatcggcattgtccctccatttattagagaatttaattatccgatggccagaaattgtgccggtggggattctggtgtttttgtcaatggcagagaactgcatcaaagagatttagatctacttgtaggaagaggactaccacggacatctggaaaatcatactctcttgagatgtcaggaaatgtaattgatgaagacactggaaaaaaactacgcagtcttggaaaacttgctcctacgattgagaagttgaagcgtggttttggcatgcacgtccctgaagagtttagatagctggttctagtacaggatcttggttttgctaataatacactcttcaaagctgacaatggggtggcaaacgtgtggcttctgcgggacggtggtatcaaatctcagatttcttggactggagctctggaagcagcagtacttaagatccttggtgtgcggcgaaggttgtctggcactcaagaaaccaagataatctggtctaatgacttgactaccaatagtacccctcctgctaatttcaattgcttcaatggaagcgacgtgtgctgctagtgactctagattatcaggcagttcttaacttcactgctctgcctgtacgtgctattccttgaatgtgttatcattatcggtacattgccccatcacaggcatagaagtgttgtcagatgtaccatgagcaattgtcggcttgtaatatattggtagagatatgcttcccctaatatttatatgtatatatatgtgatcttgattcttgaatctcttgccaatacgattgattcctgaaccctgttaataagagtcttatttt

SEQ ID NO: 18511 - DNA, 1645 bp, Zea Mays
aaacggaggcgagcgactcggggtcgtcggtgctgaacgcgtcggaagcggcgtcggcgggcggcgcgcccgcgccggcggaggagggatctagctcaacgccggccgtgctggagttcagcatcctcatccggagcgatagcgacgcggccggcgcggacgaggacgaggacgccacgccatcgcctcctcctcgccaccgccaccagcaccagcagcagctcgtgacccgcgagctgttcccggccggcgccggtccgccggccccgacgccgcggcattgggccgagctcggcttcttccgcgccgacctgcagcagcaacaggcgccgggccccaggatcgtgccgcacccacacgccgcgccgccgccggccaagaagagccgccgcggcccgcgctcccgcagctcgcagtaccgcggcgtcaccttctaccgccgcacaggccgctgggagtcccacatctgggattgcggcaagcaggtgtacctaggtggattcgacaccgctcacgccgctgcaagggcgtacgaccgggcggcgatcaagttccgcggcgtcgacgccgacatcaacttcaacctcagcgactacgaggacgacatgaagcagatggggagcctgtccaaggaggagttcgtgcacgtcctgcgccgtcagagcaccggcttctcgagaggcagctccaggtacagaggcgtcaccctgcacaagtgcggccgctgggaggcgcgcatggggcagttcctcggcaagaaagcctacgacaaggccgccatcaaatgcaatggcagagaggccgtgacgaacttcgagccgagcacgtatcacggggagctgccgactgaagttgctgatgtcgatctgaacctgagcatatctcagccgagcccccaaagagacaagaacagctgcctaggtctgcagctccaccacggaccattcgagggctccgaactgaagaaaaccaagatcgacgatgctccctctgagctaccgggccgccctcgtcagctgtctcctctcgtggctgagcatccgccggcctggcctgcgcagccgcctcaccccttcttcgtcttcacaaaccatgagatgagtgcatcaggagatctccacaggaggcctgcaggggctgttcccagctgggcatggcaggtggcagcagcagctcctcctcctgccgccctgccgtcgtccgctgcagcatcatcaggattctccaacaccgccacgacagctgccaccaccgccccatcggcctcctccctccggtactgcccgccgccgccgccgccgtcgagccatcaccatccccgctgagagaatcaagaagccgcactgtaaatctgccgggaagctagcattttccccccggcccctccccctctccgggcgttgcgactttttcagttttgcgccgccggccggggtggtggtttcttgtagccgatcgattggattcctcgtattactgctgcttacactcccaattaagtgaaaaaaaaacgctcctctactctttacactacacacactgttagctgatcgattggacgtacttgctagctgctgttgctgctgctagcttgagattgactaacttcagcacttggattgatctatatctatatgactatata

SEQ ID NO: 18512 - DNA, 651 bp, Zea Mays
gatatggtatacagaagacgaaatagaaggattattacaatagccagtgtcatcttcttcagggagttttcagttcttctccagaatggctggtttccaaaaatcttcatggttctcctcagtggagtagtggcaggcttttacttctatcgcattgcagctggtagccccaaagagctgagcagcaacagtgattcagtgaactaatgcacttggatgaatcagatgatcatgggggaacgcagacccagaaggctatggcctgtttgctttcgatttccttcatcatccttcaattcaggcaaagctcggttgtaaggtgtccgcatgatgaccacatggattcagaagaattgcttgtttactcggccctcttcccgcactcctttgttcctttgctcatgtagtatagatgatagacttgaacaacatcaataaacgacattcaaaggccatgcagttagctcttcagtttgtctgctgtttgtttttcatggggacagcccgaaaggtcggtgaagcgttcaatgtttcgtgaagtgtccgaaaacagtcagtgttattactctgtagattccagctcgctcaaaactattcaaggccgatgacaagttgataacaattagtggcactgtgatttgttcctattcg

SEQ ID NO: 18513 - DNA, 454 bp, Zea Mays
atgaagacggcggcggctatctgccttcactggagctgtgagaaggctatggtgcaaattgttcagcagataaatcatgatggagaggtcaatcgagctcgctatatgccccaaaattcatttgtaattgctactaagacagttagcgcagaagtatatgttttcgactatagcaagcacccatctaagcctccactagatggtgcatgcaaccctgatttacggctgaagggacataattctgaaggatatggcttatcatggagtatttttaaagagggacatttgttaagtgggtctgacgatgctcaaatttgcttgtgggacattaaagcaaatagtagaaacaaaagtcttgacgccttgcagatttttaagaattctgtaccatctctttgaaggtgcataatagtcatacttgtgaaaaggcctctagctgattggttaggtggtc

SEQ ID NO: 18514 - DNA, 70 bp, Zea Mays
tttttggttgcttggttgttaagtctagagccctatccgatcacgataaggatctgagccattatcggag

SEQ ID NO: 18515 - DNA, 813 bp, Zea Mays
gaaatttctttggaactgtttctgcataaaggctcccctgttgctttcattacatgcttcgtgacactatttgctttggtcattgctataaccaaagatctccctgatgttgaaggagatcgcaagtatcaaatatcaactttggcaacaaagcttggtgtcagaaatattgcattccttggatctggtttattattagcaaactatattgctgctattgctgtagcttttaccatgcctcaggatttcaggtgcactgtaatggttcctgtgcatgctgtccttgctggtggtttaattttccagacatgggttctggagcaagcgaagtacagaaaggatgctatttcgcagtactatcggttcatctggaatctcttctatgctgaatatatcttcttcccgttaatatagagaggtggcggtggaacggccaagacaagcttgtttcatgccactcgaggtcgaggctaaaccactacggcgtgctcttccatgaaacgcagaaaactaaggaaatggctatatatatggtgcaatacgttgtatattttctgagtttcagctcgtatatatagtaggaacctcaacttttaccccatcgattggaagactgaaacttcttgcatgcgtatgtatgcctgtgggtatgtaaaaaccttggcccgcacaaagctacatgttacagaactttcagctcgatggatcggtgaaaaaagtgtcctattttgcgacctggttttcctgcagcttcgtccctcgtagcatgtgacagcaacgcggcaaaggatgaacagcgtgacggcgaagaag

SEQ ID NO: 18516 - DNA, 1420 bp, Zea Mays
ctcactgctaaaagacacgtcagccccacacagaagccgacatgtcctgctcctctgaattctgatccgtgcggtgcggccgtgcgggtgtccgtctcctccattgcgaagccgcgagctcctgcgtcaaccagatcacacgaaccaaaccagcgcctcctcccccgagtctcaccgccagcgcccatggcgacacgctactggatcgtgttcgtgtgggatgagggcaaataccccacaatgtctccgctcaaggagattgttggcagcatccagtcacaggttgccaagattgaggatgatatgaaggtgcgagcagcggaatataataatgtaaggagccagcttagtgcaatcaacagaaagcaaagtgggagcttagcggttcgtgatctttccaatctggtaaaaccggaggatatgatcacctcggaacatcttgtgacacttcttgcaatcgttcccaagtactcccaaaaagactggctgtcaagctatgagacacttgatacatttgtggtacctaggtcatctaaaaagctctatgaagacaacgaatatgctctctacactgtgacactatttgctaaggttgttgacaactttaaggtccgtgctcgcgagaagggttttcagatccgtgatttcgagtacagtcctgaagcacaggaaagccggatgcaggagatggagaagctactgcgagaccaagaagctatgaggaccactcttcttcagtggtgttatgccagctacagcgaggtattcagttcctggatgcacttttgtgctgtgcgtgtctttgtggagagcattcttagatatggtctgccgccatcattcctgtctgctgttcttgcaccatctacaaagagcgagaagaaagtaaggagcatcttagacgagctctctggcgatgcccatagcctgtattggaaatccgaagacgatgtaggcgttgctggtctgggaggcgaaaccgaggcgcacccttacgtctccttcaccataaattttgtctgagacaaagtatggttcctagaccgtctgtggcctaggcaatataatacttggaagcagctattggaacgcaagcgcggaacgagcatgtatattactctgttgatttatcggttcatgtggtcctgtagttcatatcacagagagatcagccgacggatgctgtaatttctgaggaacctatggaattcctgtagttcatgtggtcctgtaatttctgaggactacctacctatttccctgcagcactgcaccttgtaaaaagacttaacccgtgtctgtagcagctggctactggatttattacatctacaataaaagtcatttttaatggttgtttcataagagttttcagcaatttgaacgatgcggcaagtaactaacaaagaaagagatgaaa

SEQ ID NO: 18517 - DNA, 1987 bp, Zea Mays
ccattctaaaaaaaatccccgatctactacctttctcctcctctctcacggtctcacctctagtttccaggatgacaaaatatgggatcagattcgattcgtgagcctgtagaacaaggatgctcctccaatccatactaaattgaacccacgcagcagacatccgcgcgcagtacgtccccttcgcgaagcaccgccatcctcaccacgccgccgagtcgggcggcgcatgcgccatggcgttcctattcggcgcattcctgggcctggtggtgggcgtggccgtcgtgatggcgttcgcgcgattcgagaacagccgcgccgagcagcgccgtgagctggctgctacagctgcagctttctcgaagttgactgtacaggatttgaggaagctcatcccacccgagttttatccatcatgggtttcattcacacaaaagcagaagcttaaatggctgaatcaagagctgacaaaaatctggccatttgtcaatgaggctgcatcagagttgatcaaaacttctgtggagcctatttttgagcagtacaagtcattcatcctggcctccctccatttctcaaagttgacacttggtactgttgctcctcagtttactggtgaaaaatattggattcacaggagtacttcggctcatatttaaaccgctggtgtctgaattcccctgttttggagctgtttgctgttctttaagggagaagagcaaggtggaatttaccctcaaggttattggtggcgaaatgactgctattccaggaatttctgatgcaattgaggggacaatacgtgatactattgaggatacactgacatggccgaatcgcataattgttcccattgtacctggagactatagtgacttggagttgaaacctactggggtattagaagtaaaactggtggaagctagggacctaaagaacaaggatcttgtgggaaagtcggacccttttgcattgatatacatacgtccattgcatgataaaacaaagaaaagcaaaacaattgactccaatcatcagagatcattgggtgtgctcgagtagacttagctgatatacagccaggaaaagtgaaggatttatggttagatcttgtgaaggacctggaaattcaacgagacaagaaacctcgtggtcaggttcacctggagctcctctactacccttacgcgaagcatgaaggggttcctaatccttttgctaatcagattcaactaacttcattggagaaggttctcaaaaccgagtctaatggatatgatattaatcagaggaaaaatgttattatgagaggagtcctttcggtgacggtcatatctgcagaggagttgccacctatggacattggtggcaaggctgacccatttgtggtcctgtacttaaagaagggagaaaccaaaaagaagacaagggttgtgacagacacgctaaatccaatatggaaccagacatttgatttcatggtagaagatgcactgcatgatttgctcatggtggaagtatgggaccatgatacatttggaaaggattacatagggaggtgcatcttgacactgacgagagttatactcgaaggtgaattccaagatacctttgtcttgcaaggtgccaaatcgggaaaactaaacttgcatttcaagtggacgccacagccaatctatcgtgatcgtgacagggatcagtgagacttgtaaacgaaaaaggccgataaacacttatccccaacggtgctatgtatattagtcgttctgtatttacaaaatcccacggttcttatagccacgtgaccaaaaagagatcaacccaccgacctgtattttctcctttgtgatgcaagtcagcaagtgcatggacctgtatatttgagtcgttaatgaataggaaatgctgttactatgctgcaagcacatatatgcttagtggtgccgtggtggtggttgcttctgtgctgctgtttgttcttccg

SEQ ID NO: 18518 - DNA, 1105 bp, Zea Mays
tctctcttcacatgaatatcctaggttctattctgggattggagaagttcaagacaaattgcatgcttagaggaatcccacatggatgatgtcaaattcacaccagatcaacaaagtaaactcatttctgcagcagttgatggattaatatgtgtttttgacactgatggtgatattgatgatgacaatcatctgttatctgttatgaatgcggaaacatctgttgccaaggtgggtttttttgggaacaagtataagaagctttggtgtttaacccatattgagacattaagtgtctgggactggaatgatggggctagagagttgaatatagaggatgctcgttccttggccactgataggtggaaccttgatcatgttgactatttcgttgattgtcactattctgtgcctgatgaccggctatggttgattggcggcacaactgcagggacgttaggttacttccctgtaagaaatgaccatgatggaccaataggttcagctgaagcaatcctcgaaggaggccatacaggagtcgttaggtccgtgtacccctcttcaggaatccatgggagacttgggcaaaacaggggcatctttggatggacaggaggtgaagacggtcgtttgtgctgctggcgctctgacgaaattgcagaaacaaacaaatcttggatctctagctcactggtgtggaagcagcaaaagaaaaccaaaaaccggcatcagccctactagccgcaatggataccgtttggaactttcggcactgacaagggaaagccctgtatgtgctgtgagcatgttgtatcttttctttgaattctactaggtcgtgatgaaacacagcacattgtaggtgcagttttgacgttgcttattgtttgagaatgcttgtctatttcagtaactggttattaatctagcaaagatatggtaagttgagtattgaagttttcgtgctcggaacttttagcggcccggaattgaacaggcgatgacgtgtatttggttcttggacattgtctgcagaataagtagcatataaatggagtaggttagggtgcatttggttcttggacactgtccgcataagaatttc

SEQ ID NO: 18519 - DNA, 1402 bp, Zea Mays
catcaacctccggctgtagctcgatgccagatatcaaatcccaaagctgaaggatttgactgctgagatttctgaattggagaagcaaaaggatgaacttgaggctcagttaaagaaggtcaacatttcactgaatgctgctatttgtcgactaaagcagacaagagaagagagggaccagtttcatgaagcaaacaatcagatgatatttactttacaagcaaagaatgacctgtcaaaatctattgactcatgtaacatggaggccagtgtagtcaagacttgggtaaatttcctcgaggatacatggcaacttcagttgtcatacaatgaacagaaggaaactaaaacgaatgacgagctggagagatgcacaagcagttttctgaagttgaccaagcatcatctttcctatttcaaggaagttcttagcccgtcaattgagcggatacgcacatacgtggataatttggcagtcttaaactctagggaggagtcaatagaacatgaaggggatgatgagatttctgtgcagacaagtccacaaaagtcccttgaggaggaatatttggaaactgaaaagaagatcgtgattgccttcagcattgtagatcgcatgaagaagatgttttattctgagcaagcggctaattctaggcaagatgatgcagaggtcaggaccttattttctgagattgagaaactgaaggaagtgtttgagtcggtagaaaggccgacactagacattgaagtccgcaaggcaaaggatccaatgaaggacaagtctggatcgaatcgttcagccaaagacaaatctgaatcgagccattcacctgttcaggtgccctcttcacctaaagatgtgcccgtggagtctccgaaatctccagtgaaacctgagcagacgatggacccagattcagagtttgcaaagttagagctagaattcggaaaagttaacagagaccatgaggagataggcggttgggatttcgacgagcttgaagaggagctgcgagctgacctatctaaatcaaccaatccaaaataaccacgctcaacccgacatctctgaacgcgcattccacctaactttccttgtgctggcttcttctgaaaatttgtagactttgaattgttgaatgtacatagtattgttgtttcattgtgtccatggacgttctatagattatactcactacatgggaggtggagattgttacactgtagactgacatttcattagcttatttgtttggtcttgtcatgtgcattcatacatgaatgaatgaatgataaacattatgtagcattccacattttggacattggaacatatattaactataacgataaaatgctcttggtcttggatgtccctgccaggttttaattaagcaga

SEQ ID NO: 18520 - DNA, 3556 bp, Zea Mays
atgccacttcttaaatggagtttttctctacttggtttttttatgtgcccctgcggcctgcgcgcagtgcgcacgcgcgtaatttgccgatacagattactgttcggccgttttgtttgtcggctggaggctttactttcggtcgatttgtttgttctgcagaacacgttcgcggactacaccgccaggacgtcgttcgagcggccgctgctgagcggggtggcgtacgcgcagcgggtggtgcacgccgacagggagggcttcgagcgccaccaggggtggatcatcaagaccatgaagcacgagccgtccccggcgcaggacgagtacgcgcccgttgtatactcgcaggagaccgtctcctacatcgaggggctcgacatgatgtccggcgaggaggaccgtgagaacattctgaggtcaagagcatcggggaaggcagttctcactcgaccattccggctcatgtcgaatcacctgggtgtcgtattgacttttcctgtctatcatgcggatcttccttctgatgccaaggaggaggatcgtgttgctgccaccgcaggataccttgggggagcatttgatgtagaatcattagtggaaaatttgttgaggcagctagctggcaatcaggaattggtggtaaatgtttatgatgtcacaaacatttcgaaccctcttgtcatgtatggatcagaagttcctcttggcaacccctcaccatcgcacatctgcatgctagattttggtgatccattcagaaagcatcatatggtttgcagaaacaagcctcatgtcccatggtctgcaatttctaccccatctggtgtctttgtcatatgtatgcttgtggggtacatcgcgggtgccgcttggagtcgttatgataatgttaaggaagattgccggaaaatggaggagctgaaaaaacaggcggaagcagccgatgttgctaaatctcagttccttgcaactgtttctcatgagatcagaacgcccatgaatggagttctaggaatgcttgatatgctgttagacactgacctaacctcaactcagagggattttgcacaaaccgctcaagtctgtggaaaggctttaatatcgctaatcaatgaagtgcttgacagagcgaaaattgaagccagaaagttggatcttgaatctgtaccatttgatctgagatccatccttgatgatgtcatctcattattttcttcaaagtcaagagagaagggaattgagcttgatgtatatgtctctgaaagagttcccgaaatcttgttgggtgatcctggaaggtttcgacagataattacaaatttagtgggcaactcaattaagttcacagaacggggacatatttttgtacaagttcatctggcagatcattcaaatcttgcaacagaatccaaagttgagccggtggctaatgggatgaatggacatacagatgagaaaactgctgtagcaaccagtgtttctctcaacacactaagtggttttgaagctgctgatagccgaaatagttgggaaaacttcaagcttttgctttcttatgagaaaaatgagatgccctatgaaagtgtatctgataaagttactcttgtagtaagtgtggaagatacaggaataggtataccattggatgcacaagccaaggtgttcacacctttcatgcaggctgatagttcgacttccaggacatatggtggtactggaattggattgagcatcagcaaatgtcttgttgaactaatgggtggtcagataaactttgtcagccgaccacatgttgggagtacgttcacatttactgcggttctcaaaagatgtgacagaagcgctattggtgacagtaagcctgttatgttgcatcctcttccatccagtttcaaaggtttatctgcactattggttgatagaagaccagtaagagctactgtaactaagtatcacttgcaaaggctgggaattgcctgtgatgttgttgcaaccattgaactggctcttggtgtgctgtccgggagaaatggcagttccctaaccagtatgaagcaaccatgcatgttattgatcgagagtgattcatggggcttcaatattgatgtttctttacgatctagactcctggagatgaagcagaatggtcacacacatgtattacccaaaatcatccttcttgcagctgcagaatcgggcaaactcaaagaacactatgcagttgattctgtgatcacgaaacccctgaaagcaagcgcacttgccgcttgtctgttccaaacacttggcatcaaacagtcaagcaacgagagaagtgacaactcaggttctctttacgggttgcttcttggcaagaacatattggtggttgatgacaacaaggtaaatcttagagtggctgctggcacgttaaagaaatttggagcaaaggtggagtgcgtggagagtggaaaagatgccctcgccctcctacaggtcccatataagtttcatctttgtctcatggacattcagatgcccgaaatggatgggtttgaggctaccaagcaaataagggcaatggaagcgaaggcaaatgagcaggcagtcgcctgtgacaattcagaaatagatggtgcgacaagggcagcaagatggcgcctgcctgttcttgcaatgaccgccgatgtcatccaggccacccatgaagagtgcacgaagtgcggtatggatgggtacgtcacaaagcccttcgaggagaagcagctcttccaggcgttgcagaagttcttggaccccggcatgtcctgctaacgccgaagtgatgcgttggaggtgaggcactattctcctctattctgtaattccctaaccttggccgcaacctgatccccaagaaagaccgtgcagcgcgggctgctcgtcgatcatgccagcggggaacagcaggcagacaaggcagcacgcaccacgggccttcgctggtctgcctgcctgtgcaggcgtcgtgtaaatgtattgtatttgcagggatactgtttacagcgctagtatgccccgtgccacaatgtccgagctacctgtggctgatgcacgttgcgcataggtggttttttttgtacagcttccaccatttttgtgctccagatcagaccaccgaaggaggcaagcatgctcgctggtgcagtgcagcactggaaggaaaacctgacttcctgagagtagatttttgctgtttaattgcattgggatttatgatgtattataatcagataaatgtgtgatgtaagctggcgtaattggcccaatgcatttccattgttatggatgagttgaaatggcattggttagacacttagactacactattgggtgtatgcccttccacagttccattttccctgcaaaatatcaaaatgtgcaaagggatagtggaatcatggcttgaattatatgaattttctttggtgtttttttcccgtatcgaagctcgactataacattagaagaaagcatctggaggcatgtttaagttttggttattacacactataaaatacaagtggtatttaac

SEQ ID NO: 18521 - DNA, 1590 bp, Zea Mays
agcccagcgacggatctcaggcccaaccaaaccgaccttcggcggcccagaacagcagcctatcacgaccaaaaccgccaaaccctagttgtgcatgcatagcccctcacgccagccgccaacgccccaatcccgtaaccgcagcctcgccctgctcgcatcttcctctccctctcagcgctggtgctcaatctacaggtcgtcccgctccctacacacccgccctccggtgtgaaccttcatgacgtccgcaaccactctccgatctgctgtcgtgacctcatccagccgtgctgtggcagtggatcggagttcgctccagctctgattgaattccactactatatgtgccacttaaagttgttatgtcaaaatattatggtgaaagcgagcgtctattgggatctattttttatcttgcaaatgatcttcctgaaggagattgatatgtcaagatacgcttgtttcatttgagctcactgttatctgaaaatctatagactgccttcgtccccttcatcactgccaatgaccgtgacttggccaccacagcaaaagcacgcaggatccttgatgtgtgtggtctagacgtgattgaattgggcgtgcctgactttgatccattagccgaatgtccagttattcagctcagattgtttgcctatacaatttgttcttatactatactgtctatgtatgctcctgcttcctgcgttttggtccagtagaagggtgcaagctcatcagaaaagaaaaggtggatctttctttattttaattaaaaaatgtctatagatagcttgtaacagataaatccataccccacctgtccccagcacccactcgcccactcacctgtaaaattgtggctgccttttcagattgctctttgcatctgatttttggctttgctttccccgtatgtctcaagtctagttaccatttatggctttcgcacctgtaaacatttatggttgcttttgttgattcatactagcatctatgctaattttttaatgcacgaccttaatgctacttttatgtgtatttatgatcaatcaccatgtattttacgctcttcggtttttatgtcaaaaaaatgggtttttacgctgatttatatgtgtgcctatgctgcaacacatacaattctaactaaatatgcataaagcagcgcgccagcacctcatattttattctcattgtttctacttcgttaattcattgacccatgtctctgtcttggtatattctggagacaaatccccacgtccagagttacaagaagatcaagcttggctgtggctgcagctgtgttgcctcctcttgttggaccgaagagagggaggggagaagcagctggcgtgcagacttctactcaggtggtcttttattctctatggggcttctaggatacatcttctccagaagcaccataagtcttgtcttgggcattacaccagggctagccactctgctacttggcactctcagtctgaagttctggaggagcgacagatccagcttcctgcttatcttggctcagaggtgatgctgatgtgcaagcatcttcaccttgagttctgccta

SEQ ID NO: 18522 - DNA, 1097 bp, Zea Mays
cgacctccaggaaggaccgcactccttagtccttacacccaccaccaccagacccctgtcgcactcgtgtgccggccggcgacggcgatgatggcgactggccgatcgctcgccggggtatactccgccagagccacccgccccatgcctctacgcgccggcgcacgggcgccctgcgccggtgccgccgcggccgagcctgcggccgagcacgtgcggaggctcgtggcggagttcgacccggcggtcccgctggactccgcggtcacgccgccgagcgggtggtacaccgacccggattttctccagctcgagatcgacagcgtcttcttccgcgggtggcaggctgtcggtcacatatggcaagtgaagaacccaaatgatttcttcacaggaaggctgggaaatgtggaatttgtcgtatgtcgggatgcaaatgggaaacttcatgctttccacaatgtgtgccgacatcatgcttcactccttgcatgtggaagtggtcataagacttgcttccagtgcccttaccatggatggacatatggattggatggcacccttctgaaggctacaagaatatcaggaattaaaaacttcaataagaatgattttggtctcataccaatcaaggtggctacttggggaccttttgtgttgatcagatttgatgatgagtccactgaagataatgtttatgacacagttggaaatgaatggttgggtagtgcttcagatctgttgggtacaaatggcattgacacttcactgccgcatatttgcaggcgagaatatattatcaactgtaactggaaggtcttctgtgacaattacctagacggtggatatcatgttccatacgcacatggggatcttgcatcgggtctgcagcttcaatcctatgaaacacttacatatgaaagagttagtgttcaaagatgtgaaagtgcaccagcagaaccagatgacttcgatcgcttagggacaaaagctctatatgcctttgtttatccaaactttatgatcaacagatatggtccatggatggacactaatctagctgtcccattagattcaaccagatgcaaggatgacca

SEQ ID NO: 18523 - DNA, 931 bp, Zea Mays
accgggagttgtccagcttcttgaaactccatttctaagtcttgtcaactatgcttctctggttaccacgaatgcggcacggcaccgacttgtagctgggaagtcaaagaatttacttgaatttggacttcgacgggctcaagggcctgatggaggaatcagtgcatcaagatattgttatatgggaggatttgatgcaacaagcaatgttgcagcaggaagattgtttgggataccaatacgtgggactcattcacatgcatttgtgagctccttcatgggtcttgatgaaattactgacaaaacacttactagttctgatggttcaaacacatgtgaagattttatctctctggtgcagaactggctgatcaggattcagttcattgcatggcacctttggagaaacgagccaaagtgagttggctgcattcacgtcatatgcactggcatttccaaattccttcctggccttggttgacacatatgatgtataaggcagtcggaattaggttggactctggtgatttagcatacctatccgttgaggcccgcaagttcttccatgcagttgaaaaagaatttgtagttgttggctttgggaaaacaagtatcacagcaagcaatgatcttaatgaagaaactatagatgctctgaacaagcagggccatgaggtagatgcatttggtattggcacctacctagttacatgctatgcacaagctgcacttggttgtgtattcaaattagttgagattaacaaacagcctcgtattaaactttctgaagatgtcatgaaggtatcgataccatgtaagaaaaaatgctacagattgtatggcaaagaagggtatccgttggttgatataatgaccggagaagatgagccaggtccaaagatggtgggttttatgatttaccattcgttta

SEQ ID NO: 18524 - DNA, 6499 bp, Zea Mays
ctttgatcggttgcttgaagtgggagaagggaacatgaatggtcttccaatgactacctggagaggtctacttggtgcagcattgtcatcgtaccacaaactactgttggtcaacaccagcagaaattcagaatttagttttttcttatcgcttgccaagagtcacagtacatgcccacaagtactgtctgctgtagctgaatatttggattccctgcaaggagtatcatccatggaagtgacaaaagaatttgatccacaaaatctcttggagctgttctccatctttgctttcaatttgagcagtccaaccaaggatgttcggattttaacattgaggattctatcatattttgtgaagatggatcaacgtctaatcacagatgaggagcgaccacacaagaggcagagaacagaagtttctggagaggaagctgttgctaaatacgctaatgttgtggatattcttttgattattgagtcaatgccaatttcagtatctactagccgtaaaattgctatcttcatttctcggatacaaatgagtttatcttccaagatggttcatgatgattacatacctcctctcttacatggtattattggcatattgtacaatagatttagtgatctatggccacaaacactggattgccttgctgttctcattagaaaacacaaggagcttgtttggggtcagtttgttccgttcattgcaattcaccaatcaaaaggactgactgtgaaaaatcaggagaagctggaagctgcaacccaaccacagtctatttttgactgcttcaacttgtatcttgctatggactttgattgcacaccagctgtgaccgtggctaccttattgcttcaatcgctccaaaggattcctgatgttgctgaatcccgctctcgacaacttataccgctatttctcaactttatgggctatgatgatagcagcatctttagtgctgattcatatatgcctgaaaaatgtaaaggcaaacaatggaaagcgattctaaaagaatggttaaacttattgaggttaatgcacaatgcaagatcgttatatcagggcaattttctccaggaagtactaactaaaagggttcttgatgacagtgatcctgaaatacaagcaaaagcattggattgccttttgaactggaaggatgaattcttgatcccgtacagtcagaaccttaaaaatctgattgatgtaaagactcttcgtgaagagctgaccacatgggcagtttcacatgactccttgtcaattctgaaagaccatagaagtcgtgtggttcctctggttatccgcgtgttggcaccgaaagtaaggaaactgaagctactaggttctcgaaagcacacaggtgccagtcatcgaaaggcaattcttcgtttccttttgcagtttgattcaaatgaacttgagctttttttttctttacttctgaggtccttgatccctggcagcctccagcttaaaatgtttggttctcagccagacaaccttcttggaagtttctctgacattgttggaacttcaacagaaatttgtgtagagaattttacatggaaaaaggcaaatggtttcattcatctggttgaagaaatttttggtacttttgatatgccacatataagcccatttcttaatgttttattaatcattgtcgctcgcttgctggagagttgcatgaggaatcttagaaatgagagtgatgggaaatatccttgcaaccaaacaaatgaccatggtaatggttgttccataaattctgaagtgggcaattctgtgaacgtggatgaatgctttaaagaaatgcatctagaaggccatatggagacagcgtcaggatccatcaccacctatgcacttgagttcattgagaatctgttgaggttggatattgatttgcagcagcaagatgaacatttagtgaagaaagttcttcttcaacatatggatgttcttatccatagtctccatgattttgttaatcatcgcaaagagctcaacaggagatctggtacatggcttgggcaacgtgaacttaggctgttcaaattattgctaaattacatcacagatccctcagctgctgataacttcatagaccttattcttccatttttcagcaagaaagatttgaactccgacgattgtttggaagcactatgtgttgtgaggggaataattcaaaatctgagatgcaaagtatctgaaaaagttctaaatgcactgaacccattacttgcaattgttggattggaactgcgactatgtatctgtgatatttatgctgggttgtcattgaatgatccttcgatgttgtttctggctgggttaataggagatctgaatgcagtttcagcttcagaacttggtgaactagattatgacacaagacttaacacctatgataaggttaggccacaattgtttcttggcttgacagaagagcatgtgggcgccatattatctcattgtgtgtatgatatgtcatctgaagaattaattttgcggcaaagtgcatctagggctctgcagtcgttcctggacttttccgcctcagttatgaataatgatgtgtccaaatactctattgatgataaatttagagagaataataccagaagcatttgcacgatgggctgtattcagaagatattggaaaaaacttatctgcacaatatgggagtagcaatgactaaagatgtatcaattcaaaaggaatggattattttacttagggagatggtctccaattttaatcatttagcatccttaagctcatttaggcctctctgtaaggtggatatagaagaggattttttccacaacataactcatttacaggctggtaaaagatcaaaagcactgttgctttttagacagggaatcaaggaaaacaacttttcagaggatatcactatgaaagtctttgttccactatttttcaatatgttttctgacgtaaaagctgggaaaggcgaacaagtcagagatatatgtttggatacactatctgctgttgctgccaaagtgcagtgggaacactatagaacaatattgaagagatgcttccgagaattaaaccttagacctgataagcagaagatcatattgaggctgatttgttccatattagatgcattccatttcatgaaacctgcaaatgatgcctcaggaaattctgatgctttgagtgaagatattgattcttcccttacattctctttggtcacagtctcttctgataagcaacagtacatgcaaaaggtagtgtttccacaggttcaaaagttgttaggatcagatccagagaaagtcaacgtcaacataaacctggtagcactgaaaatacttaagttgctaccggtggattattttgagtcccaactttcaagcatcattcatcgaatctgtaacttcctcaagaatcgtcttgaaagcatacgtgatgaagctaggtctgctttagctgcttctgttaaggaactggggattgggtatttgcagtttgtggtcaagatattaagagctatacttaaaagaggttttgagttacatgttctgggctacacacttcattatttgttgtcaaaaaacattactgctgatatgtatggtaggcttgactactgtttagaagatttgttggcagtggttgacagtgatttacttggagatgttgcagaacaaaaggaagttgaaaaacttgcctccaaaatgaaagagacaaagaagagaatgtcgtttgagactcttaagctgattgctcaaagtattacattcaagaccgatttactgaagaagataatctcacctgtttctttacatcttcagaagcaacttactccaaagttgaaaaccagacttgagatgatgctacacaacatagccttagggattgagtgcaactcatctactgaaacatcaaacttgtttatcttcgtatattgtcttattgaggatactattacaggaagcagatctgaatgcaaagagaatacacaatctagtcctgatcaagacagtactgtaagaaagaccttcctgggactaggtgagagtggatcacagaattcttatatacttaccaagtttgcacttgacttacttcgtaatcgtctgaagagcatcaagcttgacaaggaagatgaacaactcgtgaagatgttggatccttttgttgaccttctgcgaaagtgtatgagttcgaaacatgcaagtgtcctctcagccacatttagatgttttgccttgttggtgaaacttccgttgccatctctgagggacaatgcaattactataaaaaatgtacttatggagattttacagagagctggaaactccaatggtcatttagtcacatcttgttttaagctacttgctgatctacttagaggattcaggatttcactttcagataatgagcttcagatgcttgttcatacccctatgtttgtagatcttcagacaaacccttcccctgttgccttatcgcttctcaaaacaatagtcaggctaaaattggtttctcacgaaatttatgatatagttgttaagataggagagttgatggtaacaacattaactgaatctatacagcagcaatgcattcaaattatgctacaattttttctgaactatccactttctgagaagcgcttacagcaacatattgactttttcctggcaaacttaaggtatgatgaatatccatagttactttatcatgatatctcactgtatgctaacactctggaaaattgcagttatgaacatccttcaggaagagaagcagtgcttgaaatgctccatgacattcttaccagatttccccagaggattattgatgagcagggtcaaaccttttttcttcatcttgtagttgctctagccaatgaacagcatcagaatgtgtcttcaatgatccttagagctattcaaaagctgttaggacgcattggtggtcagggaaagagttacatttatgagtattcactttcgtggtacactggtgagaagaaaagtttgtggagtgcttcagctcaggttattggtttacttgttggcgatcacacattacaaatgggcaagcaccttaaaagtattctggctgttgttaagaaaataatggaatcatctattattgcttctggagctatacaattaggcttatctgatgaagctgccctgccattgtggaaagagacttactactctgttgccatgatggagaggttacttcttcgctttccggagttgtattttgagaaaaacatggaggacatatggataatattatgcaagttgttgatccatcctcattcgatgttgcgtagtatttcaagctctctggtagcatcatattttgctacagtggagaagaggaaacatgaacagaaattggatgccccatcatggttgcttgttcaaccgagcaggctattcataatagctgtttccttgttgaaacaattgaggagtgagctgagtgatactacggcaaataatctgattgtacagaatgttgcatactcagtctgcaacttgcatatgttgattaggcaatcgacctccacacatcagttttggtctagcattagttctgatcgtggtgctttccttgagggttttgaattgcttggttcaagaaaagcaaaaaatatatttctcctttgtacttcaacatctagtgatgtatctggatctagcctcgacaccaacgaagagcctacatctttgttagtttcgtcaatcctaaagaagatgggaagaattgcaatgcaaatgcaggatacacagataaagaacgtgttcaattgcttcaatatgatttcatcagctcttggtcctgatgaatcactaacctatgctgatcacctcttggccccattgtataaagtttctgaaggatttgctgggaaagttgttagtgatgaagtgaagcaactggcccagggggtccagaacaagttacgtgacctgattggttccgagaaatttgttgaagtctacaagagcgttcggatgggcctgaaacagaagcgggacggtagaaagcaggcacagaagattgttgcagccgtggacccagaacgcaatgccaagcgaaagcagcgaatggcagccaagcaccgggaacacaagaggcgaaagataatggcgatgaagattggcaggtggatgagatagcttggtatttaggctctgcggaattcggtgaatcatataattgtagaggataatttttcgtgctacaagtgctggcataaaattatgtttctgttttatatgctgtctcactgacttactgcccgacgtaattttattgttgagttaccgaaccataccgtaagtaaaaattaagaggcataagcaatgaagacatagaattgattgaattatatttttttggggtggatggataagtaacaatatattattaaatgtgcaattaagagttttctggctgaggtttgc

SEQ ID NO: 18525 - DNA, 1401 bp, Zea Mays
cgccactgggcatccgcatatccctcacgcggtcacagttactccgggacccacatgtcatcacgtcaaccttcgccatgcccaaagcttagcctcgaagcgtctgtactgtgtgcgtcctctcctcgacctcaacccccaccccgccctacctacaaccctattaaattccgccttccgacccgtagacctgattgatccccgcatcgaatccggcggatcgggagcgggagagaccactcccaaatcgcgtcgcgtcgagagcgagagcggaagaggtgcgcgcgggggaaccgaccgaaccgactgatggagtcgacggcggcgcccgccgcctgcgagatcgcgcgcctgccggatgacctcctgtcggcggcgctcggccggacggggccgctggacgcctgccgcgccgccgcggtctcgccggcctttcgcgccgcggccgacgccgacgccgtctggtccagcttcctgccgcccgacctgcccccgctcgccgatggggagctccccgccgacgcgacggccaccaagaagcagctcttcatgcgcctctccgaccccgccagacccgtcctcctcgccgacggcctcacggttctcagaatgcgcagaactccagcacgtttgctggctggaaatccgcggcaagataccctgcgacatgctgtcccggaacaccacttacgccgcctacatggtgttcaagatgtccgacgaatcctatgggctggactatccgctccaggaggctgaagttagcatcggggcaaccaggtccactcgtcaggtctgcctagggtacgtcgacgacgacgaggacggggaagaggtgcctcagaactaccggtcgttcggggcggtgggaactgtatttagaccaaggatcgggaggcggaaccgtcgccagcctcctggagtgcacgtcctgcaccctcagacaagagccggcggctggatggagatggagatgggtgagttcaggaacgaggaaggtgaagatggcgaggtgtccgtcagcctcatggagaccaggggcggcaactggaagagaggtcttactgtgcagggcattgagatcagggtgaagaagtaaggatgtgaaggttgtggggatcgggctttgcgcatcaaaacaaataaaaggatcttagttagatttgtagtgcgtgttctactgcactgcagcacttgcgtatgtgtgtgtcttgcctatgcccagcaaaaaaaaaaaacaaaaagttcttcttgaggcaaaagaactgcagttttgtacacaatattgttgtgtcccagatcactcggtgctcgatgactggccatgtttgcttttgaaagtgtaaactaggtgtgcttgttacgatcacacaaatcaccaatggagaacaccaattctcg

SEQ ID NO: 18526 - DNA, 4094 bp, Zea Mays
ttacactgtaaggtctacaactctacatggagagcaactactgcaatggagcaaaactgctactcaacactctgacatggaggaggttgttcttgatcctggagatcgcattgttgccatggattatcttatggagagggagtctctactccttgggtcgtcagatggttgtcttctcttatataacgtggaggagaaaacaactgaagttgtcggaagactggaaggtggtgtcaacaccattgcctctagccccgatggggcccttctctctgtcaccactggactcggccaactgcttgtcatcacacaggactgggaagtgctgtttgagacttcacttgaccctcaagacgagaccattgacaacacagacagtaccggtggtcagagtcgaagtgcaatttcttggcgaggggatgggaagtatttcgctacacttgtagcccctgagagcttttctagccctacaaaacttaatgtctgggaacgtgaatcgggaaaactgcattcttcttcagatgccaaaacttttatgggagcatcgctagattggatgcctagtggagcgaaggttgctacagcccttgataggaggacagagggaaagtgtcctcttattattttctatgagaagaatggcttagagaggagtcacttttctattgatgagccaggagaggttgccattcaagctttaaagtggaactgcaattctgagatccttgctgctctggtttcttctggtcagcatgatgttatcaagatatggacctgcaggaacaatcactggtacttgaaacatgaactgcggtacacaaaggaagagggggtgaagttcttttgggatccaacgaaaccaatgcatctgatttgctggacactgagtggccaggtcattattcacaagtttgcttggactacggcagtcagtgagagttcaattgcacttgtgattgatggttctcatgttcttgttactcctcttattttgggcctcatgccacctcccatgtctctgttccaccttgcatttccttgtgcagtgaatgaggtttcttttgtgaccaataactcgaagagccatttggctgcttatctctcaaatggcagcctgtctgttgtggaacttccagcacctgatacctgggaagaatttgaaggcaatgggataagtgttgatccttgctgttctgacttcactttgaataactgtatgcacctcacttggatagatacacgcaccttgatcggtatctgttgctatagtgaacacctctcttcaacaaaaatcaggtccagtgaagccagtaaccttgtagataaacatgattcgctgtttttcatccatgagattgaacttaaatgttcagagagttctgtgccaggttcagtgtgttcatctggttggcatgctagagtatcaaagaaagtgcagttggagagttcagtcattggagtctctccaaacccagcaaaaagaggttcagccttcattcaagttagtggtggaaagattattgagtactgctcaagtttaaatctgttgaatatgtgtccaccagcacaattcagtggcattggttctgacctttgttttccagcatcatgtccttggatgactgcagttctgtgctatgaaaatggtatgacagaaccgcttctctttggacttgatgaaagcggcaagctttatatgggcaaaaggttattgagcaacaactgcagcagcttcacattatactccagtgtttatggagccactgagccagttatgagccacttgcttgtgactactaagcaagatcttctattcattgtggatgtcaatgaggtcttacttaaagacatcgaggtcacaattgatggccttgtcagtagtcctgctcgcggtaagcaaaacaaagagtacatcactgtgtgggaaaagggagcgaagttggttggtgttctccatggtgatgaagcagctgtcataatgcaaacaacacgtggtaacttagagtgtacctaccccaggaagctagtccttgtttcaattgttcaggcactggttcagaagcgtttcaaagatgcaataggcatggtgaggaggcatcggatagattttaatatcattgttgactattgtggtttgaatgcttttatggattcagctgcagacttcgttaaacaagttaataaccttacccatgtcactgaatttgtttgctcaatgaagaatagcaatgtcagcagcaaattgtatgaagcctatatatcatttcctgatcagtgtgcaatcccaatggcggataatgaaagttcacctggtttatttttgggtaacaaagtcacttctgtacttatggccattcgaaaagcccttgaggaacaaatagaagagagctcatcaagagaactttgtatattgaccactttggcccgtagtgaacctccattgttggagcaggcactgaatagaataaagctccttcgagaatcagaacttcttgggcttgacgatgccaagcgaaagctctacccttctgctgaagagtcactgaagcatttgctttggttaacggacactgaagctgtttttagtgctgccttgggattgtatgatctgaatcttgctgctattgttgctttgaattcccaaaaagatccaaaagagttccttcctttccttaagagtcttgaatgccttcctcctgctatcatgaggtatacgattgatttaagacttggaagatacgagagtgctctcagaaacattgtttctgctggcgacgcgtaccatgaggattgcatgaaactcctcaatgataatcctcagctgttcccactgggcctccagttatttaatgaaccagataaaaggaatcaaattcttgaggcatggggtgaccatctctctggagagaaatgctttgaagacgccgctttgacttatcagtgctgttcatcatatcagaagtcactgagagcttaccgtgcctgtggagactggagaggtgtttttaccgttgcaggtcttctggagttaaaaagggaagaaatcgttcaactcgcacacgagttatgtgatgagttccaggcacttggcaagccaggagatgctgctagagtagcactggagtactgttcagatgctgaaagaggtgtaagctactatatcatggcaagggaatgggaagaggctcttagagtcgcttacatgcttagcacgcatgatctggttgaagctgtcagagacgcagcttcagaatgcgccgcatcactgatagccgagtaccaggaaggactgttgaagatcggtaaatatgcagcacgctatttggccgtacggcagaggagattgtcgctcgctgccaaactccggtcggaagatcggtttatggatgttgaagatgacagcgtttcagaaacgagcactagcttcagtgaaatgagcgcatataccacaagggagtcgagcgcttcggtcatgtccagcaacgccagcaaatcacgggcggcaaggcggcaaaagaagggcggcaaaatacgagctggaagccccggggaggaaatggccctcgtggagcatctcagggggatggcgttgacaggcggtgcccaaaacgagctgaagagcctgctcgtggctctaatacagctggggaaagcggagacggcccgtcgggtgcaggaggctgcagacagcttcgaagtgtcccagagggccgcagtgaagctggccgaggacacggtgtccagcgaccgcgtagaggagagagcgcacaccctcgagcgttacgtgaggatgctgagggatcgggagtctggccatggcgaggctggtggtacgtggcggatcaatgcgttgtctccccccgtgacagggtgagagggttttttttttactggttagcagtttagcattgtttaaatcgggacgaagagtgctgtgttctttcttgtgggtggcatcgtggcgtgcgtcaggctttgaccttgtcgattaactgctgtagcatcagttggaattcttggtgcctggtggggctgttgtattggatctatgtttgccaataccagatttgtccggttttttttctgacaggaac

SEQ ID NO: 18527 - DNA, 3445 bp, Zea Mays
atgccacacatttcacactaataaattcatttgcggcagcagcgaaaagagagaaaaaaacagaaaaataagtgcaaaacgcggcggcaagaagcaagcaagcaagaggggggcggcagcagcgacctggcacgccgtttgccaccgcccttaatttggcaaatcatcacgtaaaatttgtcaaatggaatcctgccttttttctgtggctgcaatcaattcggaggcatgagtgccttttagccgagggaaccacccgtcgctgcgttgtttggtggcttcgttcactgcaccgcccacagcttcgccccgtcgtcgccgtccgccttccctccccggccaccgccaccgccaccaccacccaccgaagaaaaaaagagataaatagaacaaagaaaggggaaagattgacgaggagcgcggcatcgtcgccagcgccttccggcgtaggactcgcgcgtgcccgtccctcgcgcgtagccgccggagctcgcgggcgttggcggccgccgccgtgggcgtatcactccggtgtggccggctcggcatcgatttcttcccgtttcccctggaccagggaagggtatacaattacaatgcatgctcttgatgatttgtcacagcaatccccttcgctccgttattagcgaagacagacgtggcatcctggcaggggtttccttcaggagacgaatggtccagcactaggacacattcacaatttgataaaattggcattacagagccaaggtgatgcacaatgaccgtgttttgccccttcaagcctttgtggctgctcagggaagagcttctagcacagcaatccttcctttttttgttctgtaatgaatgaataaccagattgtctatcaagatctgaccaaagttctaggtctggatagatttgactctgagaaccttttggatgtctcaactacagttttgccactgaaaagtgttgctatggatcctacaaatttgttgcatctgaagactgtcccatctgagaatggactcaaactggttgaaaattcaagcgacaatctacaggatttggcttgtgaaagcccccttgctggaaaagtcaagttcatgtgcagctttggtgggaaaatcttgcctaggccaagtgatgggaagctcaggtatgtcggcggggagacacgcctcatctcgataaccaggaacttctcgtggaatgaactagtgcagaaaactctcacaatctacagtcagcctcatatcatcaagtatcaacttcctgacgaggatctggacgccctcatttctctttcgtgtgatgaggatttccagaatatgatggaagaatactgcagtcttgaaaaggccaatggctctgttagactaaggatgtttcttgtctccctcaatgaatgtgaagattcgtcattggacgcaaagagcttggagagtgaaccagagtatcattttgttgttgctgtgaacaatcttgcacatttgggccggagcattagtggcaacaatttaatgagccagccgagccatcaattggatccttctccacactcctttagagactcacctgtctgtcaagccaatacagaagttaaagccaaagattctgttggagcaactctcaatgaatcttcctctcagtttttccttgctccatacacacaacaattggtggtcgagccatcgacaactccgtccccaagtttaagtcagcagaggaccatgaaacaatctaggaagcaaccccctgcagatgaattgacaacaaaccaagaacatgtgagtagaagtgaagtttccagtagctcaaatttgaaaaccatgcttccgaaccatctagataagaagcacaatgatgcggacaagggtattggaactggatctcccttgaaacatcttcacattcgaaggcaggtaaaagattgggctggaaatggtattgacttgattccacataccaactatgatgtttctactccagtggaagcgtccttatattctgaaaaggttatcatgcatccagaaaatgcaggagggacatctgggctgcaggaacatgccggtcaaattctaggcatgccccatgccttctcagatcctttactaaagaatcttaatgacttgcctgcatcgaatttgtcattacctgctggttcttacataacccaatcattttcccagaaaatatgccatactaatgagttggagagaacaataagtaggactgggccagcttttgaatgtgtcaaaccccctgacattgcccgtgcagatgaatcaaattatcttgtttctaatcatattgaccaaaggtacaatcaaggaattattggcccagccagttcacagccaccagtatattaccaagatgaaagtttgtcaagtaatgtgacacaaaaatgccatgatggttatcatgtagttcaacagcaggataagttttttcatcaggataaaagcgcagggttaatttacaacgcacatggtgcaaagttgccctcagataatttagatgctctagaaagttcagttccaaagccgatgcatgctactgatcattccctttcatatctccttaatgtatcccaaggagacaattcagaaagtggatcacatgtagagaaactgaattcagggcctgttactaaagattatggaactactggctatgtgcatggaactgataaggttgctccaaatcctcaggatctgttgcatataaagtcttctgaagcttttatcacgcaaagatcaatgggcaatggagaatctggtgtatatcagaatgataatttgcacaagtcatcagtgctacatactgggctgattgatactgatccaagtgtgaacttgcacgacaatggtggcctctctgtgtcttcgtctcaaaatccagttgtggactgtgtttctaggagagaggatccccttcgtgattggggcaatatcgcctgcagtgaaggaataattggatgtgaccataccaccaccgataatgaacacataaagctagcacacaggctgcacgataatgttcaaatgaatgtacctgtcatagttgaggacgtgactgataatgtgccttcaggcattccatcatcgagaccagttgttcctcaggttgtaatggcagctgaagaacaccaagaggtgattctttcatcacagaaggatgacgatagtaggaccaacaggccagagttagctaatgaggatcatgatggagttgccgatggatccattagcgatgctgtagttgctgaacttgaagccagcatgtatggattacagatcattaaaaatggtgacctcgaggaactacgtgaactgggatccggaacatttggaactgtatactaatggaaagtggcgaggaactgatgttgctatcaagcgcatcaagaaaagctgttttgctggaagatcatcgaacaagagaaacttgtga

SEQ ID NO: 18528 - DNA, 1882 bp, Zea Mays
ggcccgatcgcggtactcgggtcgggccgtcctccgagagtcccagtctcccacggtcccacactcccacccccggagcgctccactgactccgccgtgcctttctcttctctccttccctcggcctccgcctccgcctccggccccgcctcgtctctcctcccccattttaaatttcaaacccctcccacctgcttcatcctcttcccctaaaacctcctcctcagtcctctctcctgctgccacgaggtacggcccagctcttcctcaaagcgggcgaaatccacgccgcgcggcggcggcggcagaggaggaggggggatgatggggtgcctcttcgcctgcttccgcgcgtccggcggcgatggcgaggtgaagggcaccggcggccagctcgcgcatccgtcccagccccccgcgacgacgacgacgaccagccaccaggtccaggatggcgcgggcaggagggccaggccgccgtcgaggaacgcgctctccgccgtgttccagcgagaagatgagggatcaaggacggcgcaagtggcgagctcgtgggcggacgagagtggcgagaggaaggagatggatcaggagcttgtgcatcaggccattatccaaagaagctgtggtgcgttgctgcaaactacaaataacattcaaggagcgctcatcaaatatgctgattcagttcatcagaaggaaacacattcaggatgtcttcctgttgtgtctgatgatctacatttcatggaagcgccgaaggttgagaaatgtgaaactccttcaaggtctcatcagagtttcactgttccagatgcaacgagttcttcaaaaacaaacgatgagttgcagacttccgctacttcccttgcaaataatgtgaaagattcgatgaatgagaacaacatggaggcacttgtgcaggatgaagagcaacaccaagctctggatcttgaagaatgtggggtctcaaaagaagaatcctttcaccctgaaaaaacagaggaaccaaagtgcgcaaagaatcaccatgtggtctccatggaaatttcaatatctgatgaatgctcccttttccagagctctgagggttctgtaccatcttcttacaagataagagagagcatgaacacaacatctgtggagaagtccccgaaaactgaggcaactatccatgccaccagaaagaagttaccgaagagcgataattcagaactggagctcccaagcttagcccaatggttgaagcccccaaatcctaagaagacattcagagatgaggccatggcaggagacaggtctcattcgggtaagagttcagatgaggataggcctattattggaatggttgcagcacattggaaagataaggtgccactgccagcaaattttacctctaaattgcgggatggaaatggcattcccaattcaacaaataagtacaaagaagaccaaaaggtgagttggcatgcaacgccatttgaggagaggctcgagaaggctttatccgaagagaagttgctgtctgaaaggagctgttcgagtggaaagacgtctcagtttttaggagtggaaggcgaggagagtgacatggccgaatctaaccgtctgtacaccactgcttatgcatgccaattcagttctgctagccatgagccacagaagctttcagtataatggttctctggccatcaccttcctgattgatggcatttgcacagccctgtttcccctctgtccttttagtaggcacgtttccagtttacctcgacaagtcgcaaacaaactaaaacaacctacgcctggcggaaaatactatgacttgggagtcgcccttgaaaataataccctttcgcccttgtcttgggatcgattcccgtag

SEQ ID NO: 18529 - DNA, 438 bp, Zea Mays
gtgagtttgtgagtatttggtgcatggaggccacgtaggtcagttcatatgtggttggcaccatgggaaaacacctctactgcatgtcaaacatgtcagggacaccttgccccatggttagtaggttaaaaggctaagtccagtgaagctttcctccttgccttaagccctacccacagaccgttgtaaagtgtgtggaggcctatgttccaactggtgaaagcctctccctagtctctagccttgatctgaaccagagccgagcacgccagccctctgcgtggtgaccacggccaccagctccttcacctcataatggccagaacatagtcgcgccaccgcaaatcatcgtcgtgtttagtttcatagtcgaccggccaacatacgacttccccgagcagtttcatgcacccaccgagaacttggactgtcagagtg

SEQ ID NO: 18530 - DNA, 1209 bp, Zea Mays
ccgaacgcacgtgctcctcgtcggtcggaactcggaagggtacgccacgcgagagacgcggggagaagcaggcaggaagccaagaaagcaagcacagagccgagcctacagtccaacaagaggaggggagaactcgtcgcgccgcctccgcctccgcctccggtggttagttcctctctcctcgtcagctcaccgcccgccccacagaactctgccccgtgctttgccaccggtgactgcagaagcagctagccatggcggcggcggcggcggcggcggccttcgatgcctacaccgacaagaacgccatcttccgccgcctcaaggccaagcccgagaacaagatgtgcttcgactgcaacgccaagaaccccacctgggcctccgtcacctacggcatcttcctctgcctcgactgctcggccgtccaccgcagccttggggtccacatcaccttcgtcaggtcaacgaacctcgactcatggactccagatcagctgaaaatgatggcgttcggaggcaacaaccgggcacatgctttcttcaagcagcatggatggactgatggtggcaaggttgaggcgaaatacacatcaagagctgctgaactgtacaggcagatgctcaacaaggaggtcgctaagagtgccattaccgataatgccctgccgtcctcacctgtcactgcgtctgaggcttccaagccatctgatgactttcctgaattcaagctctcagacgcaccagcaccgccggcggagaatctgaatgggaagcatgaacccaagtcccccaaagctgctccacgttcaccaaaagctgctactcatcccacctttgccacttccgtgaagaagcccattggcgcaaagaaggttggaggcaagactggagggcttggtgttcgtaaactcacaacaaagccaaatgaaagcctgtatgagcagaaaccagaagagccaaaacctgctatacctgccttgactgctccaactgcaaaaggtggtccatccttgcattcacgttttgaatatgtggataacgaacaatcatctgtttcaagaaccgggggatctggatctcgtgtaaccggtcatgtagcaccaccaaaatcatctgacttcttccaagagtatgggatgggtaatggattccaaaagaaatcaagcaacgcctcaaaagctcagatgcttttttggctgcaatgag

SEQ ID NO: 18531 - DNA, 529 bp, Zea Mays
tccaccgccctgttcactgctagcagtttactagaactagatcaagatctctctccccctttctctctctctctcgtcactttctacccgggtacgagctaaggagtagtcgtagcagtagcactgctttctctctcgcccgtcgctactcgctactactactatttgcctatatatgcctttaatttgctgctcctagtatatgcgcgtacggtcatcgctcctagctcctatgccttctatcgtccctctctcggtctctgactctccgtctcctctctcgcaacgcaagtctgtctgtttacagtgaaagtctctctctttctcccgtcctctccccttccggccggtctctgttcacctgtccatcggcctgcgtagagagagaacacagcgacgacggaggtctcctgtgcttttctctctcactatcactgttgctttctcccacagctaacttgttaaacacagccagcggcgacgtgattggtccctggccactggaccgtacgtacctgcatggtctggg

SEQ ID NO: 18532 - DNA, 276 bp, Zea Mays
aatgcggaagacaagccaagtcgaccccaagtgtggactactccgcatggtgatgctgatggacgaacctgaagatggacagacggagcaagtatcggaacaaaagctgatcgccaagtgaacgtcgtctaacaaacactaacgtagtgtttattccaggcaagcctcggtgcatgcaaccccttccttgtgtttttaaataatttttacacactttaagtctagcgaaatgtgcattacgtttataggagttgcttggaaaccctttgatgcatt

SEQ ID NO: 18533 - DNA, 1992 bp, Zea Mays
atggaggcgcgcggcggcgcggggacagggaggcacgcgacggcacggggacagggaggcgctcgacggcggtggggaagagggtggcgctcggcggtggtgggggagagggtggcactcggcggcggtgggggagagggtggcgcggggatagggaggtgcgcggcggcggggggcaggaatgcgcgcatacaggaggccgaggcgtgctcgaggtgttattgcagatatttgggtagaattatacagcagttgcaatcacacctaatgcgagggacatggaggcgtgcggcggcgcggggacagggaggcacgcgacggcgcggggacagggaggcgctcgacagcggtggggaagagggtggcgctcggcggcggtgggggagagggtggcactcggcggcggtgggggagagggtggcgcggggacagggaggcgcgcggcggcggggggcaggaatgcgcgcatacaggaggccgaggcgtgctcgaggtgttattgcagagaatgcacccaggccgaacctacgcgccagatatttgggtaaaattatacagcagttgcaatcacacctaatgcgagggacatggaggcgcgcgacggcgcggggacagggaggcacgcgacgacgcggggacagggaggcgctcgacggcggtggggaagagggtggcgctcggcggtggtgggggagagggtggcactcggcggcggtgggggagagggtggcgcggggacagggaggcgcgcggcggcggggggcaggaatgcgcgcatacaggaggccgaggcgtgctcgaggtgttattgcaggattctgccaaatctcatatacttattcctgttcacccacggcacaacaatcatcaattcatgcaggagggcaatccttcttgatcaacatggggaataatgtacaagaatacatgagggaaaaccaagcttcacatcaagccataagcactcaacatattaattaaaaagcatatatgttcacagtgttaactgacagtacacaaataacctttggcaaagaaaaaacaacaacaaaacaggatggatgttctgtccatttctctttcggaaaccacaagactatattatatatatattgcaggcaatgcagccaaacacatcttcttttttatatatacaatacaattctttgacaagtgtaaatgtttatatccccctgtaaaggttgagcctgctggtgccaccaagcatccggttaaccacggtcgcagcagcatcggccccatggcttggagaggtgacctctggcgactcttccctgatctgcaacgatgacacagcctgagcggctatgaagccagggcaggtaacagactgacggaacgttccttggtagtacgggccttggaggtcactcacttctccccagcatggcagtgcctgtccaatcccccaatcagcccgcctccccttgggggctctgggagcatacgcatggctgccgcataccagtccatcctcagacgggtacacctcggcgggctgtgcgtccacggtgaattcaaaagcagccgagggggcccaatggttgcaccttatatggtgcttgttcagcatcaaatggcagggttcatcggagtcctcgcctatgaggacatgaagagcgactgcttctgctatggcagcaccttcctcgtccagcctttgctgttcttccttcttctgctgcttcttcttttccagctccgagattatggcagccgagtttgccagcgctttctcaagtcggcgccgcttcttctccgcctgcttctggcggtccagctcgtccttggcctgcttcttttttcctttcttcaacactttgcctgcctgattgctgctcatggtagccctgtccatgacagccgtgcctgcttgaaggcctgggagggatgtgggatcggcgggcgggcgggcggggagacggcggagaggaaagggatctggggtcggcgtcgtcgatccggatcagg

SEQ ID NO: 18534 - DNA, 1892 bp, Zea Mays
ttcagatcagctcaacaaagataaccttgcgccgcctcctaagaagatcaagactacccagccaggttctacagaccctcaaaaccttaatcgttagatcatcgccgttctcatgaagaattccggaggaggcgccgcccatggcgatggcggcgacatctacaatgtccgggccgccgagatcctcgccaacgaggccctcctgctccccatcaatgaggccgccccaatctacgagaatctgctcgccactttccccacggccgccaaatactggaagcagtatgtcgaagcctacatggccaccaacaacgatgaagccgccaagcagattttcagcagatgcctgctcaactgccttcacattagtctatggcgctgttacatcaactttatcaggagaattaacgataaaaggggctctgagggtcttgatgagacgaagaaggcttttgatttcatgctcaactacgttgggaatgatgcagcttctggccctgtttggatggagtatattaatttcctcaagtccatgccggttgtgacgccccatgaagagtcgcatcgcatgactactgttcgtaaagtgtaccagaaggcaattttagttccaactaatcatgtagagcagttgtggaaggattacgagaacttcgaaaattctgttagccgcaccttggcaaaaggcttgttatctgaataccaaccaaagtttaacagtgctaaggctgtatatagagagcgaaaaaagtacattgatgatattgattggaatgtactggccaccccccctacaggctcgtacaaggaagagcaacagtgtatggcatggaaaagactcttggtatttgaaaaggggaaccctcaaagaattgatgctacaacagctaataggcgtatcacctttacttatgagcaatgcctgatgtatctatatcatcatcctgatatatggtacgattatgctatgtggcatgtgaagaatggttctatggattctgcatcaaaaatatttcagcgagctctaaaagcaatccatgattctgaagtacttaagtatgcctttgctgaaatggaagagtccagaggggcgatacagactgctaagacagtatacgaatctcttctaggtgaaaatgctagtgagacctcacttgcaaatattcagtttattcgatttctaaggagaactgaaggcactgaagcagcccgtaagtactttttggatgctcggaagtcaccaagctgcacttatcatttgtatgttgcttatgctacaatggcattctgcgttgacaaggatgcaaaggtggcacaaagtgtttttgaagcaggtttaaagaggtttatgcatgagccaggatatatccttgaatacacagacttcttgtgtcgtttaaatgacgatagaaatgtacgtgctttgtttgagagggcactgagcttacttcctcccgaggaatccacagaggtatggagacgatttgcacaatttgaacagaactatggggatttatcaagcatgcttaaggttgaacaaagaaggaaagaggctctatctaggacatctgaagatgccttatctgcatcggaaaacacacttcatgacatagtttctcgatacagttacatggatctttggccatgctcatcaaaagaattggattatctagcgagacaagagtggcttgcgaaaaacattgttaagaaggttgagaaaccagctatgttaaatagcggtagcatgctagacaaaggtgctgcaggatttagtgcgagtgcgaggttattaccacaatctgccaaagttgttcgtcctgagacttctcaaatggttatttatgatccaagacagatgaaagagtgggaaatcaccgtggattcttgggcag

SEQ ID NO: 18535 - DNA, 435 bp, Zea Mays
cttgacctcgcgcactcgcgcctgctagccacgccccgggatatatatttacgccgctatccctgctttctccatcctaagccggcaccgatgaaccaagcacgggatgtagggatggatggcctcggaccatggcgtttccttgccggtacgggtccgtcgtcgtgccgctgaggttgggcagacctgggcatgcttcgaagggttggcatgcgctgcgccgtggccggaattgttgccgccacggacccgtcgtcgcagcgaggtttcgagtatccgaagaatcaccctagtaactggaatcttaagtgccaggcaagttgtgcccttgatccacttttgttacccaataatattctttattatcacttattcaatgcataggtttaattttgatgggacccaataggccaccccagtttgtttatcttgttt

SEQ ID NO: 18536 - DNA, 253 bp, Zea Mays
aacaccaggttgtccacattgcaaccactgctcaggagaagatgaagcctactcaggagttccaagactacgacgagttctaggtgtgggttggcggaaacccccagtcagctgcctgtgaaggccctatctttactgcgttccgcttagcactttgatttacccgttgagttgatgactatgtggatgtctttgacatcgtgatgtaataagttaatactcttttatgttattattcgagcactatgcgatg

SEQ ID NO: 18537 - DNA, 538 bp, Zea Mays
aaacagggccaaaatataaaaacaaaaagataccaactaacctaaataatctgtcgaaaagcaagcaaatactgtttgcgggccagcgttgggcatggcccacctgccattgttagaggcgttagcccacaggcggacccgaatccagaattcctgtcactgctcgaaatcgatccgatctccgctcgcgctgaagcctgatctccaccgggttcgcagcaggggcgcaggacctcgatcacgaggaggcaggggagcagcatccacaaccacaagccatggcggggagggccaacatccccactaacaactccgccctcatcgcaatcatcgccgacgaggacaccgtcactggcttcttgatggccggcgttggcaatgttgatctgcgcaagaaaaccaactacctcctcgtcgacaacaagacgacagttaaacaaatcgaggatgcgttcaaagaatttactacgagggaggatattgctattgtgctcatcagtcagtatctcttttaagtcaagctgtaattaagtacagc

SEQ ID NO: 18538 - DNA, 936 bp, Zea Mays
atgttcgacatacaaacggagatattgctttgcggtggaggtggaggcgctcgtgatccaggggcccaagctgtcgaccatcctcagccaggtgaagaagctggaggcgtccgtgctggtgctcagccaacgcaaaccctcgcctttctgctgcttcctgcggagcaggagcagcagcgaggaggaggagctggtggaggagtgcataaaccgggcggagtgcctgacgctggcggtgcggcggcggagcaagggcgtgggcggctacctcgtgagcacccggtggcagaagaacttctggctgctcgcctgaccggtccacgaggactccccctcctcatcctcatcctttgacgcaacgcaagagttttacttacttcccgggctaatcgtttttacaaagtccaataataagtaaccaccaccaccaccactactgcatctgtttgttgatctgtaacctccagtgtcctagggtgtgtgccagccagtgtgcgtgtgcctgatcctctctctctccccacgatgtggtgctgtattctatgtatcgtcttggtttagctgtgctgctgtagcctgtagagtgtaagctagctgttgtgtagtgaaggcacgcagaagctgagccgatccgtttgccctgtctgttctgcgggaatctgtctgttttgcagagcggggatgcagaggcgcgggacggggacgtcagtacactgcgttgcgttgcgttgcgttgcataaactacgacttgtgtattgtgcttgtgcgatgtgtttgtttgcttgcttgcttgctacaatggttggtacagagttccataatgaagtgatgatgcgttttgactaactgtctcccccttgcgctctctctctctgtcaaaaaataaaaataaaactaggccgaggcattttgacaggtagtacaagcaagcaagc

SEQ ID NO: 18539 - DNA, 1822 bp, Zea Mays
cctatcactgatagagatattaattttttaaaaagagaaaatgcgcatattccaccggagcaccggttactttttttttaaatctactactagtccacatgcatagcatagcagttcgcacagctgcacactctcggggcggcgggtacagtattttagaagaccttggagtttgtgatggctgtgatgttccctatgttcagccgttggcttttggcatggtgctatgtcaagtagagtgtcagggccatcttggttcaaagtcagtcctgagcatgtcgaggctgaagtgcgcgctgcggacattcgatctgagggttctcttgattctgctgatcggtgtgccaatcctgctcttcgcgatatacgtgcacggccagaaggtgacctacttcctccggccgatatgggagaagcccccaaagcccttcaaagtactcccccactactaccacgagaacgtctcgatggccaacctctgcaagctgcacggatggagagtcagggagaccccgcgccgcgtcttcgacgccgtgctcttcagcaacgagctcgacatccttgacatccgctggcacgagctgagcccctacgtgtcggagttcgtgctgctggagtccaactcgaccttcaccggcataaggaaggacctccacttcagggagaaccggcagcggttcggcttcgccgagtcgcggctgacctacggcaccataggcgggaggttcgtgaagggagagaacccgttcgtggaggagtcgtaccagagggtcgccctcgaccagctgatcaagatcgcgggcatcgcggacgacgacctgctgatcatgtcggacgtggacgagatcccgagcgggcacaccgtgaacctcctgagatggtgcgacgacgtccccgaggtactccacctccagctccggaactacctctactcgttcgagttcctgctcgacgacaggagctggcgggcctcggtgcacaggtacagggccgggaggacgaggtacgcgcacttccggcagacggacgacctcctggccgattccgggtggcactgcagcttctgcttccgccgcatagacgacttcgtcttcaagatgaaggcctacagccacgtggaccggatcaggttcgggtacttcctgaacccgaggaggatccagcacgtgatctgcgagggggccgatctcttcgacatgctccccgaggagtacacgttccaggagatcatcgccaagctggggcctatcccgagcacgttctccgctgtccatctccccgcctatctgctggagcacaacgagcggtacaggtaccttctcccgggcaactgcgttagagagagtggctagtagctaaggctgtaaggcagctagctgtgttgctgtctgcatcgccatggcctgaggcgcaccgacgtcgctcgcggatgcatgcatgcgtggaggagcgccctgccgttgccggggttgttgtatctggatatacgactggctgggctgacttatatatttagatgatgaatgaatggtcgcttgaccgctgctggttcagttcgtatgagattttgtaccatggaaggccttcacagcagcatagcatgcttggtcgctgcttccttgttgttttgcaggcctgggtttttattcattgcttccatgattgatgtatgtatgaatgaactcaaactatttgtaggtgtcataccgagcgacattcatactctgctctcgcgttgtgatgtacattgccattcacttaccctagttacctgagtcatacggtacatgctttaattccagtttctaattgctgacagcgg

SEQ ID NO: 18540 - DNA, 1261 bp, Zea Mays
atatttgctctaagttagtactttttcagaaactgtagaccggagcaatggaggaagagaaagcggcggcgtactacgacgagctcaatcgcaagggcgagggcgcccgccgcttcaagcaggggcttggcttctcctcctcatccgccactgccttcccttccaagcccaccgcctcctccttcctatccggttttgttcgcgcgggcgcagcccctggccccgccaaacagccgttaccgcattccaggaccccatccagtccgcaccatcgctcaagttcaccgcctctttcgcgtcccaggatccgctccaggtccaggtccaggtccccgtctcgctccagccggcgccaatcgagatcgaggtcccggtcgagggagcgcaggcgccgctccaggtctagggagagggaccgcagggcatcctgtagacgctctaggtcgcgggggtcgagatcgccttctcgccggagcggcaggagcctgcacttggaagcccggcgggaacggcatggggatcagcggcggcggcacgacgacggccatcagagctctaagggtcgcagtgatagggacgggggcaaaatggactactcgcggctcataaaaggatatgataaaatgactccagctgagagagttaaagcaaagatgaagtttcagctttcagagacagctgcaaaagattccactcttggaactgcaactgtggggtgggaaagatttcaatttaataaggatgctccacttgatgaagataatgacgatgttgaagttgctaatgatgatgcttcactggtgaagaatattggaaagagcttccggctttctgctgtggagtcaaagcgcgaagataaaatcagagatgcgcatgatgaggctatatttggtgtacctacaacttcatttgttgatgttgaaattggtggggacgagcttaaaaccaatcatgaagacgggaaagttgaagacacagaatctgatgaacctagcagctccctcatcagcgataaagtactggccatgcaaaaaggttcctggagggatcgggctcagaagttgcggaagaatttgaacacatgaactttgtccttgcaactgctcaagttcgaatttgccagcgtgtgacagagatctggcatcttgtgaagatttgagcctgaagttgaacttagccccacccatcccttagaatagttgcataatgacacggcagcctgcatttggaggcacgaacagccttaacaacctcagtgaca

SEQ ID NO: 18541 - DNA, 1569 bp, Zea Mays
ctttcatttggttggaactggaatctgctccataaattggtcaagaagcttatcaaggagaagaaggatgatgctggaatttctgaatatattgatatggagaaggagcttcaagaggagccatgcccagcaaggtagcatgaaaaggccgcttgcaacagaagatttgttttggggaatttagatttttgtaaccttgaaaggtgagaaggttaattatggcaatggtagggactgtccgagcaaccatattaataataatgaacaatatgtaaaaattcagtggcttcaaagttgtccattaccctttatcttgatttattgcaggtttgtactactacaaatttcggtgttgctgctgctgttctaagttggatcttgaaatatgggcacatgtttaatactactgggaggttgcttgtgtttatgatgcttaatatcattttttgtgtttgctgcaggtcataacgttaaccgaagagattttggcaactgcaaagcaaactgagagtgcccagaatgttgcaggtctatcaccgccaagctattcagctggagtgcagtctgagggactggatgacctttcacattcccataagtttgccgttggtactagagttcaagctgtgtggagtgaagatggagaatggtataatgcaaccgttgaagctttgacaccaaatggatactatgtagcctacgatggctggggaaacagtgaagaggtggacccagataatgtgaggctgcttgaggaagaagcagctgatgccttgggacaagctgaaaaggaagctgaagctacaaaaatggcaataaagaggaaaattgaacaagcagcaacatctgattttcaggcgcgtagcttgccggccaaacttcgtatcgaaccaagtgaccctgaggatgttaaagctgcaaagcgtaagaaaatacatgctttcaaatcaaaatcccgctttgagcagcttgaatttgcccaaaacaaaaggcagaatgcatggcagcagtttcaaaccaaggggaaagccaaaaaggtggggttcttctccggtcgcaagaaggagagcatcttcaagtcaccggacgaccacagaggtaaggtgggtgtcactgggagtggcaagggcctgaccgacttccagaggagggagaagcatctgcaccttaaaggtgggtccggggatgcagcggatgatgacgaggagtaaactgaagaaccgagcctctgtttgtatcccgccgaacagacatttccatacctgttctttagcgccgacatggcctcgaggggactcttgacttaaaccagaaaatttcaatgtttgtcccattctcattgttgaatgtcgctgccgttttggagctgcattctggtggcgaggtcacgctgctagaggagggcgtcctgagcgtacagatcgacttgtcttgctagtctgtagtgaagtattaatccttaaacgtttactaaaattgtcaccggcctaagtacagatcctttgccccaaccaagtccattgaagaagatcaataaactcgctactgctgagtgtactctacaaaccg

SEQ ID NO: 18542 - DNA, 749 bp, Zea Mays
ctttcattttaagaaaaaaaaacagagagatgatagggtccaccggtccagttctatttgagccgggtgctactggtttctgcctggaggagcagatcaaaggatctgtaacgcgttgctatctgaaaggcatttcaggtcattgtccgcaacaagaagagagtaggatataactatgaactaagcttgagatttagcggtgaatggttaatcaaagaagaaaacaagaagatcaaagggcatctagacattcccgagttttcattcggcgagatcgatgacttggaggtacaagtaaggctcggcgatgacaagggcctcgcctctgatgatagaacacggatctgcaaggatctcaagtcctttttggcgccgatccaggagaaaatgcgcatgtttgaagaagagctcaaaggtagatagcgagtattagcaagagttcgcagtgctaggcaagtgacttggcagttggcaccgccgtgctagctgtgatgtgtgtgtcgcaacgctctcaaagctgagactgtatgtgtactggtgtaatacacttgtcaagatgagcacgtacgaactgttctcttggtatccctcattttcagcatgtgatagtaaaaggaattcaagatgtttttgcatgaatggtatggatataggctctgtttggcacagcttattttcagcttcttcataaatttaagcaaaagttctgtcagcttctgcagcagcttatcagttcagctgcttctcag

SEQ ID NO: 18543 - DNA, 1219 bp, Zea Mays
gttttcttccagtacaagtgtagtttagaatccaaatcagaacatgtcggttgcttgtgctgaggtgatgctcctgggccacagtgactcctatgtgaaggacaaggcgatgcaggtcacgatagccttcaaccatttcggcgaaggcctcattcagagaatgccaaggtgccggcacggctacttccacgttgtgaacaacgactacacccactgggagatgtacgccattgggggcagcgcggagccaaccatcaacagccagggcaaccgctaccttgctccgacgaacccgttcgccaaggaggtgaccaagagggtggagactgcccagaccgtgtggaagagctggaactggaggtcagagggcgacctgctgctgaacggcgcctacttcaccccgtccggcgcgggcgcctcggccagctactcgcgcgcgtccagcctcggcgccaagtcgtcgtccatggtcggcaccatcacctcggacgccggcgcactgtcgtgccgcaagggcgcggcctgctagcgcggatcgcgctccctctccagcaacaggaaaagaaacaggacaacaggaaactaagccacctcaacaccaccaccaccatggttacagtttcttcttcccttctttttaggggtcgcttttgacaagggttatattatatatatatatgatggtcctccttgatattttcaccatttgctcaacctcccccctgctcccgacatggaaagctacctggagcagcaggcgtgaagcgttgctgattggtcgctcggtctctctattagtcgtctgatctgagtgttgcgtgttgttccctctgcctacaagcaagtggtgtatgttgagggcagggggtgcgtgcgtgcgtgttgtgtgtgatacttactcacttggttgttgtgttgagaaaaaaagggtcagattgttagtagtggtagtactacatgttacgcctggacagactgggatggaatggatgtacaagacatggaggaatacccatgttcttaactcttcttcttcttcagtgaaaaaagctaaaacgttacagtttagctgaatattttgatctcgaagaacagcatgtgctgcttcggaaaggacactagcaccagcacattgatatgcccagttccatatcaagttttttcactatcctcggaagtagtacttgtgtacatgaggagggatcggggatggatctgg

SEQ ID NO: 18544 - DNA, 1896 bp, Zea Mays
ctcgtctgctaaacaattcggaacaccaaacaccggttccaggtgaagaagaaacagttcttccggaatttcatgacaatcacactattcggtgctgttggcacaatgatatccttcttcacaatctctctcggcgcaatagcgatattcagcagaatgaacattgggacgctagatgtcggggattttctcgctattggagctatcttttctgcaacggattctgtgtgcacgctgcaggtcctccatcaggatgagacgccctttctgtacagtctcgtgttcggtgagggagtcgtgaacgatgccacgtctgttgtgctcttcaacgcactccagaacttcgatcttaaccacatcgatgtagccgttgtgctgaatttcttgggaaacttctgttacttattcgtgtcaagcaccttacttggagtgtttactggattgctcagtgcctacataattaagaagctatatataggaaggcattccactgaccgtgaggttgcgcttatgatgctcatggcttacctctcctacatgctggccgagctgctagatctgagtggcattcttaccgtattcttctgcggcatcgtgatgtcgcattacacctggcacaatgtgacagagagctcaagagtcacaaccaagcatgcctttgctactttgtccttcatcgctgagacttttctcttcctgtatgttgggatggatgccctcgacatcgagaagtgggagtttgccagtgacagccccggtaaatccatcggcataagctcgattttgctagggttggttctggtggggagagctgcatttgttttcccattgtcgtttttgtccaacctgacaaagaagtctccattggagaaaataacatttagacagcaaattgtaatatggtgggccggactgatgagaggtgccgtgtccattgctctcgcttacaacaagttcacgagatctggacacactgagctgcacggcaacgcgataatgatcaccagcacgatcactgtggtcctgtttagcactatggtgtttgggatgatgacgaagccattgatccggctgctgctccctgcctgcagcaacacggccacctccgagccgtcctcacccaagtccctgcactcgcctctcctgacgagcatgcagggctcggacatcgagacggggtcggcacagattgtgaggccgtccagcctccggatgctcctaagcaagccaacccacacggtgcactactactggcgcaagttcgacgacgcgctcatgcggcccatgtttggcggccgcgggttcgtgcccttctcccctggatcgcccactgagcagagcgtccacgacggacggtgaacaaagccgcgtctgacaccaagagacgagcaggacatgcttttggctgctaatcgtcagatgatgatgtttttgtttgttgacagcttctgatggtgcgttagcaatggcaacgaggtgtcagttggtttggattagcaggatgaagaagagcaaccctggtaactagggcggggggattgagtttgtgcatgacaaggctgcaaacttttgtatgtagataaaaaaaacacccatttggccatttgtattgtatgttattgtatgtaagctagcaggcctgtacaactgcttttaggtcttcgtttggatgggcgaaattctggcaaatagcagcacatccactctgtgttctgatctaagcatcttggtttgattttgaaatggactcggtgtgtaggatagcttttggaagttgttttgccacaactcggtttttctagggtgcgtacagtgtctatcaagtgtgtttttttggctatgcaagtcgatactgatttctgcaaatttgtcatgtcaacaaaatagaagccacca

SEQ ID NO: 18545 - DNA, 1062 bp, Zea Mays
aactgtgtactagtgcttagaagatatgtgcatgacggtgcatctgaaagttgaatttattcacagtgcagtgaatgctcgtcactccagtgttttggtgtcttcgctcctttggagatgtatgggatttggcaactttgcagtgcatacagactctttctgatcataccgatgttgttatgtccgtgctttgctgggatcaatttctattatcttgctctttggatcaaacaataaaagtttgggccgctacagagagtggaaacttagaagtaacatatacacacaaagaggatcagggtgcacttgccctcagtggtatgcctgacgcacagtcaaaacctgtgctactgtgttcattaaatgacaacactgtccgcttatatgatctgccatcgttcagtgacagaggcagattattctccaaaaaagaaattagggcaatacagatgggtcctggtggtttattttttaccggggatggaactggtgagctcaaggtttggcagtgggtagatttagcccaaacctaatgaacatagtgtgctagattagttttctctcatgtattttatgagggagttcgtacaaatacgcataatgagttcaggttgtggtcggtggccagttctttttttgtaatatgccccacatttgtcacaaatgacacgagattcggtggatctgttcggcagtaaaatcagaagcagagtatgtgttatggactgtagttttgtcctggaatggattttaagacaggagaataattggttgttgtaatatgtaaggcactggaacgagcaattctgacgactgcttggaggtggtggcagtttcaaaaggatatatgctaatatacaagggtttgttcagccgcatttgcaaatgagcaggtcttttcacggccgtaccatttttcacaactgttgaatgatcatgttttttttgtaacctcgatcagtcatttggctcggtttttggaagctgcacacagaacctgtgccgatatttatctatatttgttcctggatagcttccaggctcaggctctgatgatatttt

SEQ ID NO: 18546 - DNA, 703 bp, Zea Mays
taactctggcagattatagtttcagtttcagaactgggctataccaaaggaactatggattgcacattatctagctgagcagaaactcactgattctaagcaacgcagtgctatcatggcagaaattaaatatttgatgagtggatatgaaaagaaacaaaggtcagaaaatctctcaacatgggcttcacagcatccgccaacggaatctaaaaggaggaacaggaagcgcaaggaggaggagcaggagcaccatgaagcacaatacaaccagcagcagcaggaacagaatgaaaacaagttaattcaaggaaagcggcatcagctgcatcaagaaaatatggcgcaagtgacacagcagcagcagcagcatatgcaaccgacaacaaggccagctactcttaagcttccgacgcctgctattcctctggttctgaatgcagctcagatccaaaactttgcgcgtccagcttacgccgctgtgcctggagttcacaattaccctgcccagccaggttggtctgcagctcaaggaagtccattcgtaccacagttcatgtcaccgcagtatatgggcctgccatttaatccctttggccttcatcctacttgctatcccagacgcagatagcgtagagagttctggcgttccgcgtccatttgctgagtgaaactgtggtgaagcgtacaagttatatgaaac

SEQ ID NO: 18547 - DNA, 3576 bp, Zea Mays
cgcagaaaagatagctgtagacatccccggaagaaatggtcccgtgcgtgcgctcactcctttgctgtttttcttctctccgttcaccttgcgtgcgcgacatctagggcgaccgccgccgccgccgccgccctacgcccagcagcccaggtcttcgtcgcgccctttgccggctacgagcacccaccacaccagatcactgtaatccaggctgaattgtggctgaacctggtggcatattaatcttggatacttggtcaactgcaaacttgaagattcattttcatgcaatcaatggagagcctagcgcaattagaggtgttgtgtgaaaagctttataattctagagactcggctgagcgagcgcatgcagaaagcaccctcaagtgcttctcagagaacagcgagtacatttcgcagtgccaatacatattggacaatgcctcaactccatatgccctgatgctggcgagttcaagcttgctgaagcaagtttctgaccgcagtctttctttgatgctccgtctcgatatacggaattatgtcataaactatcttggcacaagggggcctaaattgcagaactttgtcattgtgtccttaattcagctggtctgtcgaattacaaaatttggatggtttgatgatgacagattcagagagactgtcaaggaagcgactgattttttaggtcttgcttcccaggatcattatttcataggcttgaagatactaaacaatctcgttacagaaatgaatcagccaaaccccgcgatgcctttgacgcttcataggaaaattgcgggttcattcaaggatcagtttcttctgcagatcttccaaatttcgttaacctcactaaaccaactgaagagtgaagctccggatgactttggacatattcctcttgaccttgccttgaagtgcttatcttttgactttgttggttctccggtggacgaaagctctgaagaatttggaacagtgcagcttcctgcatcttggaggcctcttcttcaagatccttccacactccaaatcttttttgattactacaaagtcaatgacatacgggtttcaaaagaggccttggagtgtctggttcgacttgcttctgtcaggcgcagtatttttgtggaggatcctgcaaggtcccagtttctttctcatctgatgctaggcaccaaggagatacttctaactggccaaggacttgctgatcatgacaattaccatgagttctgccgtcttttgggacgtttcaaagtgaattaccagctggcagagcttttgaatgttgagttttatggtgagtggattggtctagtagctgaatttacaactagatccttgttgtcatggcagtgggccagcaacagtgtctactaccttctaagtctttggtcaaggctggtgacatccgtgccttacttgaaaggtgaaacaccaagtcttcttgatgaaactgttcccaagatcacagaaggttttatcacttccagaattaattctgttcaggccatccttgctgacaactcactggaaaatcctttggatagtgtggaagttctccaggaccagctggagtttcttcctttcctttgcagattccagtaccaaagtagtagtctgtacatcataaacatcatggaacctcttctgcaagcttatacggaaaggtccagattacccgctcctggtgatgctgatgagctgtctgtcattgaaggccaaattgcatggatggttcacataattgcggccattgtcaaagttaggcaggtaacaggtgttagtcaagaaacacaagagttgattgacgcagaactctctgcccgtgtactacagttgataagtgtgactgatacaggagcgcacacacagagatatcaagaattaagtaagcaaaggcttgaccgagctattctcatttttgtacaaagtttcagaaggtcatatgtaggagaccaagctatgcattcttcaaagcagttgtatggaagattgtctgagcttctaggacttaatgaccatttaattctactcaatgtgattgttggcaaaattgctacaaatatgaagtgctatgctgagagtgaggatgttattgatcatactctgtccctgttccttgacttggcaactggctatatgactggaaagctgctgcttaagctggagagtgtaaaattcatcattgcaaatcattctccagagaatttcccatttcttgcagaatacaaatgttcacgtagtagaactacgttctattacatccttggctccttagtcttcatggaagatagccctgtgaaattcaggactttcatggaaccacttcaacaggttgcattaaacctggaggcaactcctgatgctgcttttcggactgatgtcgctaagcgtgcatttgttggttggatgagagatctacgtggcatagctatggcaaccaacagccgcaagacatatggcctcctatttgactggttgtatccatctcgcatgccacttctgctgagagccatctcactttgcactgatgaaccagaggtcaccacacccttgctcaagttcacgtatgaatttgttttgaacaaagctcaaagactgacatttgattcatcatcaccaaatgggatccttttattccgagaggttagcaagataatcgtggcttacgggtcacgaattctattgcttcctaatggcacagacatttatggaagtaaatacaaaggcatatggatctcactgactgttctttcaagggctttgtgtgggaattatgtcaattttggcgtatttgagctctatggtgacagagcacttgctgatgcccttgatatatctctgaagatgaccctctcagttccattatctgatatattggcattcaaaaagctgtcgaaagcgtactttgggtatatggaagttctgttcaacaaccatatcaagtttgttctcaatttggacacaaacacattcatacatattgtcagctcactcgaatctggcttaaaaggtctagatgcagggatatcatcacagtgcgcttctgccatcgacaacctggcagccttttactttaataacattacatctggtgactcacctccatcaccagcttcagtaaatctcgcacgacatattggagagtgtcccaatttgtttcctcagatactgaagactctttttgagatcatgctctttgaggatgctggtaatcagtggagtctgagtcgaccaatactgagcctgataatgaccagtgaacagatgttcagtgaactcagagcgcacatattagcatcacaggttgtgtggtgcaattgcaatgcggcactgcgcattgtagctgcttgctggtaggagatagtggtcttgttgcttgccggagcttgtactggcctacctggaggtgcagacatgcaatgcagcagagaatttcttgagcctagggccccagctgtggaggtttcatattgccattcctgtgtttacgagtaatagtcagatcgtcatgttttgtttgtttgattatgttgatttcttgtttttacgatgctctttaaa

SEQ ID NO: 18548 - DNA, 129 bp, Zea Mays
tgtcgacaacgagccaccgaagaactgcataggctgttgtttgcccagatctggaacctacgcggcccccatgacctaacgatggtggacttcgggtggttccaacacgatgcgggaggggatgggcgg

SEQ ID NO: 18549 - DNA, 2472 bp, Zea Mays
attttcctgatcatcaaatgcaaaggtcaaatataagagttatgacgatatcgagcgtgaaaaacaatggtggagaatacctttcgtgtctgactttcttgtgaagagcagcctgggatctgctcttaggatggttcttggatctgaaagtataaatgctagtcagtttgtgaagtctgcatttgggcaactgagttctttcacatacacctatcttccaaagccatcatcattggaaagtggagttgatgtttctaaaagtgatgaagaatcctcagatggcccaactaattcaaatgagcttcaacaacagaatattgattctgaaatcatttcagattctcattctcatagtgaagttcaatctcctactgctgttgttaatagtgaaggaaattcatcgtctgatatgaagaaatcagatgaatatttttggagagctctgaacaatgtactaaaccaaaatgtactacagaactttggattttctctcccggaggtcaagcaattgggtggttttgacctattaagttcacttggtctgaaatcacgcaatattgctgaacaggaatatctagaatctggacttgcaatggcagatacttcaacaaatggtggcagtgaaacaacttctgaaaatacagttggtgttgagaatgaaaatagaacattgacaaccaaagaggaggtgcaatcttcctttccagatataaataaagtatctcgggatgtattgtctcaaacagaaaatatactcggagctctgatgatactttccaaaaatctctcaccacatgatcagtcagtaccgacaactggaacaaatgggaaatatgacatgattagagaagagcaaggtgcttcagctgcagattctgttcaaaaggctgatactgtttcatctgcgttactgtccattgatgcacaggaagcagaggatatgcggcgcttgtttgcaagtgcagagactgccatggaggcatgggctatgcttgccacttcactgggacgtaacagtttcatcaagtcggactttgaaaagatatgttttcttgacaatatttcaacagacacacaagttgccatatggtgcgattcttctcgaagaaggttggttgttgcctttcgtggaaccgaacaagtggaaggatttgcgaaccgacttaatgcttgtacctgctggactaaaccctgagaggctaggtggtgacttcaaacaagaagttcaagttcacagtggattcttaggtgcatatgactctgttaggaacaggatcatgactctcatcaaatatgccattggatacgatgatgaagaagatgcagaaaacatacctaggtggcatgtttatgtgactggacacagtttaggtggagcactagcgactcttcttgctcttgaactttcatcaagtcaaatggccaaaaatggtgccatatttgtgacaatgtacaattttggctctcctagagtgggaaatagaagattcgccgaagtctacaatgcgaaagtaaaggacagttggagaattgtcaaccaccgggatatcattccaacagtgccacgtcttatgggctattgccatgtggaagcaccagtttatcttaaatttggggacgcaaaagatgcaccggtaaataacagcattctagatgatgaagaccaaggtgacgtgataggggagtacacacctgatgttcttgttactgaatttatgaaaggcgagaagcaacttgtggaaaaactactgcaaacagaaataaatttactccgctcaatcagggatggttcggctcttatgcagcacatggaagacttctactatgtcacccttcttgagaatgtgagatcaagttatcaagtggcagatactgccaatgatgaataccaattgacagcgtgatcctagtaaaactgcacagctgaacatcatggactgtgtttccctgcaaaaacttcatttctgaaggacactgaatggggctatgaaagtgtgcaatccttactcttagtggaaacatgaacaggcagaacagccttggacctcagtcaggatagaggaaatgaaactggtttcactggcggatatacttgtagcaccgtgtcaattggtagatatgttgtttgagctattttccgttgatgtagctagcacactttggaatatattgtatgatgtttgaaattctagaaaagttcatagacacctgggagaataactcaagaaatatccaagtccgttttggccaatattttttttcatggagaaacttgcacaccgtggtaggctaccggctacccaagggctgatagggtgtgttaatcgagtgtacgacctagataaaaatgttcaatgtgatggaactatatatcttgcatggaataaagtagcatcatgtaatttcggcattttttcttgaacatgcatgtgaaccgcgtcattatattaagatagaataagttatctggca

SEQ ID NO: 18550 - DNA, 3794 bp, Zea Mays
cggcaggccagaccgccagaccggtcaggagcagagcacccgaccgcctttcctcccccgcctggccgcctgccaccgcgcgccagatcccgatctcgctgcgatccatggcgtcgtcgccgcagccgccgccgccgttcgccgcgcaaaaccctaccgcgcagggctcgggccaggggccgccaggctccggggtgggggctctccccggggcgttcgccaacctccagatctcccgcggcgcggccccgccgcccggcgccccgcgggggctcacgccgcagcaggcaccgcccaccttagccgcgcgtccgggccccccaccgtccgctgcccgtcccgccttccctggcagcccgcccgcaccgccattcgtgcgggcgccgacaccgtcaacttccgcctcgccgccctttggcggacagcctggggtaatgtcccagccgccgccaccgttcggagggcctccaggtgcgtcgtctcagccgccgccgccgttcggtgtcccccccggggtggtgtcccaggccccttccctgtttggaggccctcctgcgacggcatcgcaggcgtcttcgccttttgttggtcactctgttgctgcgtctcaggcggcaccattcggtgccccccctgttgcgggttcgcatcctccacccttcggtgggcctcctggagcggggcctcagccagcaccgccattgcggcagacattcgctggccagcctgggccaatggccgcagcggcagcttggacgcagccacctccacctagctttggagccccgcaacagcctccaccaccattcggttcgcggccagctgggcagccgctctttgctacacaatcagcgcctgcggcacaacaactgccattcatggggccacccagggtaaatgccccggcgtttggacctccgtcttggcaaactcagggagctgggtctggtgcaatgcagccacctttgagaatgccaggcattcctggtagcatgcagccaaacacactaggaccccctggcaccccgactataccttattctccacatgctggaacccaggtatcaaccccgtccaaaattgatcctaatcaaattccacgtcccatgcgtgaatcatcagtcatcatttatgagacccgtcaaggtggccaagcaaccattcccccggctgcatctagtgaatttattgtgaaggacactgggaactgtagcccccgtctaatgcgctgcactgtgaatcaaataccatgtactggggatctcttgactacttcgggcatgcctttagctctgatggttcaacctttttctcttcctcacccatctgaggaacatattcagcttgtggacttcggagagatgggacccattcggtgttctcgttgcaaagcgtacataaaccctttcatgaaatttgttgaccaagggaggcatttcatctgtaacttatgtggattcagaaatgatactcctagagactacatgtgcaacttagggcctgatggtaggcgacgtgatgctgatgacaggcctgaattgtctagaggaacagttgaatttgttgctacgaaggaatttctggttcgtgatccaatgcctgctgtatacttcttccttattgatgtctctatgaatgctatacaaactggtgcaactgctgcagcttgcagtgctatttctcaggctatttcagatctgccggaaggtcctcggacaatggttggaattgcaacatttgattctgctattcacttctacagtcttaaacgtgctcagcagcagcctttgatgctcatcgttcctgatgttcaagatgtatatacacctcttcagactgatcttattctcccagtttctgagtgccgggacaatctggagcagttgctagaaagtatcccaagcatgtttgagaataatagggttgctgattctgcttttggagcagctatgaaggctggcttcctggcgatgaaatctaccggcggaaaacttctggttttccaatcagtgctgccatcacttgggattggttctttatcagctagggaagctgaaggtagagcaaacattacaactggtgacaaggaagcccataaacttttgcagcctgttgacaacaccctcaagacaatggcactagaatttgctgagtatcaggtctgtgtggatgtattcctcaccacacaatcctatgttgatattgcttctatatccgttgtgcctcaaactacaggtggccgggtctactactactatccgttttctgctctttcagatccagccaagctcttcaatgatctcagatggaatatcagtagaccccagggttttgaggctgttatgcgtgtaaggtgcagtcagggtctccaagttcaggactattatggcaatttctgcaagcgtgttcccaccgatattgatcttccagcgattgattctgacaaaactgtgatggtcacgtttaagcatgatgacaagttacctgaaaatgtggaatgtggcttccagtgtgcacttctctatactactgtatatggacaaaggaggatccgagtcataaacctttcactttcatgcacaaatttgcttgccaatcttttccggtatgctgatttggagacacagttttcatgcttcctgaagcaagctgctaatggcatcccgacatctccattacctcgtattcgggatgaagcaacaaatacatgcataaatattcttcaatcttaccgcaaacactgtgcatctgtaacttcatcagggcagttgattctcccagaggctctaaaactgctgcccttatatactttggcactggtcaaaagcttaggcttgagaaccgatgggcgattggatgaccgttcctactggatatctgtagcctcgtcagtttctgtagtactagctgttcctttggtgttccctagattgattcctatccacgatctcacatcaagggatgacgatgattctcttatacccagtccccttatgctcaatagtgagaatgtacaagaggatggagtttatttattggaaaatggtgaggatggtttaatttatgtaggaaacatggtaaatccggctaccctggaacaaatattcggtgtctcttctttggctgcattaccagcccagttggcgttggagcaatttgacaacgaactctcgaggaaggttaacgaagttgtaaatgaaataagacgccagaggtgctcatacttgaggttaagacaatgcagaaggggtgaaccatctggtgattttttccggtcatttttagtggaggacaaggcgcctggcgtcttctcctacgtcgagttccttgtgcatgtccacaggcaaatccaaagcaagatgacctgagggcccaagatcctggttgtaacatttcggtcagtagatggattgtatgtaccccgggagtttgatttctgcataaggagacagcaaagtggcgattccatatcaatgtggagcataaagagtgctcggataatagaactcaggaatagaggcttgtggtgtttacagcaccgtttttggagtgggtggtatatgtgttgtatacagagatgagaggggtggagctttagtttttgtgttgtcttttatcatcgtgcatccttgtttatctcatgtgcaaaaagtgttggattatgttggttggaaggttatagaggtttcgtaataaaatgcacctagctaatcgatagtatgaatcagatatactataatttaactattatgtttgcctattcgaatttaaccctgtgatgatgttttgtgatt

SEQ ID NO: 18551 - DNA, 2831 bp, Zea Mays
gctatctcctccagcatccacccaacggatccgcggcaaccgaccacccatgggatcgctccggggcgcggcagcctcctccgcggcgccgcgcgcgggcgacctggtgaccacgcaggttagccttggtggatttgatgccaccgtcaaggcgctcgatctcgccgacttcctcgagttgaatgcgggctcggtctggcgctgccgcctcaagacctcctggactccgccggacgcctatcccgacttccttctccccaccgtcacctccgccgccgcgccgccgccacagtacgatcgcgtgcctccgcacgccttcgtccactttgcgcgcccggagggcgcgcgcgccgccgccgacgcagcgggccgatccgagctcatcctctccggcaaacccctgcgcgccgcctccgcacaggacagctcccttcgggcatcccgccgccgtagtgtctcgccattccgcttccctggctcgcgcctcgaggtcggggatctcccggcctcggacgccttcatcgccgcctggcgcggcccggcctctgggctcgagttctccgtcgacccgttcgacgggtcttgccacttcatcttcgcccgcgacaccgctttcaaagtccgggagttccgcgagtctgtggtgatgcgctgcgacgtcaagctccagttccccgtccgcgatgttgcggaagtcagggtgttccggctcgactgctcgctgctgatccggctatcggccgcaccgctggtctgttaccgcacggcggatgacgacatccacgtgtccgtgccgttcgacctgctcgacgacgatgacccgtggatacggaccacggacatcactccaagtggtgcgattgggcggtgcggtgcgtatagaatcacattctcgccgcggttctggccaaagatggaacgcgcgctgacgtacatgagggataggagggtggcgatccttgattgcgttggagggtggggggccaggagggggctcaccgtgcgtgatgagcctgagtttggggagcggatgcaggacctgttcttctgcgtgcagcacgccgagggtctcaagtttccggtgttgttcctcgtgaatgctctggtgcacaagggagtaataagtcaacaccacctcacgcctgaattcttcggtttgctccagaggaaggaggatgatgtgaatgtggctgccttgagggaattttggggggacaaatttccagtttttgatgcatgtgggaggctgaagaatctgcaggatagggttgccaggtacctgaaacatcttcgcaacaagattggggatgtcaattctgaggtgaggaggctggtaatcacgcccaccaaggcttattgcatgccaccagaagtggagcgctctaatcgcgtcatccggcattatagtgaagtctcagaccggtttctgagggttacttttatggatgagagaatgcagatgctcaacagtaatgtgctgaatttctctgctgcacaaatcgtcaaagatttgatgtcaaactcgttcctgcataagacaacagtgtacaagcgtgttaaaacgtttttgacagagggattccacatgtgtggcaggaagtactcgtttcttgcattctcatctaaccagctgagggacaggtcagcatggttcttcgcagaggacagaacgacaacagtggaaaccattaggaaatggatggggcggttcacaagtaagaatgtagcaaagcatgccgctcggatggggcagtgcttctcctctacatatgctacggtggtgctgcagccgcatgaggtaaatgagtgtcttgatgaagttgaacataacgggtacattttctctgatggaattggcaagattacgtgcgaccttgcactcgaagttgctcagaagctgcaattgacagataatcccccatctgcttaccagattaggtatgcaggcttcaagggtgttatatctgtctgggaaggaaaaaatgatgggatacgactttccctgaggccgagcatgcacaagtttgagtctaaccatactgtgttagaggtggtctcgtggacaaagtttcagccaggattcttaaatcgtcagattattacattactgtcctccttgaatgtcccggatgctatctttgctcaaatgcaggaagccatgttatctaatctcaacaatattttgtcagactctgatgttgcttttgacattgtaaccgcctcttgtgctgagcaaggaaccactgcagcactgatgttgagtgctggcatttcacctggaactgagccacacctgaaagcaatgctgttagctataaggtcctcacagctgctaggtcttttggagaagacaaggatttttgtgcccaagggaaggtggttgatgggctgccttgatgaacttgggatccttgagcaagggcagtgctttatccgggcatcatctccatcactcaataattgtctggtgaagtatggatcaagattgtctgcagcaaacacaaatgcagagaccattctgggtactatcgtaatggcaaagaatccatgccttcatccaggggatgtccgaatccttgaagctgttgatgtgcctgaactgcatcaccttgttgattgcttggtcttccccaagaaaggtgagaggccgcacgcgaatgaagcatctgggagtgatcttgatggggatctatacttcgtaacatgggatgaaaaccttataccacctggtaaaaagagttggaaccctatggactactccccagctgaagcaaaacaactgccacgcgcagtatcccaacatatgactgtgtctcgctccagtgctgaag

SEQ ID NO: 18552 - DNA, 826 bp, Zea Mays
tctttggccacacttctataatgctaaatgttgtctgtgatgttaaagttgttactcgacagtaccataaagcggctgaaagaggaggctatgggggtgagcgatatgaaaagatagagttccaaaagaaagttgcagagcattaccattcactccgtgattcgacatggaaggtggttgatggtttccttcccatggagactgttgaagaaaaactgagagatttagctacgagctgtattcaggactgccaagggaacccacttaccaatctggcctggtgaagtgccattatgcacaaagtaatggcggccacacatcgtcttgtgtgatcaaccatggccgggatagaattaggcatccggaagcattggcctttccatttgctctatcagtatcccttgtgcaatatatttataatctcaaagtgtgttttttctttcctaaagttaggccctgtttaaaacctctagagctaattgttagccaactaataagttgttagctggttttagctgggttgagacagctacaactaatgactatttgagaggtatagctaacaattagtcggtctattatctgatctgatccgtttaaaacctttcagttcattttagatgccaactattagttttagaggtttggaacaggaccttagtctgtctgccggtgtacggattttgtgtaacgtgaaacatgtgagagtgcaaaacacttaaatttctatgcttcatgtacctgtgaatgctgctggggtgaagaaacattggaaaaggaatgaaaaacagtagcactagaaatttggggtttccaagcaaatgaa

SEQ ID NO: 18553 - DNA, 1884 bp, Zea Mays
tatagtcttccctcttttgtatacatagagatcaccatcgccctctactcgtagatcaaaatctcggtcgagatcacctatcaaataccgtaggagcaggcggtcccgctcctactctcccccagttagacgctcaagggagcagcgatcacgatcaccatcaaaatctcgccactcaaagtacggtagtgatcgatcgcatagggatgataaggacaggtatagcaggtccgggagaagggagagtgaacgatctcgtgatcatcattcatctagttcaaggaggaacagaagtaaaagtagaagtccaaggcataagaagccctccagagttgattctaggtcacccaagaaacaaagagaggaaagtttaagcccatcaaaatcaaggtcagcaagggctggttcaagatcaccacgccatcataagggaagcaaatcatcgccaactcgtgaccgtcattctcgccatagcaggcattcaaggtccagatctcctggcagaaagcaccgtcacagtgataaaagggacagcagaaagtctgagattcaggacgacaaaagaagatctcatagaggtagcagacacgacaaagatgaaagttcagtaaaggacgaaggggaaagatctcatagaagcaatagaggtgacaaagatgaaaggtctgtaaaggatccagtggaagataaagggatggatactaaagttgttgcacataagaggagctcaacagtatctgaagatgaaattctgaacaacaatagtagtaaccataagaaatatagacatgaagttggtttggaagttgatggaaatgatgtgtgctctgctgcagctgacattgataggaaacatgaaactggagtagatggctctttggggggcgctgcagaatcagctatgtgatggctgctgtatcattgagtttgctgtttacagatggattgatgatgatggagaatgctgaactggtgtttattatctccttttctgatttaggagttttatttgcagggcatgaagatcttcggagaacttgagtgctgttcggagtgctcatctgatatattaaaatgtattcctcattaacttgagattcgctccttggagcaaacttctaaatgtaaagctggtgttgtaaggcgatttcatacagtgaggtagaaaccaaccatgtatttgtcgtttcaggctcatgattccatgaagagttcttggagcacatttctgggatgtcggttgaagatacaagggagtatacacttcctcaagtttttcaagggggttgacattggagtatgttttgagggaagtcagtgcatacttcattttgtgaatgaggactatgttgcggatgctcaaccggtgaggattacatgttctatcaggagtgaagacttgtgcacgagagctgcaagtgaacctttctgcatgtggatgcttatttatatcaacatgtgtctcccggataatatagcttgccgcttgcgagttgggatatgagcgctaatctaagcttggagtgattcaccaaaccgctctaagattaaggaaatatagggatattcaaacaacaaatggagttaatccaggtcgtgcctgtgggaaaaacatccatagacttcaatttgttagggaaaaatattttctaaaataagggtgaaatacactgttttttctctttcttttttgctcagaaagaataaaattgagtaaggaggtgctaaattctgtgccctggttcttttccctaaattttcagatttgtttttgaggtaactttacgaaatctggtcgatgtgaattgcaaatgtataaatttgacgtgataaatgacgggaatcaaaatcgagtgtaaacaactatatcttgacacgtcatgg

SEQ ID NO: 18554 - DNA, 1390 bp, Zea Mays
accggattccccccgacctcgccaccgccacaaacgctgtccagctcctcgcactctgacactccctcaatctccctccttcccgtccacgtcgctcgccgttccgcctcccgcattccgtccaacacccccgccgccactaccatggcgaccatcctcctatcctcccgcctcccaaccaccggtacagccacgccgtcgcccacccgccccgctccgcggttcctctccttccccgggaccgccatccgacgccgcggccggggcccgctcctcgcctcctccgcggtctcaccgcccgcgccggcttcggcggcgcagccctaccgcgcgctgccggcctcggagaccacggtcctcgtcacgggcgccacgggctacatcggccgctacgtcgtccgggagctcctccgccggggccaccgcgtgctcgccgtggcgcggtcccggagcggcatccgcggccgcaactcccccgatgatgtcgtcgcggacctcgcccccgcccaggtcgtcttctccgacgtcaccgacccggccgcgctgctcgcggacctcgccccgcacgggcccgtccacgccgcggtctgctgccttgccagccgcggcggcggcgtgcaggactcgtggcgcgtcgactaccgcgccacgctgcacacgctccaggccgcgcgggacccctccttcacctacagcgtcgtgcgccccacggcgttcttcagagcctcggcggccagcgaggaggacctcgccgccttcatcgccgactgcatatacgaccaggacaaggccaacaaggtgctgcccattggcgggccggggaaggcgctcacgccgctggagcagggggagatgctgtttcggctgctcgggcgcgagcccaagttcatcaaggtgcccatacagatcatggacgccgttatctgggtgctcgatggattggccaagctgttcccggggttggaggacgccgccgagttcggcaagattggcaggtactatgcctcggagagcatgctgttgctggacccggagaccggggagtacagcgacgagaagacgcccagctacggcaaggacacgctcgagcagttcttccaaagagtgataagggaagggatggcggggcaggagcttggcgagcagaccatcttctaggccttctccattaccagtttccgggagaaagaaacttgtagtagattatatgccgacaatgtacttgtagagatgtgagctttttgacttgctgatgatgtaaacacgactcgcgattcaatcataccaaagtatgatgattgtctaatttggaggaagagaaatgttttgacttgttgcttcaaagaagctgatatcttgtctgcacataatacatgttttcgcccacagt

SEQ ID NO: 18555 - DNA, 1233 bp, Zea Mays
aggagacgctgaaagggaagtggaaagtcttgagggaatgaaaaggaaagaaagcaaagaggggaaaaaaggcgagcaaaaggaggcggaaacatgctttcagccgtccgtggcgtgattcaaacgcgagaagatgccctgcccctgcagccgtacacggtccgatcacctgaccgaactgacggctcagatttgctcaacatctgcactataagtcgttccaccgacatgcgggcccgttatacatagaaccccacagtcagtgagacacatggtcttctctctggtggaagcggtgggtgcacatgctgctagcagtataaatatgctgaaagcctgaaaccctaggcgaagcttatcgcttatcatccgcgcctctacatttcttctctctctgctcctccgcctccgcctgatccatccaagacagggatcgccatgtcggactcggaggagcaccacttcgaatcgaaggccgacgctggggcgtccaagacctacccgcagcaggctggcaccgtccgtaagaacggcttcatcgtcatcaagaaccgtccctgcaaggttgtggaggtttctacctccaagactggtaagcatggccacgccaaatgccactttgtcgccatagacatattcaatgggaaaaagcttgaagatattgttccttcatcacacaactgtgacgtaagttaatttctgtctgttctctgtttagctaaagttattttgatagttcacttcatatgttactgacaagttcaatattttttagattccgcatgtgaaccgtactgagtatcagctgattgatatttctgaggatggatttgtgagccttcttacttcagatggcaacactaaggatgatcttagactcccaactgatgagactcttgtggcccagattaaggaagggttcgaaagcgggaaggatcttgttgtgactgtccagtctgcgatgggggaggagcagatctgcgcgctgaaggatgttggccccaagtaacttccttggctttggagacggaaccctactctatctcaacttaaatcggaaaagaagtgtatcaccaaaggattgctaccgagacattcacctggcttgagctggcttttgctatagcgtgcaaggggttgctgggtgtcgtacctacctgacttatcattatctgtgagcatcaggcgcgatgtggggctgtaatggccagatcacatgacacaatctgaagg

SEQ ID NO: 18556 - DNA, 1562 bp, Zea Mays
ctcgtcactcggtcttttgtccatcaatccctctctttcccatcgccagatcacctggccggccttctcctgcaatggatgctaccatggcgttcacctccggaagccctacccccacgcgcttctactcttcagctttgctatcgttgcgcacccccaagagcctctctgtctacggcccatggcgatggcgtgggcgtgggcgccccctcctcgcgctccggcatcggtcccaggcccaggccgccgcagcggcggccggggcggccgaagcctcccaccacgatgttgtagttgtgggcgctggaatcgtagggcttgccatcgcgcgccacctcctcctccacacttcgctctccgttgccatcgccgacgctgccgtcccctgctctggtgccacaggcgcagggcagggatacatatggatgtcgcaccggacgccggggactgacacgtgggagctggcgctgcggagtaagcaactttgggaggagctggcgaccgaggttgacggccagggaggcggcggagcacgggagaaattggggtggatgaggacagttgggagaagttcggaagagctgggcacattggacgaaaggaccaaggctctgtctcaggcaggcatacatgcggaattcttgtcagcatcttcattacatgcattagaaccggcactcagtgtagggaaagatggcggtgctatgttcttgccgcaagactgtcagattgatgcattccaggctgtctctttgattgagaagaccaataactcgtattcctcagaaggaaggtatagggagttctataatgatcctgccatgtcattaataagatcggacgttactggaaaagttgaagctgtccaaacttccagaaacatattgtatggcagaaaagcttttgtaattgcttctggtgcctggactcgatccttattgcatagtttcgtagaaccagctttgacgttggatattcctgtcaagccacgaaagggtcatcttcttgtgttggagaaattcgacaaggttaagttaaatcatgccctaatggaggttggatatgttgaccatcagattacaaagtcaaatagcacacacatagcttcagaatctagtgaagatgagcttggtgctttatcagtatcaatgactgcaaccttagatacaaagggaaatttagttctaggaagcagccgggagttcaaaggtttttcgagggaggttgatagatccgttgttcagtgtatatgggaacgtgcaggagagttttttcctgcaatgaagaatgtttcttttgatattgatcagaatactcaaatcagaatagggcatcgtccatacatgcctgatggaaagccagttattgactttattcctaatctctcaaatattttgattgcaactggacacgaaggaagtggacttactttggcactaggcactgctgaaatggtcactgatatgattcttgggaatcctggaaaagtgagctactcacctttttccatcaaacgcagattttcagtccgttcctaccctcgttccacacgaaacgaatca

SEQ ID NO: 18557 - DNA, 3531 bp, Zea Mays
ccttcatcctagccgtccaccagcgcaccgttcttgccccgcaagcctccgcacgaggcctggaactttccacgggtccaaaaccttctctctctctcctctcctcttccctttctctctcctccgcctcccccgactcgcgagtcgcgatctccacctccctcgaccaccactcccgtaacccacttccgggtgggccccacgtcgccgccggcgaccagcacctcccctccttgactccctcgctacccgccgcccgcgtcccgccggccatgacgacctcgccgccgcccgccgagcagcagcatgaggaagaggaggtgctggtgccgtatggcccgcacctggagttgcccaatggagcgcagccaatggaagttgtgcctgctgagccagctgctactgtggaaaaccaacagatagaggatccaccaatatcgagatttacttggaccattgagaacctatcaagagttagcacgaagaagctgtactccgaaatctttgttgtcggaggctacaagtggcgaatcttgattttcccaaggggaaataatgttgaattcttatctatgtatttggatgtggctgattctggggtattgccctatgggtggactagatatgcacaattcagcctctctgtggttaatcaaattcacaacaaattcacaataagaaaagaaacacaacatcagttctctgctcgagaaagtgattggggtttcacttcatttatgccgttgggtgaactctacaaccacagtagaggttatcttgtaaatgatacttgtatagtggaagctgaagttgctgtatgtaaagttgttgactattggagttatgactctaaaaaggaaactggctatgttggtcttaaaaatcaaggtgctacctgctatatgaattctcttcttcagacgctgtaccacatcccatatttcagaaaggctgtttatcacatgcccaccactgagaatgatatgccctcaggaagcatccctttagctctacagtcactcttctataagttgcagtataatgacagcagtgtctctacaaaggagctcacaaaatcattcgggtgggacatgcatgattcatttatgcaacatgatgttcaagaattgaacagagttctttctgagaagttggaagataagatgaagggaactgttgtagagggcacaatacaacaattgtttgaagggcaccacatgaactacattgagtgcatcaatgtagatttcaaatcaacaagaaaggaatccttctatgatctccagcttgatgtcaaaggttgtcaggatgtctacgcttcatttgacaagtacgtagaagtggagcaattggaaggtgacaacaagtatcatgccgataagcatggtctgcaggatgcaaagaaaggagttctttttatcgacttccctcctgttctgcagcttcagctaaaacgttttgaatatgatttcatgcgtgacacgatggtgaagataaatgatcgctatgaattcccacttcaattggaccttgatagagatgatggaaaatatttatctcctgatgctgacaggaatgtgcgtaacctttatacccttcacagcgttcttgtccatagcggtggtgttcatggtggacattattatgctttcatacgacctaccctttctgatcaatggttcaagtttgatgatgagcgtgtgacaaaagaagatgcaaagagggcactggaagaacaatatggtggtgaggaggagctacctcagacaaatcctggcttgaacaacactcccttcaagtttactaaatattcaaatgcatacatgcttgtgtacattcgtgaaagcgacaaggacaaaattatttgtaatgtggatgagaaagatatagcagagcatcttcggattagattggaaaaggaccgtgaagagaaggaacgtcggaagaaggaaaaagctgaggcacacctctataccataatcaaggttgcaagggatgatgacttaaaaactcagatagggaaagacatatattttgatcttgttgaccatgataaagtcccaagcttccgtatccaaaagcagatggcctttgctcaattcaaggaggaggtagcaaaagagtttggtattcccacacagttccaacgattttggctgtgggccaagcgacaaaaccatacttaccgacctaacaggccattgtgtcctcaagacgaagcgcatactgttggacagctaaaggaattggtgaacaaggcccacaacgctgaattgaaattgttcttggaagttgaacttggactggaccttaaacctcttcctcttccagacaagactagagaagatatatttcttctcttcaaactctatgaacctgaaaaggaacagctacggtatgttggtaggctctttgtaaaggcttcaggaagaccacaggacattctgccgaagctaaagatgttggcaggtttttcacaagatgatgatattgaactttatgaggaaattaagttcgaacccaatgtgatgtgtgaatacattgataacaggcttctgttccgatcttgccagcttgaagatggggacataatctgttttcaaaaatcttcaaaggcagatagtgctgaccgatatcgatttcctgacgtaccatcctttttgacgtatatacgtaaccgacaggtggtccactttcgttcactggagaagcccaaggaggacgattttttcctcgagatgtcaaagattttcacatatgatcaagtcgtggaaaaagtagctgaaaaacttggcgtggatgacccatcgaaaattcggcttacatcacataattgttattcgcagcagcctaagcctcagccaataaagtacagaggcgttgaacgtctactggacatgctgattcattataaccagacttctgatattctgtactatgaagtattggacataccacttccagaattacaagcgctgaagacattaaaagttacataccatcatgccacaaaagatgaggtgtcagttcacagtataagattgccaaaaaacagcactgttggcgatgtgctaaacgatatcaaaacaaaggttgagttatctcatcccaatgctgaactgagattacttgaggtcttttatcacaagatatacaaggtgtttgcaccaaatgaaaagattgaaaacattaatgatcagtactggacactgcgtgcggaggaggttccagatgaggaaaaaaaccttggtccctttgatcgattgattcatgtatatcattttacaaaagatactcaaaaccaaacgcaagttcagaactttggagaacctttttttatggttattcgtgaggatgagaccctatcttctatcaaagagcgtatacagagaaagcttaaggttccagatgaggatttctcaaagtggaagtttgcatacatttcacttggtcgtccagactattttgaagattcagatactgtagctttaaaatttcagcgtcttaactttatttctcttgacatctgac

SEQ ID NO: 18558 - DNA, 1075 bp, Zea Mays
ttcccacagcacccccaccgccgatccggactgcctatgatgtgtccattaatgacgactcttggccaacagaagtgtttgagcttgtcactggagagaaatcgaagacattggaaaggcttgaccctggtgccactgcttcacacacatatgtcctggagaccaaaacacagggcaggttccagggttcaccagctatcattacataccgtgttcccacaaagacagctcttcaggtcccccccaccccactttatctctactgttaaatgtcttcaagtcgtccaattaatcgcgattagtcgtccaagttggtttggaccaatcacgattaatcgccctagtcggtcagcaagaacgaccagcaagtcgtccgacttgaaaacattgctactgtacataatttagtagtgtttcttgtattgtccaacccacggtgtttcgctaaatcaatgctttgtacatgttgaaggaggcatactcaactcccatcttcccactggatattctcgctgagagacctccagagaagaagtttgaatgggtaaaggcttgtgatgaaatacgggtcacttgtgtctgttgtctcttttgttggactgtttatctaccttgtcgcgagcccgtcgaagagcagctcaaaggcaagcaagaagagacgctgatctacttataggtcgcagttgacggtgtagctggtggttttgcctggaggaactcttggtagtttgagctgtgcgaaagcttttaagtttacatttactcaccactccatgaacggcaacgaagtattcatcagttagaaaagtgcacctataattttggttgcttataactttctatttgtcagagatttaactcgaaggacctgtaactaggaaagttaattttgcttggaagaacattttgatatgatcgttgttcctgtgcttcgtgcgtggtgccgtgaaattgagaggaaccatttggtgggacgttttcagctgacaatggtcatgacattgcaactgccgttaatctgaaccatgcatgttgaagatcacatatttaatagttaggccctgtttgggagcgc

SEQ ID NO: 18559 - DNA, 846 bp, Zea Mays
cgaagtctacatgataggtgccgactgctgagacagagtacggtcgcgagagtgaaggcaaggaaaaacacccaaacggcccaaccccaggaagccccgtcggaccctacagaccctaaccctagcgctcccgacgcgccgcggagcgatggcgatggacgcggagcggcggcaggcggagctgatcgcgcagttctccgctcaggcggcggcgctttcgtccgcgccccagctcgccgcgctggtgcttgaggccacctcccacccggccctcttcgccttctccgagctcctcaccctcccggccctctccaagctcactggcacgcagtacgcgtcgtcactggacttgctccggctcttcgcctacggtaccctgaatgactacaagagtaattctggattccttccagcactgttgcctgaccaggtccgaaagctaaagcagctcagcgtgctaactctggcagagtcaactaagatactaccatatgatcagctcatgcaagagttagacgtttcaaatgtaagagaactcgaagatttcctaatcaatgagtgcatgtattcgggtatcgttagaggcaaactggatcagctgagaaggtgctttgaggtacaatttgcagctggaagagatcttacacctgatcagctaaagaacatgatagagactttgtctgattggttggggacatcagatagactgttgcatcaaattcaggagaaaatcaagtgggctgacacaatgagtgaggtgaacaagaagcaccagaaagaatttgaagacagagtggaagaggccaaaaaatcaatcaagtgttgccgaaccatgtttcttacttg

SEQ ID NO: 18560 - DNA, 1476 bp, Zea Mays
cctgggtcaaactaacttcagagaccggctgctggttctccaccaaactaaccaaccatgcgtccgtcgtcgcgttacccgccgcaacccgcgctacctgcccctagccggggagcagctccccgacgccgtggactggcgcgagcgcggcgccgtcgccgaggtgcgtgctgggcgttctcggcggtggcagcggtggaagggatcaacaagatcgtgacaggcagcctcatctcgctgtcggagcaggagcttatcgactgcgataagttccaggaccagggctgcgatggcggcttaatggacaatgctttcgtgttcatgatcaagaacggcgggatcgacaccgaggccgactacccgttcactggccacgacgggacgtgcgatctcaaactgaaaaatacaagggttgtatccatagattcgttcgagcgtgtgcccatcaactacgagagagcgctgcagaaggccgtggcgcaccagcctgttagtgccagcattgaagcatctcggcgcgcgttccagctctacagttctggcatcttcgacgggagatgcgggacgtacctggaccacggtgtgacggtggtggggtacggcagcgagggcggcaaggactactggatcgtgaagaactcgtggggcacccagtggggcgaggccgggtacgtccggatggcgcgcaacgtcagggtgagggccggcaagtgcggcatcgccatggagccgctgtacccggtgaaggagggcccgaacccgccgccgggcccgacgccgccgtcgcccgtgaagccgcctaacgtgtgcaacgcggagtactcgtgcccggaggccaccacctgctgctgcgtctccgagtaccgcggcaaatgcctcgcatacggctgctgcgagctggagaacgccacctgctgcgaggaccactcgtcctgctgcccgcacgactaccccgtctgcagcgtccgggacgggacctgccgtaagagcgccaacagcccgatgatggtgaaggctctgcagcgcaagccggcgatgtatactggcggcggcggcggcggcgagcaaagcgggaggagcagctggtgaggagattgagactgtggtggtgcgtggcgtgtactgttcatcgttcagacagatgacttgctggccatgctgtgggctcaggaactgcttcttcacagtggcgatgttctgatctgtaatgcacgaagcacgatactatttgttgtatatgtatgtatgtgtaactacagataagattaggaacggtgtgaaagaataaagaaaccgatggaataagtgatttgggaacaatctcagaatcaatttatgcagccctttaggataacttcgggaacagtcttgcacaaacaacaaggtaataatgcattcactcgtcgtgttatgtaaaacatgttctccagaacaaagctcagatttgcagtgaatatattcctgaattcaagttcg

SEQ ID NO: 18561 - DNA, 1301 bp, Zea Mays
cgcactgctgccagaagagtggtcttctccagactaaggcaggatatgacagtaatattcagaaggaggggtggttgcgaccttgttcaaagttttagtgattggagaggaactgttgcctcagcaccagatgtcataggcatcacctttctatcaattgtctctcttgttgacgatataccaggaaagaagcaccttgctcgtgcagttgagctatacttgacctacaaacctccaattgaagaattacagtacttcttagattttcgagtcccactagtttgggctccagctccaccaggtattgctggtcaccataggaaagaaccagtctgcccatcgcttcagtttagcttaatgggcccaaagctcttcattagcacagaacagatctctgttggccgtcgaccagttgttggcctcaaactgattttggaaggagccaaacagaatcgtctggctattcatttgcagcaccttggctcattaccaaaaatattcctacctcattgggactcctatattactattggacctccaaaatggcaaggtcctgaagaacaggacagccgatggtttgagccaatcaaatggaagaactttgctcatgttagcacagcacccatagagtacactgaaacaaatattacggacctatctggtgtttatattgttacaggagcacagttgggagtgtgggattttggtgcaaagagtgttctccaccttaaacttttgttctccagggttcctgggtgcacaattagaagatcagtgtgggaccacagcccatcaagttcctcggtacatagaacagatgaatcttcgtcatcctcaagtgataatgctaaacttctgaagatcgttgacctgacagaaacattcaagggcccacaagatgcgcctggccattggctgatcacaggtgctaagttgggtgtcgagaaaggcaggattgttgtgcgtgcaaagtactccttattgaattattaaccaaatgtttaaatcattcaatcactctgatattgagcactgtgttttaaggtagcatttgttcttttgtttttcatgtatggcttttgttcccccttgtaacatgatgtggatcatgtttcttgttgatgatgccgtgagtgaagcactacattcgttctcgaatatttgacgtccactagtccactagttcattactaatcagcgataaataaaaaagaactcgaatatttggcgtccgctagttcattactaaacaacgataaataagaaagaatggagggagtggcatatgaagatgttatggt

SEQ ID NO: 18562 - DNA, 3836 bp, Zea Mays
ttatcgctcaactcggtgtcctaacagtttctactcctcaacctggttcggtggtgtgattatctccctctaccaggcggttccgtagtaaacaactcggcccggcagtcgttcccagggcgagatcggatcgatcgagagcttcctagacctggacctgcgctagacctcaaagactcgatcgcaccgcatcttctctctctgctcctcgttcgcttcgtcgccggcgaccccgccgccagcttccccttccgctggccgccctttgcctcgcccctgaggcgtcggtttccactgcataggagtggggcggcgatccgactggacctagggttgcgagaccccatagggtgaccctaggagcatccgcctccacgtgggtgaggcggaggagggaggatgtcgtcgctcagccgggagctggtcttcctcattctgcagttcctcgatgaggagaaattcaaagagaccgtccacaagcttgagcaggagtccggattctatttcaacatgaagtactttgaggacgaggtcgtcaatgggaattgggatgaggtggagcgctaccttggtggattcacaaaggtcgacgataaccgctactccatgaagatattctttgagatccgcaaacagaagtatctcgaggctcttgataagcatgatcggtcaaaggctgttgaaatcttggtcaaggaccttaaggtatttgcatcctttaatgaggagttgtttaaggagatcacacagcttctgaccttggagaactttagggaaaatgagcagctttctaagtatggcgatacaaaatctgcaagagcaataatgtttgttgagctgaagaagctgattgaagctaaccccttgttccgtgataagctacaatttcctagcctgaagaattctaggctgcggacacttattaaccagagcttaaactggcagcaccagctttgcaaaaatcccaggcctaatcctgacatcaagactctatttgttgatcattcatgtggacaaccaaatggtgcacgtgctccatcaccagcaaacaatccattactcggatctatgcccaaacctggaggtttccctccattgggtgcccatggaccttttcaaccttcaccaacacctgttccacctctggctgggtggatgtcaaaccctccagcagtaacacatcctgctgtgtctggtggtgccattggatttggcactcctacaaatcctgccgctttgttgaagcatcctagaacacccacaactgctaatcctggtatggattatccatcaggagattctgatcacatctccaagagaactagaccagttggcatgtctgaggaggtgaatcttccggtgaatatgctgcctgtgacttatccgcagagccataattaccaacaagatgatttccataaaactgttgcacggaccttgagccaaggatcaacaccgatgagcatggattttcatccacttcaacaaactcttcttcttgttggtaccaatgttggcgacattggattgtgggatgttggtaccaaagacagactcgttgtaaggaacttcaaagtctgggacctcagtaaatgtacaatgattctccaggcatcactggttaaggatccagctgtgtcagttaatcgcataatatggagtcctgatggaaccttgtttggtgttgcttattcaaggcatattgtacaaatttattcctataatggtggcgacgatattagacaacacttggagattgatgcacatattggtggtgtaaatgacattgcatttgctcatccaaataagcagttatgtataattacatgtggagatgataagacaattaaggtatgggaggccaccagtggagctaagcaatttacatttgaaggacatgaagctcctgtttattcagtttgtccacattacaaggaaaatattcagttcatcttctcgactgctttagatgggaagatcaaggcatggctatatgataatatgggatctagagttgactatgatgcaccaggtcattggtgcactacaatggcatatagcgcagatggttcaaggttattttcatgtgggactagcaaggatggtgaatcacatctagtagaatggaatgaaagtgaaggagcagtgaagagaacatatcagggatttcgtaagcgatccatgggtgtcgtgcaattcgataccacacggaacaggtttttggccgctggggatgaattcatgattaagatatgggacatggacagcacgggtcttctaactaccattgatgcagatggtggcttaattgcaagtccacggatacgcttcaacaaggaaggaactcttttggctgtctctaccgttgacaatggcatcaagatcttagcaaatgctgatggacttcggttgctgcgcacgctggaaaatcgttcttttgatgcttctcgtaatgcatctgaggctgtaacaaagcctctaataaatcccttgactgctgcggcaaatgcagctgcagcaagcagttcaggagctggtgctccgtcagctgtaactgcaatgaatggggataccagaagtttggttgatgtaaaacctagaatagctgatgagtcactggacaagtcaaaggcgtggaagcttatggagataactgagtcaactcagtgcagatcaattaaactggcagacaacatgagaacgagcaagatctcgagattgatttacacaaattctggtcttgctatcttggctttaacttcaagtgctgttcatctactctggaaatggccacgcagtgatcggaattctggaaaggcaagcgcgagtgtgtctcccacactatggcaaccaccaagtggcattttgatgactaatgacacgactgacaacaatcctgaagaagctgttcactgctttgctttgtcgaagaatgattcatatgtcatgtccgcttctggaggaaaaatctctctgtttaacatgatgactttcaagacaatgacaacatttatgcctgcaccgccggcagcaacttttcttgcatttcacccccaagataacaacataattgcaattggaatggatgactcaaccatccaaatctataatgtccgaattgatgaggtcaaaagcaagctcaggggtcactctaagagaatcacgggtcttgccttttcaaatgtgctaaatgtcttagtctcttccggagctgatgctcagttatgtgtttggaacacggatggatgggaaaagcaaaagaacagatttttgcagataccgtcaggtcgccaatctaatatcttggacactcgtgttcagttccaccaagatcaaatgcactttcttgttgtgcatgaaacccagattgccatctatgaaactacaaaactagaaccagtgaagcagtggcctgttcgagagaattcacctccaatcacacatgctgcattctcgtgtgacagtcaactgatctatgcaagctttatggatgccactgttggcatatttaatgcatcgagtttgagacttcaatgtcggattcttccagcttcgtatctccccccaaatatcagtccgagtgttcatcctgttgtggttgcggcacacccttcggaagcgagtcagtttgctctagggctgactgatggtggtgtttttgtgttggaacctttggaatcagatagaaaatggggaaatcctccaccggtagaaaatgggtctgctagcaacttgtccgcaccgcctcctaatggagcttcaagttctgatcaacctgaaagatgattgagaagatggaactggtagatttttcgtggcatgagtctaaccaagca

SEQ ID NO: 18563 - DNA, 1538 bp, Zea Mays
gtcaaaatattcgggaaggattgcttgaagtattctatggagtttatgaaaaggatcctgacaaagtgcttcaagcaatggttcaaatgggtgtccttgttcctactggagatatgactgctgtcagaagaaccgctcaatttttccttaatagctttcaagagcgcctagcagcacaaaggaaggagagagaaatggcaaccgcagaactgggattcaaaaagcaattaactaaggaggagaagtttgaaaagaggaagcagagacttgctgcaatcggagaggatcttttggcgattgctgctgatcaaccatttcgcttccctgccacatttacatttgtggtcagagcattctcagttctagatggtattgggaaaggccttgatcctaggtttgatattacagagattgctaagccatatgccaaggaattgctaagatttaatgacgctggtgttgaaatagttgtgaaggatgcaaagaagagatgggaaaggcagtcccgtgccttttacaatttgttccgccaacccgatagagttgaaaagctcgcacaaattattgaacgtttggagcaaggtgaactcaagcttcgtgtcagaacgctggaatcagaaagagcatttcaaagagttgccgctgtacagaaaacaattggatatggagttgctgcaggtagtttgatgaaccttgcaacaatgttgtacttcaattcaatccggggaccagcaaccattgcatactccctctgcgcatttttcgggctgcaagttctgatcgggcttgtcaaggttaagaagttggatcggcaggagagactgataaccggtactgcatgagctatgagttattcacgatcaatcggtgaggactgaattacaccacttttcagcgttgtcgcgacacctttttttttcttttgcccaaattttacccccaccacgatttagcataggcatgccatacccccccttccgggttgtatgtaaatgtaatgataacatataaagatgtacatagtgtataatagacattctccttgtattgtttcgttttcatgatgtaccagtatgtacaggattttgtttcacatgctacctgattggtttgctggctgcgcatacccaggctatcgtcagacttgtggcgggtccgatatggacatttttggcgtaggcaaataacttcaaaaggacttattttgtatccgctcatggtactaacgtctctcgcgtgcaggcaattaaatatatgctcggccaaagtcaatgcacattggcgcataatgagatggtatggataaccaaactgatggatgatgattcaaggtgaaatgatcgatttggaaagtgatttttctatatctttctcacaactttattgctgacccgagtgtttgagattcgaacctagagcatatgatgacgtcgttactcaacatatcatcaacactactctagcctaacattgttgtgaatttaatctacaataactcttcgtcaaattgatatgttcttgaccttgttgaactatac

SEQ ID NO: 18564 - DNA, 3820 bp, Zea Mays
gcttattgttttcgtcagttgttgtcgactcatccaagcagacccgagatacccaaaccctcgcaccttctcggcggtggcggcggcggcgtacgggacggcagagatggccatggaggcggtggccacggtgagctccgccagtgggctccttgctatgctgcaggagcctgcgccggagctgaagctgcacgcgctcgcccgcctcaactccgtcgtccacctcttctggcccgagatctccaccagcgttcccaccattgagagcttgtacgaagatgaggagtttgagcagaggcagcttgcagcacttgttgtttctaaggtattttactacctgggcgagctaaatgattcactgtcatatgcacttggtgctggacccctatttgatgtttccgacgattctgattatgcccatgctcttttggccaaagcattagacgaatatgccagtatcaaaaccagagccttgaaagctacagaggaggaagagaacattgatcctcgattagaggccatagtggagaggatgcttgaaaagtgtatttttgatgggaaatatcaacaggccatgggtatggctgttgaatgcagaaggctggataagctggaggaagcgattgttgggtgtgataacattcagggggctctatcatattgcatcaatctttctcatcaatacgttaatcaccgtgaatatcgtttcgaggttctccgctgtcttgttaaaatataccaaactttgccaaatccagactatctgagcatttgccagtgtcttatgtttttgggtgagccagaaactgttgcatgcatattggacaagctgctttctggaaacaaggatgatgctctccttgcatatcaaattgcctttgatcttgttgagaatgaaaaccaggctttccttttgaatgtgagaaatcgtttgtcctcaccgactcctgtgccatctaaccctgacagtgggccagccgtacaagatgaccaaactgccagtactgtgggtacagacacagaagcagctggagatgttcagatgagagatgatacaagtacaccaaatggaactgctcacagtgtggatccaaatgaggtagcgcatgctgacaggcttgaaaaaattaaagggatactgtcaggggaaacttccattcagctggcattgcaatttctatacagccacaacaggtctgatcttttaattctgaagacaataaaacaggctgtggaaatgaggaatagcgtttgtcacagtgcaacaatatgtgccaatgcaatcatgcatgcgggaactactgtagatacctttctaagagagaacctgtggttaagcagggcaaccaattgggcaaaattcagtgcaactgctggactaggtgtcattcatagaggtcatcttcaacaagggcgggctttgatggccccctacctacctcaaagtggtgcagttggtggtgggagtccatattcagaaggtggtgccctctacgcactaggtttgattcatgccaatcatggtgaaggaatcaaacaattcctccgtgaaagtcttcgcaactccagtgcagaggtcatccagcatggtgcatgtttggggcttgggcttgcagctttgggaaccgcagatgaggaaatatatgaggacataaagaatgtcctttacacagacagtgctgttgctggtgaggcagctggtattggcatgggcttgctcatggttgggaccgccagtgagaaggctagtgagatgcttgcttatgcacatgatacacagcatgaaaagattataaggggtttgtcactgggaattgcattgacagtatatggcagggaagaggaagcagacaccttgattgaacaaatgactagagatcaagatcccatattacgttatggtggtatgtatgcattggctctagcctataggggaactgcaaacaacaaagccatccaccagctgctgcattttgctgtatcagacgtcagtgatgatgttcggaggactgcagttatggctcttggatttgttctatacaacgagcctgagcagactccaagaattgtgtccctgctctctgaatcatacaacccacatgttcgttatggtgcagccttggctgttgggatatcatgtgcaggatctggattaagtgatgcgatttccttgttggagcctcttacatcagatgttgttgacttcgtgcgtcagggagctctcattgccatggcaatggtaatgatccaaactaatgaatcctttgattctcgtgttggagcatttaggcgtcagttggagaagatcattcttgacaaacatgaggacaccatgagcaagatgggtgccatattagcatctggtatcctcgatgctggtggtaggaatgttacaatcaagctcctctcaagaaacaagcatgacaaactcacggctgtgattggtcttgccgttttcagtcagttctggtactggtatcctctcttgtatttcatcagcctggccttctcgccaacagccttcattgggctcaactctgatttgaaagtgccaaagtttgaattcctgtcgcatgctaaaccgtctctctttgagtatcccaaaccgacaactcagcagactacaacttcaacagtgaagctgccagcagccattctgtcaacttatgcgaaggcaaaatctagggcaaagaaggacgcagaaagcaaagctaaccaggagaaggccacagaagaggcttctggttctacctcaagcaagacggctaaagctcaggagaaggatgctgatgcaatgcaggttgacaatgccagtgagaagaaagctcctgaaccagaagcgacttatcagctccttacgaatccagctcgcgtgatccctgcccaggagaagttcatcaagctccttgaaaacagccgatatgtacctgtgaaaccagcgccttctggattcatcctcctccgagacctgcagccgactgaggctgaggatcttgcgctgaccgatgcccccacaacagtcgcaggaagcaccggcaacactgcccctgctgcaggccaacaggggtcaggatcatcagccatggccgtggacgatgagccacagccgccacaaccctttgagtacacctcgtgagcgaccgagcgtcaccttttcttattcgttttttttttgactttttgagtatgtagtgtgcggaaatttgttgttggctggaagaccttttgtagaaacatgagtagagaattttacttgaattgaagctataggatcaacgttgggaatctgggatatagcccaggtcaaaacccgcgctcccgcctgtgatcttttttttcgtgcaatgcaaagtcgagttgacatgagctgaacacggcggtaaaaatacgaaaatgttcggggcaaaccttctcggtgaaattgtaaaaaccctttcgagaaccataactcgaagttctaaatgtctttaaaactatgtagtacattcgtagtgcgtttctagaaaaaagtatatgaaaaatatcaatttcaggcaaatatgcattagaggacgagaaattttgggatttgtcctcacttgatatgtcgtttcaacattaaatttacaaaacgagattttttaaattttgcgctaatgcatatctatagatgcactattggtgtgcagagttccatttttaaaaaaacgcctaaacgttttttttctaaagagtttttaccatttcacagagtaaagggcccgccgagaattcgacgtggcgcagacatcggtcagggagattttacactagtctccaaatggtgcaccgtagggtgaag

SEQ ID NO: 18565 - DNA, 534 bp, Zea Mays
agttcatgttcatctccaggtgtttcctacatatgttgacgttctatggtagctaagaacaaataatatttgatggttccattagtacaagcgttaggtttggaaataccagattgtactctagtcttgactcactgtattggaggttgatcttgttgcatatcatgcacaaaagatcctacctaagaagccatctcaatggcatgcatgtgtttgactgtcccttcattggcaactacattgtcgagcgagcgcacatgaaaacataacacggtgatctatatcatatatatggtcctagttagtataggatccaccatcgaaggcacgtcgtgattatccttaaagatcatgtcatagtgagactgttgcccttgaggtggatcgcctttgaattgttaggtgcactgtcttagcccaccaaaagcaacaagtatttgcaccaacgattctcgttctcttgcttctcctattttctgctgatcaacaagactttcaacattattagtagcattagtaaaactagcattactg

SEQ ID NO: 18566 - DNA, 1701 bp, Zea Mays
cggagagtatcttgcttttacacgtacgacgcagcagcacagctcgccgcctcgccgtctcttagctgaggcgtccgacgccaccgcccccaatccggtggcgctcctccgtccggccctgcgcggcggccgtggagcaggagggcggcgccgcgggggaggccccgcggctggtgctgcacgactccctcgactccgtgggggtggccaccgcgcacgctagggcggcgcgggaggggttcgtggcgcaggtggggcggctcacccgggtaagtgcggggagcagcatcgccatcagccgcggccctgacctcgcccgcgcagcgctctgcgtcgctgccgaggacgactcgctcgtctcccactcctcggtcccgctccccgtagatgccttcatcgcgcgcctcgacgacctctccacgggcttctgcgccggcgggaacttcccgccctcgggtgcgccgcccgaggtcttcttcgattaccttaaccgctacctctacgtccataaggtactgtatagatttgtcgccaagttattctgatccggttgctacccaatttgggactactacgagcgagctgctggaattcgaagtcatttcagctgtctgattgatatggcatgatgtagggtttcggagaacaaatggagtgtcagatgtgcggattatgtaccttcactcggtcttgacatgccgttctggatcagctctaatgcttgcgttaatatattcagagatattgaagactgtacgaacatatggcttactggattttgatgcagagattttctttccaaatgatctcaatagcctccctaggggctatgacaaacaaaaaagcaaattggtcgatgagccacatattatgacttcaaagtcacttttggttgagactttgagaactttgaagtgtgcattttggccatttcaatctgatcagtctagtagcttatttctaaatgctgttgctgcaaaccagcgtggccctggtactttaggtgataaccaagcgaggtcatatgggaacacaagtgccattgagatggctgctgctaaagctgctcagcatagattgatgcgtggagtatggactaatgctcgttttggtgatatgcgtcgtgctttagcagcttgtgagcgactgatactactgcatcacgatccgcatgaactgagggattatgcagcccttctgtaccactgtgggtactatgaagactgcctacactacttatcattgtaccaaactgcaaagtctgggaaatccccaaccaatcgattggagatcttggaggacgaagctgtgaatactctcaaagcgcggttaatgcttattttagcagaggatggctggagcagatgtagacctgtggcaaggtactggaccaagaactctgagccgtggtaattagagctggccaacgttgcggctgaagcaaataactacagattgtacatagcattttcaactgtggatatgttgtacagtcacttggtaatccatgcgggatgtgaatcaaattcctaattttatacaacaccgcgttgttgctttatctgagattcgcagggcttttttatatttttgaataaatttgatacaatacaacaacatcctcaaatctgtatctacattttttagtcaaacaatattatgttacagaactatcagttttccgtaagttctttcaggcac

SEQ ID NO: 18567 - DNA, 2670 bp, Zea Mays
aagctacagccgggcaaaagcgaagaactgttgaagcatgccacgcctgaccgcccccctcctcgcctaatctacccaccacccggccacccgtctcgccctctcataaattctctctcgctgccccaccgatcaaccaccccgcttcccccgaccgcgtctcggagcacccttctcaaccgcatcctgcctctgctcggtgtcgccgtctcgactgcaggagaggggagcgccccgtcgccgatctgatcgggagccggaggccaagcgtcgaggtgagcccgtcaggaaccgccatggcagcggccgccgccgattccgacaccgccgcagctgtgggcgccatgtccacctgcgcccactgtcagcgagaaatcccatttttgaacatcgacttgcactctgtacattgcgcccgcaacctccaaaagtgccagcactgcggcgaaatgattcctaggaaacttatggatgaacattatgatgaaaaccatgccccgatcaattgctccctttgtaaagaaacaatagaacgtgagagctgggatcttcataaaggtgaaaagtgcccacaaagaattgtcgcttgtgaatattgcgagtttgaattgcctgcagttgatctccatgaacatcaggatgtatgtggaaaccgaacagagctttgccaaacatgcaggaagtatattagactgcgtgaatggacagggcacgaaatacagtgccatacaaactcaaatggttctgcagacacatcccgagcaattccagagagagaactacgaccgccgccgccgccagtgcgacaggcgcgaccagcacgtcctgcccacgcttcaccacacaagcggctcctcttcacaatcgccgtcactggaatagcagttatgatcggctccatactgttccagagggacgagggtttctagctccagtagccatggactcgctctgtcaaggtgcttcttgaccgggagagtcatgcggtcatgccacaggaagaaatggatgatgacaatggcgtggaacgtatacttagtgggaaattgagtgagagcagtggatatgctggcagtgacctctatgactacaaggcagtcaatgctgaggagtcagatgctgaacgccctgtgaagatgttggaaggaaatttgaatttgagcaaagtacagaacagcctttcaactgaaaatggttcagcgaatgtggatagcttactaagcgaaaataatccttctaacccaacagttggtcacgagactttgtctatgggggagatcctttcttcttttgatcctggaatttctgtaccgacccatagtcctgaatattctgtagagagacagacaaacaaaactaatggatctcacccacatgtgaagcggagtaacttttgggggaggaataatgcaaggaagggccaaaactctgaatcagtcgattcatctggagaagaagagcttgctattcaaagactagagattgcgaagaatgatctgcaaaacagaattgcaaaagaggctagagggaatgcaattctacaggcgagtttggaaagaagaaaacaagcgctacatgaacgcagattggctttggaacaggatgtctccaggttgcaagaacaactgcaagctgaaagggatctgcgagctgcattggaggttggcttgagcatgtcttctggacagttttcaagtgctcgttcgatggacgtgaagacaaaggcagaacttgaggagattgctctcgctgaagctgatgttgcaaggttaaaacagaaggttgcagagcttcacctccaactcaatcaacaacgtcaacaccagtatggctctgtagtagatgcaaatgatcgtcatcaccgcctccctggtcatttctcacagcaaaactttgttcaacaaggatttgatatgaaccttgctttctgcaatcaagagaagcagagaaatgaggagagttcggtggagtcatcacaatggagaaacatcaagcagcatgtgctaccttatggttcttcgaggccactcacacgaaagctttcatttgatgcctcctcaagtgaatcaaggggcacagaaccctcaacaagtatgtcaacagagaacacctctgtgtccatcaacgtcccaaagctggcagagggcattgaatttgggaggcaaccaatggtcacatcctccactttggaaccacccgaggtaggaggatgaccgtttgatttcatgattgtaaattcttcagtagtggttcttttctccccgcctggcgattgcagaaaactgcatatacgagtgtaaatgtattttgctcttcgatatggttttagctttcgtgttgtgcgaggatagctccttaagtgggatgtgtgatatagtcttttctgtataacacgttgtcatggagagatgccttttagacaagtttttccagtgttgtggcggtgtatatgtattttgtgcgacttggcgaagaaattgaataggttgactgcttgtatggccgtttgattcatgcctagggcaaaggacaggatgaggaaaactgggatcaaatgagaacccagcacgagtttataaataattcgggggtaggcttgaggctgtgttttattttatccttgcaattagttcccatcgccagtggcttgattccgctccgtgttgtttg

SEQ ID NO: 18568 - DNA, 1814 bp, Zea Mays
ctaccctcccacctgcgagactgcaacgccgttgcttcaactcgactccagcatccctcgtccccgcatcaccgcgccgccgacactccgctcgctttcgctcccgagacccgggcctgccgagccgccgccatggacgaggagtacgacgtgatcgttctgggcacggggctcaaggagtgcatcctcagcggtctcctctctgtcgacggcctcaaggttctacacatggatagaaatgattactacggaggagattccacctccctaaacctgaaccagctctggaagaggtttaggggggaagacaagccaccggcacatctaggtgcaagcagagattacaatgtagacatggttccaaagtttatgatggcaaatgggacattggttcgaaccctcatccacactgatgtgacaaagtacttgtcattcaaagctgttgatgggagctatgttttcagcaaagggaagatttacaaggtccctgccactgatatggaggctctgaagtcccctttgatgggtctattcgagaagcgcagagcaaggaacttcttcatttatgtccaagattacaatgaagctgatccaaggacacatcaaggattagaccttactaggaaaatatggtttaagtgatgatacagtggatttcattggacatgcacttgctcttcatagagatgatcgctatcttgatgaaccggcacttgatacagtgaaaaggatgaaactatattcagagtctcttgcgcgctttcaaggaggctcgccatatatctatccattgtatggtctgggtgagctaccacagggttttgcacgattgagtgctgtttatggtggtacttacatgttaaacaagccagagtgcaaggttgaattcgatatggaggggaaagtgtgtggtgtcacatctgaaggtgaaactgcaaagtgcaagaaggtggtctgtgatccttcgtatttaccaaacaaggttaggaagattggtagagttgttcgtgcaattgctatcatgagccacccaatccctaatacaaatgagtcccactcggttcaaattattttgcctcagaaacaacttggacgtagatcagacatgtatgttttctgttgttcatacacgcacaatgttgcgccaagagggaagttcattgcatttgtgtctgcagaagcagagactgataacccgcaatctgagctaaagcctggaattgatctacttggttctgtggatgagatattatatgatatttatgacagatatgaaccagtgaatgaaccatctcttgataattgctttgtcacaacgagctatgacgccaccacacattttgagacaactgtaacagatgtcctgaacatgtatacaatgatcactggaaagactgtggatcttagtgtggatttgagtgcagctagtgctgctgaagaatactgatttcagtcataatgtttatcaaagatcacatcattggggacagcacatgaccaaacttcaatgagtggctagtatgagtttagtcggttccagattataccatgccgacttctactgtacctcgtgaatcgtgatgtctattgggcacttgttgctgacagaactgtgcacaatgttgatccaatttgatggatggtggtggttctgttatttactagtcggtcaaaacactaaacggtggccatcatggctgtgtgatgtatcataactgttcagtaaatttgtgttcttctgcccggagttctgctcgatgctattgcgggcggcccgaggtgcttgctctactgtgaatgaatgaagtttgtca

SEQ ID NO: 18569 - DNA, 1776 bp, Zea Mays
gagggaggctgcccattattaactctccctccccccacgcagaagacgacgaccggaagcaaaacagccagccaaccaaccaaccagaccagggatggatggtgcgcaccaagaaagggggcaccgcaccgagccaatgatctgcaagaagagaggtaggatttaggcacggcacctatagcccctgacgagagagagagggagagagatttggtcttggataagagtggagagactggagacgggtgggtggagtgagagaagtcactcggggagcctccagattctgaatctcccgcaacccgtctcatcgccggagtggagttccaggcgagtgattatcgagccagtaagccatttgcaagcactgaactgaaccctcagagcgttgttgcgatggaccaaatcgctacccccgacgaaacagcacatgcctctgcaccttcagttcataagctgtttgatgctaaattaggccaccatagcgtgatggatggcaccttggcatccacgagtcagtcatcaaacatcaagacccagctgatccggtcatcaagcttgtcaaggagcatatcagttaaccttgagaagaggagccctgaatctgatcctgaaagcccacagtctcacgtctcgcatcctaaatttgcagaacccatgttctcgaattcttcgacgttctgcacaagcttgttttcgtcatcttcgacaacagagccatgccgtcaaatgggcactttacctttcctgcctcacccccctaagtgtgagcagcaggtttcagctggtcactcatcgagctcctctctgcttttaagtggtgataccggtttagatgtggctgaacagtcagatgatctgaacgacttgctcaatctttcgggagatgcttctgatggcagcttccatggagaaaacaatgccttagcttttgacgaacagatggaatttcagttcctgtctgagcagctagaaattgccatcactgacaatgagaagaatcctcatttagatgacatatacggcacaccaccacagctgtcatcacttccagtatcatcttgctccaatcagaatctagggtcaccagttaaagtccagcttagctcatctcagtcatcttctagctctgcaacagctaacaagtcaagattgaggtggacacttgagcttcatgagcgttttgtggaggccgtgaaaaagcttgaaggtcctgaaaaagcaactcccaaaggtgtgctgaaactaatgaaggtagaaggtctaacaatttatcatgtgaagagccatctgcagaagtatcggcttgcaaaatatattcctgagcctaaagacgataagaaggcttcctcggaggataaaaaagcacaattaggaaagggcagcattgattcaagcaaaaacaagaatttacaagtggcagaagctctaaggatgcaaatagaggttcagaaacagcttcatgaacaattagaggtgcaaaggcagttgcagctacggatagaggaacatgcaagatacttgcagaaaatactagaagagcagcagaaggccggcaatgtgccactaaaagctccaaccaaagcacaagcaacaaagtcgtcacctgaatcgacgtcagacgagagaactgaatccgaggtagacaccatttctccgcggccacccaagaacaggaacccgggtgtagacgcagaatgcaaatcgccgggaaggatcaagcgaacgaaggttcaggctgatcttgaaaacgagggcctgtgttcatagcgaggg

SEQ ID NO: 18570 - DNA, 3764 bp, Zea Mays
ctccctcgccgccggaccggatgatgcattactagccaaccaaatcggtcgctgagccaggccccaggcccaggcacgccgctcttctcggcagtaacggaagccgagtcctctcccaccccggggcgggactcgccacttcccattcctgtgcgcctgcctcgcctcgcctcgcgtcgcactacccacccccaccagccaccaccaccaccaccaccaccaccaaccaaatggagcgcgcacgccgccacgccagccgcgcgctgctgcgccgcctgctcgcggcggccgcggcctcgcccgccgcgtccccggccacgtcgtcccgcggcatctccaccctgtcgccgccgccgccagccgcggggaagcagcagcgccgctgctgccctccaccccgcggcgcgcaccagcacgcgcaggcgcgggcggtgtcggtgtcggcgctgcagccgagcgacaccttcccgcggcggcacaactccgcgacgcccgccgagcaggaggccatggcgtccgcgtgcggcttcggcggcgtcgacgcgctggtcgacgccacggtcccgcccgccatccgcgcgccgccgatgcggttccccggcaggttcgacgccgggttcaccgagtcgcagatgctggaccacatgcggcgcctggcgtccatgaacagggacttcaagtccttcatcgggatgggctactacggcacccacgtccccgcggtggtgctgcgcaacctcatggagaacccggcctggtacacccagtacaccccgtaccaggccgagatcgcgcagggccgcctcgagtcgctgctcaactaccagaccatggtcgccgacctcaccggcctccccatgtccaacgcctccctcctcgacgaggccaccgccgccgccgaggccatggccatgtgcagcgccatcctcaggggcaagaagaggactttcctcatcgcctccaactgccacccgcagaccatcgacgtgtgccgcacccgctccgacggcttcggcatccgggtcgtcgtcgccgacgccaaggacctggactacggcggcggcgacgtctgcggcgtgctcgtgcagtaccccggcacggagggcgaggtgctcgactacgccgagttcgtccgggacgcgcacgcccacggcgtcaaggtcgtcatggccaccgacctgctcgcgctcaccgcgctgcgcccgcccggcgagatcggcgccgacatcgccgtcggctccgcgcagcgcttcggcgtgcccatgggatacggcggcccgcacgccgcgttcctcgccacgtcgcaggagtacaagcgcctcatgcccggccgtatcatcggagttagcgtcgactccaccggcaggcccgcgctccgcatggcgatgcagacccgggaacagcacatccgtcgcgacaaggccaccagcaacatctgcactgcccaggccttgctcgccaacatggctgccatgtacgctgtctaccatggcccagcggggctgaaggcgatcgctgaccgggttcatggcctggctggcaccttcgcccacggcctcaagaagctcgggacagtgacggtgcaggacctgcccttcttcgacacggtcagggtcacgtgctccgatgcacgtgcaatcgccaaggaagctgtcaagaacgagatgaaccttcgggtcgtcgatgccaacacgatcactgtagcatttgatgagacctccaccctggaggatgttgacaagctgttcaaggtgttcaacaacggcaaatcagccagtttcacagccgaatccatcgcaccagaggtctcaagctcaattcctagcagccttgctcgcgagagcccctacctaacgcatccagtcttcaacatgtaccacacagagcatgagcttcttcgttacctgcataagttgcagtccaaggatctctcgctatgccacagtatgatccctctgggttcttgcacaatgaagctaaacgctactgttgagatgatacctgttacatttcccaactttgcgaacctgcacccatttgcccccactgatcaggctgcagggtaccatgaaatgtttgacgacttgggcaacctgttatgcacgatcacaggttttgattctttctctttgcaaccaaatgctggtgctgcaggagagtatgctggattgatggttatccgtgcttaccacaactcaagaggagaccaccaccgcgatgtctgcatcattcctgtctcagcacacggcacgaaccctgcaagtgctgctatggttggaatgaagattgttgctgttggaactgatgccaagggtaacataaacatcgaggaattgaggaaagctgcagaagcaaacaaggacaacttggctgctctgatggttacctacccttcaactcacggagtctatgaagaaggcattgatgagatctgcaagatcattcatgaaaatggcggacaggtctacatggacggggctaacatgaatgctcaggttgggttaacaagccctggttttattggagctgatgtttgtcaccttaaccttcacaagacattttgcattccacatggtggaggcggtcccggcatgggtcctattggggttaagaagcatttggcaccatttttaccatctcacccagtgattcccactggtggctttcctctccctgagaaaacggaccctcttggcaccatttctgctgctccatggggatctgctttgattctgccaatttcctacacatatatagccatgatgggctcacaggggctcactgatgcttcgaagatcgcgatcttgaatgcaaactacatggcaaaacgtctagagaaacactacccagttctgttccgtggagtcaacggaactgttgcccatgaattcatcattgatctaagggcatttaagacgactgctggtatagagccggaggatgtggcaaagcgcttgatggactacgggttccacgcaccgaccatgtcatggcctgttcctggcacacttatgattgaaccaactgaaagtgagagcaaggccgaactggacaggttctgcgacgctcttatctccatcagggaagagattgcagagatagaaagcggcaaagcagatgtgcttaacaatgtcctgaagggcgctcctcacccaccgcaactcttgatgggtgacacatggagcaagccgtattccagggagtacgctgcgttccccgcggcatggctccggggcgccaagttctggccaacaactggtcgtgtggacaacgtctacggggaccgcaacctcatctgcacgctgcagcaggcgacccaggtggccgaggaagccgcggccgcaactgcaactgcgtaatctcgtccgagaaccacgataattgatcgcggcgtgcgaaacatcctcaagaaactataatgcatgcttcctgtaggagggaagcatcgtcatcttcctcgtcatcctttctgcagtgcaagtagtcaacacggaagttatgtctatacatatttgatatgtccataacaaaaataaataaatgaaggggcattgttcgaaataagactaagagctgatttggtggtcagagatccatgggaggaatctctttgctattcaaatttgaataataaggagattcatccacatggatcctctagatcaacaaatcagctataagagacaacaaattggattcaggttggattcaaattatacttaatattaggccataaattggctgacgctcaatttattgtgtat

SEQ ID NO: 18571 - DNA, 1327 bp, Zea Mays
gttgtacaatcttaaaaattatagataaagcagagagattgatagcagaggctgctgggtatggttcacagttagttgtctttccagaagcttttattggaggctatcctcgtggatccacatttggtttcgggatcagtattagtattattaatccaaaagacaagggaaaggaagcattccggaggtatcatgcatctgctatagatgtgcctggtccagaagttacacgcttggctgctatggctgcaaaatataaggttttcttggtcatgggggtgattgaaagggaaggttacaccctttattgttccgtgcttttctttgaccctcttggccgttacctgggtaagcaccggaagctcatgcctacagcattagagagaattatatggggatttggggatggatcgactattccagtttatgatactccacttggaaagattggggcgctcatttgctgggaaaataaaatgccacttttgaggacagcgctgtatggtaaaggtattgagatatactgtgcccccactgctgactccaggcctgtttggcaagcctccatgacacacattgctttggaggggggatgctttgtcttgtcagcaaaccaattctgccgcagaaaggactatcctcccccaccggagtatgagtttgctggtttaggtgaagagccatccgcggacactgttgtttgccctggaggcagcgttatcatttctccatctggagaagtcttggcaggtcccaactatgaaggagaggcactgattacagccgaccttgacctgggagagattgttcgagccaagtttgatttcgacgtggtgggccactattctcgacctgaagtccttagattggtagtgaacgaccaaccgcagctccctgtgtctttcacgtctgccgctgagaggactccagctgccaagagtgatatcgatactaagtcttactgattgactggtcatgaaactgtgttgcgccgaacacttggtgatggtcgctcagctcctctagtttgctgttgtgtctcgtggatgggagttgggagttgtagctttgaactaaaaaaaaaactcttgccttcccaacgtaaaaaaatggtggccgcagttatgttccttgtgaaagctgttcgcttggctttaatctaaaactgtttctactttttctaaagtgttttgtctgtatgattacagttcgtagttcgaacaactagttttaatccaaaacgaacaagcttaaggagataaaccctattacttccatttcaatttcgaatagtaccaaatgataatcgcccattttaggctgcctc

SEQ ID NO: 18572 - DNA, 588 bp, Zea Mays
gaggttgacttggatttagagaattatgagtgtttcatagatgttactctgacgagggataacaatattaccactagaaatatatactagtctgtcattgagaaggagagaaggggtgattatattggaaagactttatagacacattcagtgaagatttgttctcaggttgatctgtgcaattttgatggcactcatggtgtcaagtgaggactggttgatctgtgcaatcactggacagcgttgaatgtacacaaatgacaaatttgacatgctcatattgggtccagtgtcccagtgggtcaaggctatgatttgactgaaacttgtgctggagcagctttcactgaatgggatgacaccacttccttgctgctatgtgaagcttgtttcatgggaagaaggtggttacaagatttctgattatccgatgctgagaggagaggtagtggttggcggacacagtacaacaaaaggctataggactaactgtattgtatgtgatattctgtgaacttatatatttggacttgtgtgaatttgtgatatgaacatatatcaatgtgtttgaaatctgtattgtatgtg

SEQ ID NO: 18573 - DNA, 4233 bp, Zea Mays
aaacacagaagcgaagaaaacgaacgaattgccgctgaatccttaagaacagacgacgatctgacccgcgggcctctcgtccccttcttcctgcacttcaggtctgcaaccatcatctatctggcttcctattccgcttggtcgcttccctccctccctcgtcctgctcgcgcgcggagtgagcctacaccacagggagaagcaggcgccaaccgtgacaccgagggtacctaactggaggccggtgatctccggttccggcggcggagatggggtcgtcgtcgcggatcttcgagtacttcgtagtgtgcgggctgggcccggagatccggtccctggatggcatcaagggtttccatggcgttgaggagatgtacatgtcggccttccttgaccagttcccgccgtccaaccacgctctgtaccctcctcctcctccgcagctccccacctgtgttttgccagcgggagtaagaatatattcttcagggctggacacagatgatgtctcaacttatccacgtagttatcctatagttttaacagagggagatggctcaaaaatttatgtcagttgtattgcatttcgggatcctatttgtgaagacataattgaggcttaccaaattccggcgaattcgtttgctgataaatgcatctgccttgtgtcccattctcctagtttccaagtccttcgtgatgcccttgaggaaatatttgttctttgtttttctccttcagggtgcagcaagcctttgtgggacataatatctcatatggtgtcacatgtgacattacccacaccaggaaagaatcgtgtcttatttgccattgagaattgtcttctttctgcggaagctcctccaaaagaatggcttccccatgctgatatatcattccagccattggtgcagtgtctggatgttgataaactaatacttctctttacagctgtcctgcttgaaagaaggatattgcttcgatcaaataagtatactctactgactctagtttcagaagccatttgccatttaatatacccaattaggtggcagcatgtctatattccaataatattctctagtggggttgattacattgatgccccgacaccctacatgatggggcttcattctggtgttgacacatctgcagtgacaatggatggtgtagtggtggtagatctcgaatacaaccgtataacaataacggaagaaattcctccaataccagaaactgaacataactttcttcgtgttgagattttaaaattactacaacccaatgtcatgggaattgatttcatgaaaatcaatcttgccaatatgggtgacctaagggctggcacaaaatcatggagtcaggaacatgatttccaacttaggctgatatttttgagattctttgcacagatcctgagtggttatcgtaacttcattgatactacttcagcgactggtttcaattctcaagcttttcttaaaaagcgttctcgagcaactaaccagcctgtcgactccatgtcaatgattatgcagtttttggagactcaagggttcttggattatctggagagatgcaacactgcagaagaaaatgcccacaaccttctcgataagttgcaggatgcaaccggaagaggacaaaaccctctaaccatatttccttctcaagtttctgatcctgagattataacaatagccaatcctgagattgaaggactagacaatagacactgctataagaggtttccagcaaatgcaagaacagaagaacaagaagaaaaacgtaagtcgattctagcgttagctagtggggctagtaagcaagtaccgagttctccttctatccgagtaaatgggggcccaaaggcagaaagtctgagcccaagagagagggcggctgagagagaaaggatggttctggacataaaagtgaagctccagggactctggcttcgtcttctgagactaggggcaactgaggatcctctctcatcttttgaatatggcaccatcctagctttgattgagtctgacgcagaaggcatcgggggaagtggctttgttgaatgcatcagagagcatattcattcgggctggcaatgtcgcttgactgatgaacaattcattgctgtaaaagaattgcttaagatggctataactcttgcgaactctcgcaacgacctggcgaccattagagatgctcttgaagtttctgctgaaatgtacagaaaagacccaaacaatgttcaagattatgttcagcgccatctattatcattgtcagtatgggaggagcttcgcttctgggatggctacttcgaatatttgatggaaaattgttcaaataagtcagcaaattatgtaacgttagttactgcacagctcattctcatggcaactcacatggctggattgggattacctgacattgactcttggaatatgattgagaaaatagccgagagaaacaacttgggttataaacagcttatcaaacttagagcattgctcacacatctgcaacaactccggattggctattggggggttgctacagggaaaagccaaccattgcagtcatatggcatggcttcacctcatgcgatcgatgtgattgatgaaagccaacaacctgctgaagcatctgggttgggccgaagttgggtgcaaagtatgtttagcagagacagaagtttaagagccagctctttcaaccgagctagtgatggaaatgctgttgctgccacgggcaaaaccgaaatctcagctgcacaaaagaaaactcaaactaacatgaggacccttagagggcatacaggtgctattactgctcttcattgcgtaacaagaaaggaggtctgggatcttgttggtgatcgtgaagatgctggttttttcatcagcggaagcacagattgcacggtaaaaatttgggatccaagtttgcgtggttctgaacttcgagcaacacttaaagggcatactagggcaattcgaacaatcagttcagatcgtggcaaaatagtttctggagctgatgatcagtctgtcatagtatgggataagcagacttttaagcttttggaagaactgaagggccacgaggcaccggttagttctgtccggatgctctcaggagaacgtgtccttattgcatcccatgatggtactgtgaagatgtgggatgtccggactgatacttgtgttgttaccgtgggtcgttgccaaagtgctgttctctgtatggaatatgatgattccactgggattctggcggctgctggaagagatatcacggcacatgtctgggatattcgctccagcaagcagatgttcaagcttcaagggcatacaaagtggataagatcaatgaggatgaccggagagaccataataacaggtagtgatgattggactgctagagtgtggtcccttaaccggggaacatgtgatgcagtgttagcatgccatgctggtcccgtactatgtgtggaatactcaccttcagataaaggaattatcactggttcagctgatgggctcatacgattttgggaaaatgaaggaggaataaaatgcgtcaagaatcttacacttcacacagcatccgttctgtccattagtgccagtgatcactggctagcgattggtgctgctgataattctatgtctctttttcatcggccacaagaaagattcggtggcttctcaaatgcaggatcaaaagttgcaggatggcagctttacagaactccccaaaaaactgctgcagtggtgagatgtatagcatctgacctggataggaaaagaatatgtagtggtggtcgcaacggactcctgcggctttgggatgcaactacaagcatctaggactgatagatgttcatgtgaaaaggcaattgacatgatgttgcatgccattttccttttagctaggaatttatgtgctatttagaggatgcgaaaggagccggactttgttctactgtttctttatcatctaaaaaaccctgcccagttgagtatatgtttgacgtcgtgtaaaattttgtttatattttcgggttcagatagccttacgtggctacgattttgtaagaactatgagaaacttgggaagttctgtactactaccagtgcaaatgtttgttttagtacaacattattttttatgtgcatattcatcgtatgaacctgcactagtgcaaacatgactgctagcatatgc

SEQ ID NO: 18574 - DNA, 3309 bp, Zea Mays
ttgtttccagcaaatcgcccgagttgtattactagtattttattcggcgcgtctccatcgcgaggccactcggctcggctgctcggctccggatcggcgtctctgctactaaactaaaataaaataaaacgctaaagcttatcgcaactcgttctctcggctgctgctcctgctgcttgctacttaaacaaacacatctcagcgtctcttgcgatcgctcaagagccaccaccaccagtccaccacgccccctgcacgcgacccgaggccaagaatcgcttccgttccgcgccgcctcctatatccagcgagcggcgctgccagcccacgcctcgctcgaatccctcctccttcctggaaacggggtttgctttccctgccccgccaaatcctttcttctccatccagccggttcctacccatcctgccggctgcggctgcggcagcggctgcctggcgctgccgtgcgttgcagagcgagggcgaggcggaggtggccaaatgccggtccaggaccgggtcgtcgtcgtcggcgagcgcgcgagactctgtctcccccctgccgccggtctgtcgaggtgtggtagtggtagtggccgtcccagctggagcacctgagacgtcgttgctcggtcgtccggattgatttcggccgaaagctgcttgtgggtttttttttccggaaagggagggagggagggagggcagccttttcggttttctgattgttactagttgctctgcggattcgattcccttgccgagatttatctcttcgccgccggagactggtggacagcagatcctcttccatctccgccggccgttcattcttaagctgcctgcgaagctttttcttgagaccctctccagagtactgttcgccggatcttggtttggagggcgagcggtgaaagatcgaatccttgtttggaggttcagcggcaggcagctcgctgtgacgtcgcccgtgcgggcatggtgtccagatcctactcgaacctcctggagctcgccgccggcggcagcggcggcgagccgctgccgtcgctggggcgccgccggataccgcgcgtcgtgacggcctccggcattgtgccggacctcgacgtctccgacgccgcctccgccgccgaccagtcctcccacgcgccgcgggagcgcgtcatcatcgtcgccaaccagctccccgtccgcgcctcccgccgcgccgccgccggcgccggcggcggcgggtgggacttcgcgtgggaccaggacagcctcctcctgcaggtcaaggacagcctccgcgcgcaccacggccgcgcggacgtggagttcgtctacgtcggcggcctccgcgacgacgtgcccccagccgagcacgaccaggtcgcgcacgacctcctcgagggcttccgctgcgttcccaccttcctgcccgccgacctccgctcccgcttctaccacggcttctgcaagcagcagctctggccactgttccattacatgctgccactgtcgccggagctaggcggccgcttcgaccgcctcctctggcaggcctacgtgtcggtcaacaagatcttcgccgacaagatcctggaggtgatcagccccgacgaagacttcgtctgggtgcacgattaccatctcatggtgctccccacattcctgcggaagcgcttcaaccgggtcaagctcgggttcttcctccatagccccttcccgtcgtcggagatctacaagaccctgcctgtgcgtgaggagctgctccggtcgctgctgaacgccgatctgattggcttccacacttttgattatgccagacacttcttgtcgtgctgcagcaggatgctcgggctcaagtatgagtcgcagaggggctacattgctctggagtactatggccggacagttactatcaagatcttgcctgtgggagtacacttggagcagctacggtcagtcctcaacctcccggagcttggggtcaaggtggccgagcttctgaaacagttctgtcatcggaaccgtctgctgttgcttggtgttgatgacatggatatcttcaaaggaattagcttgaagcttttggcgtttgagcagctcctaatgcagcatccggagtggcggggaagggtggtgcttgttcagatcgccaatccagcaagggggcggggaaaggatgtgagggaggtacaggaagagagcgatgcaatggtgaggcgcatcaacgacgcgttcgggcagccaggttaccagccggtgatactgatcgaccagcctctgcagttctatgagaggatggcttactatgtcgtcgcggagtgctgtttggtcactgcagtgagggacgggatgaacctgatcccatacgagtacgtaattgctcgacaagggaatgagaggatagatagtattctaggccttggtccggcttcaaggaagaagagcatgcttgtcgtgtcagagttcatcggctgctcgccctccctgagcggcgctatccgtgtgaacccttggaacatcgattcagtagccgacgcaatggactacgcgctggagatgccggaaggggagaaggtgttgagacatgagaaacaccacagatacgtgagcacgcacgacgtcgggtactgggcgaacagcttcctgcaagatcttgagcggatttgcctcgaccataacaggaggcgttgctggggcatagggtttgggctgaagttcagggttgtggccctcgacccaaacttcaagaagcttgcggtggagcacttggtcttggcctaccggaggacgaagaagcgtgtcattctcttagactacgatgggacgctgatgccgcagacttcgctcggtaagagtcctacctcaaggacgatagacatgttgaacagcctttgccgcgacaggaacaacatggtcttccttgtgagcgcaaagagccggatgactctgaacgaatggttcttaccatgtgagagccttggactagcagctgaacacggctgcttcctcaggctgagaagagacgcagaatgggagacatgcgttccggtgatagactgcagctggaagcagatcgcagagcctgtgatgaagacctataccgagactacggacgggtcgactattgaggacaaggagactgccatcgtgtggtgctacgaggacgccgatccagatttcggatcctgccaggccaaggagctccacgaccatctggagagcgtgcttgcaaacgagccggtctcagtgaaagctggacccaacctcgtcgaggtgaagccacaggaaaatgctggcccttccccccggtttcgc

SEQ ID NO: 18575 - DNA, 1722 bp, Zea Mays
ggaaacggactaccagcgctgagccgttccgtttcttttcaatcttggcgttttgtctccattcaatagggaaagggatgtttcgcttgaggctttcctttgtgcctgtgtcttctctgtagctttcaagagaataaaaatttggagcttctctcgcaccagcgtcctttccttcttccttggtttcatgctgacaactagggctgatcttcaggacggcctgttcttggttcggttcctgagagcgattgatagcgccagacggagtttcttctttaggagtcgtgcactatgggtaattgctggtttaaggggaatccatactttaacagggtttcttccaatgcaaccaaagcagaatctcccaaaattcagagcccctcggagagaactgaaaaggaggattgccagctaccatccaacccgaaagaggcaagattcgttactaggcggtggtggatttggcagagtctacaaaggttttatcaccaaggatctccgcgaagggttagagatagaagagcccacaagagttgccgttaaggtccatgatggtgacaatagcttccagggccatagggagtggctggctgaggttatatttcttggacagctctctcacccgaatttagtgaagttgatcggctattgttgtgaagatgaccacagggtccttgtttacgagttcatgcctctaggaagtgtggagtctcatttgttttcaagggttatggtgccacttacgtggtcgatcagaatgaaaattgcgctcggtgctgcgaaaggacttgcttttctgcatgaagctgagaagcccgtcatctatcgggacttcaagacatcaaatatattactagatgaggaatataatgcaaaactatctgactttgggcttgcaaaagatggaccagttggcgataagtcccatgtttcaactcgtattatgggtacctacggttatgctgcaccagagtacattatgacagggcatctaacggcgatgagtgatgtctacagctatggtgttgtactactggagctcctcacgggccggaagtcactggacaagtcccggccagtcagggagcagatgctggcagactgggcactcccattgttggcacagaagaagaaggtgcttggcatagtagacccaaggcttgccgaggactacccagtgaaggcagtgcagaagacggcgatgctggcgtaccattgcctcagccgcaacccaaaggctaggccgctgatgcgcgacatcgtcgcgactttggagcctcttcaacagctggaggagacccctggagacagcgtggcagtgacacttgaagggacttgaagcagtgttccattcacagctcacatcacagtcacacacagctctggaaaactcgggtgccacgtacttaactatgcatgataatagtagctagctagtgttcttgatatgcaggatgatttcttgattgtttaattaatccatggagacagtagctttgttcagcagaaagttagtgtgtatctcagtaggacggttcatgtgtgtgtatccaggtgttcagtcctggcgtagcgaactccctggcatttcggatgcgggcaagtctgtgcaatctgtatttgcaatgcttgttgcccgcagaggaagcttgcttaccagtgtttgtaacctagtattgtgcagttcatgatctatgcatgttgaataatgtagaaataaaa

SEQ ID NO: 18576 - DNA, 3050 bp, Zea Mays
ttcgcggagaacagcgcgtcagcgcctacggcttctgcttgtctctcccgttccactccaaaccctaggggcgaatctccggctaatcggcggcgggcgcagccacgctgtctgtgcagggcttgtgcggccttaggacgcaggggcgttgcttggggctcccggtgggtggctacgaagggctgtggcggcccgcggccaggggcaagtcggcagcggcaagcaaccggggtgctgggcgtgggtgggctgctgggacgcctgcggcagcggtaaaaagtcgagcctcgaccgtcctgaggcaggagcagagcagctgagctggtttggtactctgttgattctccattggagacactaggtgtgccaattttgatggaaggtactaccatttctattgagattgatggggaggccatctgtcttgacagtgtcggagataatgaacaagaagctgcggagaatggagaaatgcaccaaacaatttacactgatgaaaatggggaacaagtagcctttgacaaccaagaacaggggagggaggaagatctggcaggaaatggagaagaggatagggaccataattctatcattccaagccgtgaggagttgactgaagaattaagaaataaagtcgcatatagtgaggaagaagcttacaggttgtactgtgactatgggcaccgcatgggctttagtgttcgaaaaggaaagcagtactactttactggaaccaaaaccatccgtactaaagattattactgctcaaaagaaggcttgaaggatgatgaacagcttactgaagcaaactttaataagccggagaccagaactaattgcaaagcgatggtccgttttagggttgattctgaaggtcaatggcgagttattcaaataattcctgaacacaatcatgagctagttcgaccggaagaaatacacttactgagatcagtgaggactctttctgttccgaaatctggggtgctgaatgcaatggtgaatgctgaaattcaagcaatgcatgataatttgcatataaatgaagatggtacagaatgccacagccaacttagcatccgtagttacacactgcttgaaccaaaggaatgtgaggcccttgttggatatttcaagcgcagaacaaatgaacaatgtatgttctattgggatgtagaagtagatcaagaaggccgaatgactaattttttctggagggatgggaaaagccgcgttgactatgacagtttcagagatgttgtgatatttgatacatcatatctcaccaacaagtataatatgatatgtgctccatttattggtttgaacaaccaccgacaaaatgtcatgttcggctgtgcatttttgttagatgaatccttaacatcctatgaatggttatttaagtcattcttggagtcagtgggtggtcgtccccctgaaacaatctttactgatcagaatgaatttatctccaaggcaatcgaagttgttcttcctgggacacgccattgtctttgtcaacagctcattgaaaaaaaacttatgtcccatttaggcagtatcaatgattctggaacacttcatagcttgttttcaaagtgcatgagagaatgtgagtcagaagcagaattagatgaaacatgggcgatgatgcatcatgagtataacatgcaggaacacccgtggctcactgatctgtaccagcaaaggcataaatggtgctcggctcttcataaggatgcatttgatggtgggattgaatcaatggataggaatgagagtttgaacaatgttttgagcaacattgacgatgaatcagcttcgctttccacttttgtccttgagttggataaacttgcagggagttggcgtaaaactgagtctttagaggacattcagtgcaaccaagctgctccggagtgtacagttaagcataacagaattttgcaacatgccgctgaagtttacacacataaggtctataagtctattgaaacagattttctagatggatgtagtgctacttcatatcaggcagctcagtgtaatgaaacattgcataagtttgagttccttctggaaaatagtccaaatgtttcggtagttttccttaacacctctaccatggagttgagctgtacttgcaaaaaatttgagaccatgcgtatactttgttcacatgctctaaatgcacttgttctcaagaatgtagataggattcctgaaaggtatattttaaaccgttggacaaaatatgccagaaaaggaacatatccatttccagttgatgaatttgcagaacaagatcgcacagaagttgcatttgtgtaccgtaatagggctatgtggtttgtttatgatctgctgactaagagcaaaagtcatcataatacaagaaaactaattctggatgcacttgaaaatggagaaaaatcactggaaagtatgtgtgacctcaaaagattgcatatgaataccttggggaaagagaaagatggaagcagggttgaaaagagaaagaaaaaatcaactaagcaagagaaacattcaagaaatgttaaacaagcggttttgccccagacagctgacccggtttttgttgatccaccaaatcaagatcaatattttgctgcagaagatattgcatcaaaccaatctgttggtagacctttcttctaccagggatatcccatgactgttgtttcaacaagccagattcaggggcatactaatatgcattctgagcctcagtgtgcatctcaggaatattctgcttatggcacagttcagccaccatcacaatttggtggtggaagaaatttctgaaaggtgtagtgtcattgacatgtgaatatctgaagctcatatcagttctactgattgttgtatgtgaatgacttgttcatttaggcagtagacacccaacctagcaacagaagaaacagtttcaaaggaggtcttaagtttgaatcactgatagagttgaaggcttgagtcatatatccactatccaggaaccaagcctggtgcatgaaggccatgcaaat

SEQ ID NO: 18577 - DNA, 2662 bp, Zea Mays
ccgagagccacaagcccgcaagcaacaaatccgcgctccctgattcgccatcctcttcaccaagttaggcgacgactggcgcccatcgtcgattccccgttctccgtttccgtctcgcgtgtttggtgctttcgatctccccaaggcggcaggcggcagcgccgtacgcgttgcgggaagattttggttggtggattgttggtggcggctccactccgtcccagtgcactggtccaatccaaatggcggccaataatagcgacccgatccaggatcagctgggggaaggaggggcgggcgtgaggcacgaggctgaggaggaggaggtgggggaggagacgtcttctgccgcggcgcaggcgaccgcgacgacgatgctgccccggtcgagctcgcggccgcagctggacctcagcggcgcggcgatccacgggacgctggaggaccgtaaccctaccatccttttgcccaaccagtccgacgacatctctcacctcgcccttgacatcggcggatctcttataaaactggtgtacttctcgcgacatgctgagctctccactgaagataagcacaagatatccacaaagagaagacttgggatgtttaatggtggcaggagaagctacccgattcttggagggaggctccacttcgtaaagtttgagactgggaagctaaatgaatgtttggacttcatttcttccaaacaactacatcgtggtggaattgattcaccttcatggcgctctggggctcagtctgatgacattgtaattaaggcaacaggtggtggagcattcaagtatgcagatgtcttcaaggaaagattgggagtcagccttgaaaaggaagatgaaatggactgtcttgtggctggagcaaactttttgcttaaggctatacgtcatgaagcttttacacacatggatggccagaagcaatatgttcagattgatcagaatgacttgtttcccttccttcttgttaatgtcggatctggtgttagtataatcaaggttgatgggcatgggaaatttcagcgagtaagtgggacaaatgttggtggtggtacgtactggggattggggaggctaatgacgaagtgcaaaagttttgatgagttgctagagttgagccagcgtggagacaatagcaccatggacatgcttgtaggagacatatatggtggtctggactactccaagattggcctttcagcatctacaattgcctctagttttggaaagataatttcagaaaacaaggagctatcagattatagacctgaagatatatcgctctctctgttacggatgatttcatataatattggccagatttcctatcttaatgcacttcgttatggactcaagaggatattttttggtggattcttcatccgtggtcatgcctacactatggatacaatttcttttgcagtgcatttctggtcaaaaggagaggcacaagctatgtttctgcgccatgagggctttctaggagctcttggtgcatttatgagttatgagaagcatggtcttgatgacttaagggtacatcatttggttgaacgcttcccaatgggtgctccatatgttggtggaaagattcacgggccacctcttggagatctcaatgagaagatatcatggatggagaagtttgtgcaaaagggtactcagattatagcccctgtacctatgggagttccagctacgacaggtatgggaggctttgaaaggccgactgctaagggtgacatcttgcggtcagatgcaagtgcagcgctaaatgtcggtgttctccatcttgtacccacattggatgtatttccattgttggaagatccaaagacgtatgaaccaaacacaattgatcttgaccaggatgagttcaagtactggttcaagattttgtcagatcattcgccggacctcgtggacaagttgctagtgaaggtgggactgatgatgccaaaagacggggtgatgcatttgcacatgccttttctgctcatctggcaagattgatggaggagccagctgcttatggaaagtttggtttggccaacctgttggaattgagagaagaatgtctgagggaatttcagttcgttgatgcatatattagcatcaagcaaagggaaaatgaagcttcactggctgttttaccggatcttctgatggaacttgatagtatgaatgaggaagctaggctgcttgcactaattgaaggtgtccttgctgcaaatatatttgattgggggtctcgagcttgtgtagaactttatcacaagggaactataatagaaatctatcgcatgagtcgcaagaagatgcaacgtccttggcggattgatgactttgacatgttcaaaaagagaatgcttactgataggaaggaccaatcatacaaaagagcactgctttttgttgataactcaggtgctgatgtggtccttggaatgcttcctttagctagggagcttttacgccatggaacagagggagttcagacccttgcgcaacttcttattggaagggccaataagggtcaagcttacttcctcccaccagtcatcaaaggaagtagaattgagactaggagtgagatgctgcaaaccgacagctttcaggatattaaaccaaacttcccttga

SEQ ID NO: 18578 - DNA, 1073 bp, Zea Mays
cgggcgagatattttttgccaagctggcaggcacatgacacatcgccccagccccaagtccaaagccgcgagaggcaggggcgcagcaaaaccctagccgccttcccgtccttttcctttcataaaccccaagccgcgccgcaatagctcgccccctcgttcgccgcctctcctgctcctaccgcagctctccctcaggtttagtgttcgcaatggcggccttcaacaagcttggtggccttctaaggcacagtgctctggtgagcggtatcactggtggctcttctcctgcagtgttcaatgctgcacggctcatgtctaccaagctatttattggtggtcttgactggggtgttgatgacgtgaaactaagagaagcatttagcagctttggagaggttactgaagcgagggtgatcacagacagggagactgggaggtcaagaggctttggctttgtgaactactccgacagtgatgctgccaaggaagctatttctgcaatggatggcaaggaaattgatgggcggcaggtacgtgtcaacatggctaatgagagacctgctgggaaccgtggtggtggcggctatggtggcggcggctatggaggtggtggctacggaggtggtggcggctacggaggtggtggctatggtggtggcagccaaagctatgatgcttgaggggggcaggatcctattaagtgcattatcaaccaagatatttgaaataatgaactttaggacttggtatgacgttttatgttaagcattgtcaggttttgctattcgtgttatgctgaattgttggaactcctagatgcagaatattacgtattggttttggttccttcgagaagtgcaaatgcaagacgcatctattcccattgagtgaatacaggactaccacatgaaaaaaaaaaaacacgtaaaaacagagcacctgggctttaacctacacggggaattgagcaccgaaaccccaattcccccaaccgcgacacgcgccggagcgcgaacggagagagcagcggaagctccaaccttcataaagcgcgtcggggtcgagggagg

SEQ ID NO: 18579 - DNA, 1219 bp, Zea Mays
catcgtcctcgctaaactgatattccgcgcgtgtgtgcttgcaggcactggcagccaggaggtatcggcgacgagatactgcagcgcgcgtccatcgcctcgtcccctccacgctccgatcccttcgcctcctccgcgcctccctccccgtccccctccttacccccaaaccctcggcgcaagtctcgcttccgcgacgcccctacccccgattctccactcggtcgcgccacatacacctccacctcgcccatctccgccacgcattctcgccaccgccgccacgcctccgcttcctccgcccccgctttcgcggccgatggatccggtgacggtgtcgcccgcctcaactccttcctccgtcgacagcgtgccatggtcgctgacctagcggcaggggaccgccctgcgtcgaggtccaccaagctcgtgctctccgacccctccaaaagtctgagctcgattgtggcggcaatatgctacgcgtggatgcttcccagcaagggtgatggccaggcaacggtgccggtggtgaacatgagccggagcaggatggctaggtgcaggcaggcggcttggctcctgtatcacgtcggggtcgacgcctcagcgctgctcttcgccgacgaggttgacacggatgggctaataatggaccagcgagttaacttgcttgtggtggggcaagatattttgaaatcaaaagctgaggttggctcagtttgcacaaccctgacccatacctattgtgaggatgcttatagcctgcttcaaaacttggacataaagaaacttctgcttgcaggtatcctgttagatacgaacaacctttccaagaagtgctcaaatagagattcagatgcagtgcagttgcttttgtttggaacctctgagcatatgaggcatgaattgtttcagcaattgatgcttgatcacaatgatcactcctttgttgagtatctgaagaacacctacagatattcaaccataaatggtaatgaggacagtcctccagagcaaaaacattcaacctcagcatcagggtcatcccaagatgttaaaaaatctaattcaactaaccaaaggacatcacgtggaagtggtggaaaggcctcagatgaagcctctcgggggaagaataagttcttcttggcgaatggtttggttttggttcaaataatccttttatcatttgtattagtttggtaacattttaatg

SEQ ID NO: 18580 - DNA, 2492 bp, Zea Mays
gtaggcgtcctcgccgtcctagcgtctgcctttcgacgctgctgccgtggagcgcagatcaaccctgactctgcccgatttcttctctcgttgagtgtggaaaaaccttgcaatgaaatggaaaaatgttttgaaggaaatggcaccgctgaggtccacaggcagattctttcaacgccatccttcagctatctgcttactgattttcctacttgtgttgtacaagtacttcttcggctggttcaccctcatcgtcaccacatcacctatcttcctaatcgctggcatctttcttggaatcgtcctggtgtacggtgaaccgaacaaccctgaaaaagatcatgtctacaaaaaaaatgataatactcggagtttgaatatccatgatagcagcaaatctattaggggtgtacctcttcctagaattccgtctggtgaagagagagcgccgaagcacaaaaacagtgttaagaaaattaggaagcagtctcgtggtgtagcctcttcttctgaaccaggatcaagtgaatcaggtggttcagatactgatattgctccaatgctccatgcatttcatcatcttaggtcgggcagcaattcgtcaaattcctctcaagatggtgactctgacagtagcaccgaagatacaacagagaatcaacagggcaacgacggcaggatatcccgcgaggggaaacaacatgttaaagttgttgcatggactgctgatgaccagaagaacataataaaaatcgggtgcttggagattgagcgtaaccaaaggttggagaccctaattgctaggcgtcgggcaaggaaatacgcagacaggaacttggcagagtttggcagcactgattccttacccactattgaagagctatcaaagttcaatgttcaaattcctgctgtttttgctcctaggaaaaatccttttgatcttccttacaatgaagataacttcccagattctgctccatctgcagtgttggaaacgagatacccatttgatctaccaagtgagcaagcaaacgagagcagctcttatggagccaactcaagccatgatgaacctattcccgtagcatgtcatttacagagtgcactgttgaggaggcatgagagcttcactgaaggagcaccattccttagtgactttttgcaagatacacagccttcccgattcagaccatacttcatgacggaaaaaatggctaacgaggaaatgacagatccagttcttgaaggagaaactagtgaaaagagcaactctaaggccagctctgctcaagactcggatagtacttcttcagttgctgaccaagaaagccagaaggatgttctagaggattgctcaaaccaaggacaacaatcttctttcagtcaaacagaggaacatgcacatatagctcggcatgcaagggaggtttctctttcccttgacatggaaccacctgtcttaattagtgattcctctgatgatgacatatcactgtctggtgaacatataaatgattgggaggaagcacaacagagtgaaaattttagtttgtcccagaatacatggcaagaggatcctaatgtcatgcaacaccatcaagaaatagatatcacaagcaatggattgaatcaaatgtcaccacattcgaatgatcttgagttgacgtcgtcatcaactgaaactactgatgatccttttgaagtgaatgacattgaaccaccagctaaggaagtggtggtcgttgatgatacccacgttgtggatcctgtatatgattcaagtccttcgggaagcgagaggcctgcacctactggtttagtaattgacggacctgtcctaaaagatggtcatgcttgtactcttgttgttgaagcaaccatcgaagaagggggttcatcatcaagaatggaggtttcttccagtgaggtagctggacctagtttgagttctgtggagcaaagcgaatccccagagaaagaagcctctgagataagagagcagtccatggttggccatgtcgaagcacatggaggttctgtcagccatgctgatccttcagtatctgatataagttctcagccgagtactgaaagttcaacaaatggtgattctggcagtggtgtaacaccatccttcacaaacgcagttctttagtttcttcataaaaaaaatgacagcggcaccgatcgagcatcatcaggttggtcgtcttcagcagtacttcgagctaggcgacttttgtgtggggcgagttcattgctgaggaaaccactgggagggtatatgtttgttgcaggaaatttcttagtgcttcaaagggactaggcaacattagcattattagcactgcactgtaaaaatggctagatatggttgttgcttaatttggccagcactctcgtttgtgaataccttgtggatccgacagtcaattttgtgccgtaaattaattgttaatttgctgcttcgagtaccttagtctatggattgc

SEQ ID NO: 18581 - DNA, 136 bp, Zea Mays
aaagggtaaggatccttttcaactatagatggccaagcgagacatgctaaatagggcgtcactaagcatggcacgacctgtagtgcttcggcacggcacatgcacgaatcatataattccagtgccggtacgacac

SEQ ID NO: 18582 - DNA, 131 bp, Zea Mays
tggtagggttgtgccaagcccaagcaatagtgcaacgcttgggcgacacaggaaccttagtagcaagctacataatagattctccctataaaaaataaatttaatatcattgtggatacatgacccacata

SEQ ID NO: 18583 - DNA, 2152 bp, Zea Mays
ccgccagcagctagacggccctatcctcgctcccgcggccgccgtctccctatcctgccgcggcggcgagcacgtgcggagctgcgggcgccaccagacaaacccgctcattcgttcagcccccctgcccggagcaatggaggcgctgcgggcgtggagggcctcctccaatctcatcggcttcgcggcctcccgcgccgccgcctccgcttcaaggccccttggcctccgtatccgctgctgctccgcggccgccgccaccacgaacccgccggcgcagcctcaggaccgccgacgccgtagtgcctcctcatccgcctccacctccgaccgcgactccatccgcgccatccgcctcaaaaaagttgatgagctcagagggaagggttatgagccgtacgcgtacaggtgggacaggactcacacgaccaaggcgcttcaggaacagtacactcatcttatgaacggtgaagtctgcgaggacgtgtcggtgtccgttgctggccggattgttgcccgaagagcatttggaaagcttgtttttatgactgtaagagatgatgcggggactgtgcagctttattgtgagaaagacagccttacggaggaccaatttgagcaactaaaggcgtttattgatattggtgatatattaggtgcaagtggatccattaaaaagacagagaaaggggagctatctgtttatgtgaaaaatttcgaaattctcacaaaatcattactcccactaccagataagtatcatggattaactgatgtggacaaacgttatcgtcaaaggtggtttctgaaatccgcaagacaatggaatcatttggttttattgaagtcgaaactccagttctacagggagcagcaggtggtgctgaagctagaccttttataacctaccataactcacttcaaagagatctttacttgaggattgcaacagagctgcatttgaaaaggatgttggttggaggacttgagaaagtctatgagattgggagaatattccggaatgaaggcatttctactcgtcataatcctgaatttaccactattgaaatgtatgaagcatattcagactatgaaagcatgatgaatatggccgaagaaattgttactcgatgtgctatggctactcatggcaagcttaaggttgactatgagggaactgaaatctctctcgaaagaccatggaggagggagaccatgcattctcttgtcaaagaagcaactggaatcgactttaacagctttggacaagacgttgaatctgctaaaagagctgtgaggggactgccaggtttcgttgtagggaacagtgaaagtacttcactgcaagcctgttcatctgttggacatgttctcaatgaggtgtttgaaacatttgttgaatctactcttgtacaaccaacatttgtccttgactatccagttgagatatcaccattggcaaaaccacatcggagtcatgttggccttactgagcgattcgaacttttcatttgtggtcgtgagattggcaatgcgttttctgagctcacagacccaattgatcagagaagccgttttgaaaatcaaataaaacagcacaatgctaagcgtgctgcaatggctaaggaggtcaaatctaccgagggtgaaggcgacgacgattactcgtatgaagtttctttagacgaggacttcttgacttcattggaatacggaatgccaccggcatcaggaatgggcctcggtatcgaccggttagtaatgcttttgacgaactcttctagcataagggacgttattgcctttcctgtcttgaagattcagcaatagatccccttcattctgtgaagaggcgtggctgctgaagaaaacaccagcagccttccttttgtgcttggttcagtacagcaggttttatatctgctgacctttttatagctcatagatgtggccatttattatttgatgatgtaattgagatgtactatagttcagagtccaagccgatattaaaaactttatagatgtttgaataataatggaatccacattttacaattaatgtgctgcaaaacagctatctccactggatactctgattcttcagtgacatggttgccttgaactaccatttaagagattctttggtcta

SEQ ID NO: 18584 - DNA, 1438 bp, Zea Mays
aacaagtcagagcgcgaggccgtggtagctcttgcttgcttccctagccttatagctagcaaatgtatgcaacctgtcaggggcttgactccttgctgggcatatatatatataggacgtgtgcgctagtcgggcgggatacggtcgctagcagccatggcatcatcgagtgctgctctcgccgtcctgatgctcagctgggcggcggctctcgcggccgcgtcgtcgccggtgacgttgttcgaagccggctacatgccgctgttcggcggcggcaacctagtaccgtcgcccggcggccgctccgtccgcctcaaacttgaccgccacaccggctccgggttcgtgtcccgatcgtcttaccaccatggattcttcagcgcttccatcaagctgcccgaccatcacaccgccggtgtcgtcgtcgccttctacactacattatttatagagtggagtttgaaaaagaaagtgagatataagctgtcgaacgcggacgtgttccctggcaaccacgacgaggtggacttcgagctgctgggcaaccggcggggccacgagtggcgcgtccagaccaacatctacggcaacggcagcacctcccgcgggcgcgaggagcggtacctcctccccttcgaccccaccctccggccgcacgcctacgccgtggcctggacccccacggccatcctcttctacgtggatgggacgcccatccgcgaggtggtccgcgtgccggccatgggcggcgacttcccgtccaagcccatgtccgtgtacgccaccatctgggacggctccgcctgggccaccgagggcgggcggtacaaggtcgactacgccttcgcgcccttcgccgccgacttctcgtcgctcgtcctgagcggctgccccgtcgccggcggcggcgacgacctcgcggccgccgagtgccaggtggccacgatgacggcggactgcgccgtcatgacccccgccaagcgcgccgccatgcgccgcttccgccgccggtacctcctctacacggtgtgccacgacatgtaccgctacaacggcaccgtcttccccgagtgcgacgccgacggctcggaacgcgacgacttccacaagtggggcgagtccaagcgcgtgtctcccagcagccgcgggtacaagcagcagcagcagcgcgcggacaaggccgtcgccgttgccgcgcctggccggcccgacacgtggccgaccgtagggacattacgtgtcgactaataatgatatgttacggttattaggagattgatggatttatattagtggacaaatacaaacaagcatagctggctgaaccgctgaagtacatggtactgctgcaatggacacacattacacatagatatagattccatatacatatgtagtgtacacttaactcttttcagtctgataatatatatactcc

SEQ ID NO: 18585 - DNA, 3259 bp, Zea Mays
tctgtctcaacgcagcgttgcccctaagttactttcagaatgttacaaaaaaccttgtccttgcgggtgtcaagtctgtaaccttacatgatgatggcaaagtcgagctatgggacttgtcaagcaatttcttcctctcagagaaggatattgggcaaaaccgtgctcatgcttgtgttccaaagctacaggagcttaacaatgctgtcatcatctctaccgtaactggtgatttgaccaaggaacaactttctaactttcaggctgtggtctttactgatatcagcatagaaaaagcagttgagtatgatgaatactgtcatagccaccagccgccaattgctttcattaagtccgaagtttgtggcctttttggcagtgttttctgtgactttggtcctgagttcactgttttggatgtcgatggcgaggaaccacatacaggaattgtggcatcaatcagcaacgacaatccagcacttgtttcttgtgtggatgatgaacgtctggagttccaggatggtgatctagttgttttctccgaagtgcatggaatgaccgaactcaatgatggaaaaccaagaaagattaagaatgcaaggccttattcttttactctagaagaagacaccacctcatatggcacttactttagaggtggtattgtcacacaggtgaagccaccaaaggttcttaaattcaaaaccttgaaggatgcaatcaaggagccaggagaatttctcatgagtgatttctccaagtttgaccggccacctcttctacatttggccttccaagctttggacaaatttaggtctgagttggcacgatttcctattgctgggtcagatgatgatgcacagaagctgatagaccttgctattagtattaacgaaactcttggtgatagtaagcttgaagaaattgacaagaagctcctgcagcatttcgccagtggttccagggctgttttgaatcctatggctgcaatgtttggcggtattgtaggccaggaggttgttaaagcatgctcagggaaattccatccactttaccagttgaaccgttggagcctagtgatttgaagccagagaacagtagacatgatgcacaaattagtgtctttggggctcagcttcaaaagaaactggagcagtcaaaaatcttcatggttggttctggggctcttggatgtgaatttttgaagaaccttgcgttaatgggtatttcttgcagtcaaaatgggaagctgactgtgacagatgatgatgttatagagaaaagcaatctcagtcgccagtttctcttccgtgactggaacattggacagcccaagtccacagttgctgcaactgccgctatggcaattaatcccgagcttcatgtggaggcccttcagaatagagcaagtcctgagactgaaaatgtgtttaatgatgccttttgggagagcttggatgctgttgttaatgcattggacaatgtcactgcaagaatgtacattgactctagatgtgtatatttccagaagccacttcttgaatcaggtactctgggtgccaagtgcaacacacagatggtcattcctcacttaacagaaaactatggggcatccagagatccaccagaaaagcaggcacctatgtgcactgtacattcatttcctcacaatattgatcactgcctgacatgggccagatctgagtttgagggtctacttgagaagactcccactgaagtaaatgcttttctgtcgaaccctggtggatatgcaaccacagcaagaactgctggtgatgcacaggctagagaccaacttgagcgagttattgaatgccttgagacagacaagtgtgagacattccaagattgtattacctgggcccggttgaagtttgaggattatttctccaaccgtgtaaagcagctgacattcacttttcctgaagacgcaatgactagctctggtgctcctttctggtctgctcctaagcggttcccgcgaccactggagttctcatcttctgactcaagtcaccttaacttcttgttggctgcttctatattaagggcagagacatttggaatacccatacctggttgggcgaaaaacccaaagaaactagctgaagctgtggacaaggtcattgttccggatttccatccaaaagagggtgttaagatagagacagatgagaaggctactagcctatcctctgcgtctgttgatgatgctgccgtcattgaagagcttattgcaaagctgcaagcaatttctaaaacattgtcaccaggattccgtatgaaccctatacagtttgagaaggatgatgataccaatttccatatggacttgattgctggttttgctaacatgcgggccaggaactacagcatccctgaagttgacaagttgaaggcgaagttcatagcgggaagaatcatcccggccatcgccacctcaactgcgatggccaccggccttgtctgcctggagctttacaaggtccttgctggtgggcacaaggttgaagactaccggaacacatttgcgaacctcgcaatccccctcttctccatggcggagcctgtgccgcccaagaccatgaagcaccaagacatgtcctggaccgtgtgggaccggtggaccgtaactggcaacatgacgctgagggagctcctggagtggctgaaggagaaggggttgaacgcgtacagcatatcctgcgggacctcgctgctgtacaactccatgttcccgagacacaaggagcggctggacaagaaggtggtggatgtggccagggaggtggccaaggtggaggtgccttcctaccgccgccatctggacgttgtggtggcctgtgaggatgacgatgacaatgacgtcgacatcccgcttgtgtctatttacttccggtaaagaggagggtgtcgctacctgtttacatggaacctgtctgtgcgatgtttatcagaaggatcgagtctataagttgcgcatgcaaccgagaactaggctgtgttcaatgtaaacacatactgatgagtctataagttggctgggaatcgtcgccgagatttgggttcaccgttatggaattcttggagcatataaaacatcgtgatagttattgcatgtcaatgtcactgctagatgttgttgtcctcatgcatgtatcggtgtgactcttattgtgcttgggtgcatttgcttcaatgcatgtgacgtgctctctttagatttcggaaactacag

SEQ ID NO: 18586 - DNA, 857 bp, Zea Mays
cctgttaagagctactttgggaacaccgaagggaaaattagaatcccttgggaaaacggtgttcccaaagtagccctaaaagaccaaagaaaaaccgggaaaacacccgtcgcccgcccctcatccctccgtcgccgcgccgccgtcccatcgacgccacctgccgctgccgccgtccagcacacctcctccgcctcacgcgttcctgcagaaagcctctcctagaccacggcccaaggcccttcatatccacgcggcacccgagcagcagaaccctagataaaccctctcgggggctaagcaccggcggcggcgatggtgatggtccctcccggcgagtgggtcccccacgtcgaggcctacgtcgacgtctcccgccccgccgtgcagcattctgctagcgtggatgcacttgctgccctggtgaacaaagacaagttgaccctttttgatttggtgtccaagatggatctttatttgacgacaacagaccacattgtcagatcaagaggaatactgcttcttggggaaacattgtctcgaatttcatttaaatatttagatgttattaccattacaacattgtcagacttctttatatcaagattgtcagattggcaagcaatacgaggagcccttgttggttgcctggctttattgcacaggaaacatggtgttggttgtattgtgattgctgatgtcaaaagactagttgagtctttcttacagaatgttccagtgcagtcacttgcagctgctgaccgcaagctgtgctttgaaattctgagctgcatattggatcggtacccggaagctgtaaaacaaatgctgtatgggatctgtgaagcaattgatga

SEQ ID NO: 18587 - DNA, 2305 bp, Zea Mays
  misc_feature (2304)..(2305): n is a, c, g, or t
catttatgtagcatgttatatttgcttgcaaccttgctcatgctatttatttgcttggtgaggctgtatttgtggatgacatccccgctcccaaggattgtgtttatggagcatttatatatagcacaaaacctttagcccatgtgaagagcatagaactcgacctttcactcaagcagcttaaaacgctgggagtagttactgttaaggatattccagaatgtggcagcaatgttggggccaacactatatttggacctgaacctctgtttggtgatccagttactcagtgtgcaggggaacctcttggtgttgtggtatggtttgtagttatatttcgatttgaagaaattctctagacttctttcctttagtaatgaaaattatgtctatgaccatgtgtgttatggttcagttctgttgttactgaatctttttggcacagattgcagaaacacaaagatttgccaatatagctgcaaaaaaagctgttgttaactacagtactgagaacttagatgctccaattttatccatagaggaggctgttaaaaggtgcagttatttcgaaaccccgccgtttcttcttcccctgaaaattggtgatttctcaaaaggaatggcagaagcagatcagaaaatctattctgaggttaaactcaattctcagtactacttttacatggaaacacaagctgctctggcaatacccgatgaggataactgcatggtagtgtatagctcaagccaatgccctgagacagcacagaatgtcattgcaaagtgccttggtttaccttgtcacaacgttcgtgttattaccagaagagttggtggtggatttggaggaaaggctgttagatcattacctgtggcaactgcttgtgcacttgcagcatttaagttgcaccgtcctgtccgtatgtatcttgaccgcaagactgacatgatagtgactggaggtcggcatcccatgaaaatatgctattcagtgggattcaaaccagatgggaaaatcactgctttgcatataggtttgttcataaatgcaggaatgacaaaagatattagcctcataatccctcataatttcattgaggcactgaagaaatataattggggtgccttttcttatgaagcaaaggtctgcagaacaaaccttgctacaaagtctgcgatgcgggggcctggagaagtacaaggttcttatgttgccgaagctataattgagcatgttgcttccacgctctccgctgatgctaatttggttagacgtaaaaatcttcacacggttgagagccttgctttgtttcacagtgagtgcactgaagatgccatgggttatacacttcactctatatgtgatcaagtgactgcatcagaaaactatcagcatcggcttgaaataatccagtctttcaacaaaaacaacaaatggaaaaagaggggcctctcttttgtgccaatagtacacaaagtattatctcgaccgacacctggaaaagtgtctattcttaatgatggatctgttgctgttgaagttggaggcattgagttaggccaggggctttggacaaaagtgaagcagatgacagcttttggtcttggacaactctgtcctaatcgaagtcaagagctgttggagagaataagagttattcaagcggatacattaagtaacgtacagggagggtggaccactgggagtaccacatcagaatctagttgtgaagcagttcgtctcgcatgcaatgtcttggtcaacaggctgaagccagtcaaggagcaatctcaagaaaagcaagacaatgtttcatgggatgaacttatttccaagggaattacgtgttgactctataggatctttagcttgtaacgctagccacaagagcgggaaaaactagggctataccattgggattggaggaccccatagggacgaggaggtatcagcgaatgttggttcgcatgccagccttttccccttctattgtacgcaatgtgaaagggtcgcaaccagaaggttgtttccccctcgatcagggcgtgaggtggagtcgggctcagtcctctgaccaagttcgacatgagataaacctaacattctccccctgttctcatacttactcgcttatgtttagaacttgttagactatgtgtgtgtgagtgtgtgtgggccggcaccactgttgggctgccagcccattagggttagggtttcctgtctctatatattgtaaccccatctattatcaatacaacacttaatcttccaacagaacttactctctccatcccataaann

SEQ ID NO: 18588 - DNA, 1803 bp, Zea Mays
agacgatgcaagggatgctccaccgtctgcacgtcaccgtccgctccgctgccgcagcctttccttgacacggtcgcgagcgggacacgagatccaatacaaggtcggctctcctgcaagtctgtggcacatggagcgaaccgagcaagtccgcgcctccaccagcgtccaccgctcctccaccaaggagaacgttgctgttctggatcgggccgattcccgctgtcttgtctactgatctacagctgattaagcaggttctgacagacaggacgggcctgtatcagaaggacttcatgatccccgtgctcaagttcctcttcggcaacggtgtcatattgataaacggagacgattggaagcggcaccgcaaagtggtcctccctgcgttcaaccatgagacgatcaagagcatgtcggcggtgacggcagaggtaacggagcagatgatgcagcaatggcgcggccagatacacggaagcgaagaggaatccgccgagatagacatgatccacgccttcaacgacctgacctccaaggtcaatggccgcgtcgccttcggcacgagccaccgggaagtcgaggaggtcattgtactgatgcgggagatgcagaagctcgccactgcggccacgctcgatgctccaatactctggtatctgccaactcggcgtaacctgcacgtccggcgtctgaacaaacagctgagaagcaagatcatgtccatcatgcaggcgcggctggccgccgacggagctgataggcgtggtgggcgcggcggcgccgtttccggcggaggcgacctacttgggctgttgctagaggcgtggacgccgcagccgcagcacgggaacggcggcgagacgctgacaaccgacgaggtgatcgacgagtgcaagaccttcttcgccgcggggcaggaaaccacagctacgctcctggtctgggccatgttcctgctcgccgtgcacccggaatggcaggacaaagtcagggaggaggtcgtcagggaattctgcaccagcgacgacggcgaggttccccatgccgatgtcctcgccaagctcaagctgctatacatggtgttgctggagacgtcgcggctctacccgccgatcgtgtacatacagcggagggctgcctgggacgccgtccttggaggcatcaaggtgccccagggcaccgtcatctccatccccattgccatgctgcaccgggacaagcaggtctggggccccgacgccgatgagttcaacccgatgaggttcgagcatggcctcacaaaggccgccaaggatcccaaggcgctgctgtctttctccctgggcccaagagtgtgcactggccagagcttcggcatcgtagaagtgcaggtcgtcatggcgatgatcctcaggaggttctccttctccctctccccaaagtatgttcacaagcccaagtatctcctgtccttgacacccaagcttgggatgcctctcatcgtcaggaatgtggatggctgagagggataatattgtaaaagctcgttttgtgtgtgaaaatgaatacatgactagtgtgtgacaaatggtactctctttgtgttactactgctgtaacaagcccgacagaagaaccatccaatgcaggcccacgaaggggatccagtctgcgccggcctagtactcggcttagggagtttgtgtgagttgtaattgagatataagggaatattgattagggaaaagacatcagacttgtaataagaattctggacagactgtcgctctgcctatctactctgccatctactcttcttcc

SEQ ID NO: 18589 - DNA, 1071 bp, Zea Mays
gcgcgatatatactttgggacaacgacgacgacgacgccgccgagaaaattcttggatttccagaaggccccgatcgatcgaccgaggcggcgaatcatccgtccactcgctggcctcaccacctccccgtgcgcagccgtcgtcgtcctctcctcccttatcgatcgggttccggttccggccgctcaactcttctagtcttcttccttcctttccttcctttctcccccgtcccgctctggcctcctgcgtcctgctgccctgtgattgaagcaggcaacggccggctgttgggacggtagataaatagtaaatcggttgatactactgctgctgctgctattaaccgctcgggctggccggggcccccctcctcctcctgttgcttcgattccatcacacatcagcttggtgcattcgtcttcctgcttcctccttgcttcgtctctcttcagttcagtctccccttggagcgaggatgccttgtgcagcctggtctgcagggcggggctgagtcgtcgtcgtcggtgcaaagacgactgagggaaatatatatatatgtcagctgctgctgtagctctggaggaacctgctgtacaaatggtgatggtgagcgtggcgagcccgaggagcccggcggtgcggtcggaggaggacctgggcccggcgtggctgcggccgctgctgggcacgagcttcttcgtgccgtgccggctgcacccggagctgagcaagaacgagtgcaacctcttctgcctcggctgctgcacgggcgacgccctctgcgcctactgcctgccggcgcaccgagaccaccacgtcgtccagatacgtcggtcgtcgtaccacaacgtgatccgggtgtcggaggtggggaagctgatcgacatctcccacgtgcagacgtacgtgatcaacagcgccaagatcgtgttcctcaacggccgcccgcaggccaggcccggcaagggcgtcaccaacacctgccagatctgctgccggagcctcccggactcctttccgcttctgctccctcggatgcaagtttgttttaggtataactgtgtaaa

SEQ ID NO: 18590 - DNA, 3240 bp, Zea Mays
ccacgaactgtctatctgcatccatctcttggccacacccactgaccgcgccacaccacacctgtggctctccgcctcgagatgctttacacggtgtagctggcaagaagccaggaaccttccctgttccctcccgggcgcaaaggggctcacttttaatttcctcgagaggggactgcctcctttctccggcggcaagccttctcctgccttgttgcctgccactcgggctgtcctccttcttgattcttggcaccgtcggtttaatttcgcgaaatggcggcaggggtgtcgctcaagatggccggcttctgcgtcgtctgggcgctattctggctcgccggctccgccaccgtgagcacgagcaccaccgccttcgccggcggcgaggcggtggtcatggacgcgcggtccgtcgtcgccgtcaccgacaacgacttcgtttgcgccacattggactggtggctgccggagaagtaggactacgacacctgcagctgggggctggcctccctgctcaacctgcgttctcccccttgaagctccgcctgggcggctctctgcaagacatgtacgacaccggcgacgctcgccagccctcctgcgccccgttcgcgaagaacgcgtcggccatgttcggtttctcgcaaggctgcctgccgctgcgtagatgggacgagctcaacgccttcttccagagaaccgggtattctgctctactgccttcggccagttccaggaaccgcattctatctatctggacacggttgcctagctctctgcttgcctttgcattgcagggcaaagattgttttcgggctgaatgctctgaatggccgggtccccatgcctgatggctctctaggggggccatggaactgaactaccacgaacgcggcttctttcattggctacaccgtgagcagaggatacgatgtacatggatgggagctcggaaacgaactgagcggcagcggagtcggagctcgggtcgacgcagaccagtacgcagcagacgtgatcgcgctgaaacgcatcatcgacagcacctaccaccagagcagcagcccggcaaagcctctggtgctcgcgccaggaggcttcttcgacgcggcctggttcacggagctcgtcggcaagacgaagccggagcagatggacgtgatcactcaccacatctacaatctaggccccgatccttgacccttcttacctcgacggcgaggccagcacgttcagcgatcttgaggggatactgaggtctgcaggtacgtccaccgtcgcctgggttggcgaggccggaggggcttacaacagcggtcgccaccttccacatgattggttggtgtactaagaagcgtatggcgcgagccagcctcgtcgagcagagaagctcgctctctggatctccacgtatgcaggctgaaggtgagaaatataactgagttgtatgtgtgtgtacgaactcgggtcattacatgcaggtaatcaatcacaagcacatacggcgtgattggttgctttctcgaagcagcctgcccgctcgggccagcttccgttgagcctggccgcccagagacggaaatgaatcatgtttcccacgggcctggctcggagcgttctgctgcatctctcgggccaaatcagcacacttacccaccaaccaaacagacgtactttggatacgtagatgcagcagatgtatgtgcggacaaccaaacaaccgtaaagtaaaaactgctacatgcgggaatgcatgcgtccgctcagacaaactaccaatcatgcctatatagggtcaacgcatctggtgagtctggacgcgcagcaaccaaacacgcggcttgtgactgatgcgtttgtgttcagcttctggtacctggatcagcttgggatgtcgtccaagtacggtacgaagagttactgcagacagaccttggttggagggaactatggcctgctcaacacgactacgtttgaaccgaaccctgactactacaagtggactagccatgcataagtttctctctctcttctctcacaaagctgggatactgagtgataagagagggagaaattgtgtgctcaatcccgccatgaaaacctagcatctttctgctttagggggtttttggttagggggactaaagattagtctctagtttttagtctcatttagtccattttttgccaaacactatgactaaaatatagactaaaatgatttagtctttagtccttcacatatgtgctaaaagagattaaatcatattaatttcacttttacccctcatttagttcaattgtactaatagtaggagaatgttaaaggtcattttagtcttcttacgagtcatttagtatattcttactatttttatcccatagaatcaaaaatgttagggactaaactttagtcccctaactaaactttagtccctagactaaagaaaccaaacatgaccttaattttctctgtagcgctctactgtggcaccgcctcatgggcaccaaggtcctctctgcgacgttcaacggcacgaacaagatccgcgcctacgcacactgcgcgaagagatcgggaagggtcctctgctcctgatcaaccttgacggcaacagcacgaaccgcatccacgtcacgagccaaggcgcacaggcacagagtgcgcggagggagagagcggggggacgcctggtcgcttccctttccctgcgcttggcggagcagccgagctgctcgcaacaagagaggagtaccacctcgctcccaaggacggcgatctgcagagccagcaggtgctgctgaacggccatgttctggcaactgacgccgacggggacatcccagagctggagcccgtgcgggtggatggaacgcagccggtaaccgtggtccgtgggcccttactcgatcgtgttcgctcacatccccggcttctacgctcctgcctgtagctagaatttttacaccccagccttttccttcctggtgtgtatcataggttcggataaatccgggcgaacggcgaagcttgttcgcctgtccgtgcgtgaagtaaagctgcgaggctgaaaggtgtgcgatttgtcattgtttgggaaacaagtgttcggataatgtgtgagcaaaggggaggaaagtggagatgaaaataataaaaggaaaaaaaaggtttcgaatttttctctatgtctctgtcgttttggttgagaaagcagaaaaggcgacagttgcctc

SEQ ID NO: 18591 - DNA, 479 bp, Zea Mays
ctgagagggattcctaaagctttagataatctgccaagacttcaactgttcagatgtgaatatgactcccagtcactccgctagatgttttgatgtcaacgagcatacattccctctgctggatgactcccagttagtccctaccctctgctgccaccaagagtgtggctgcctattggtacatactgtagcaaggataaatagtttcgcaagtaaccctgcttgtatcctcatgtgggatattttgattattagtgatcaaggccctgtttgtttccttccaggattattagtgattaaggccctgtttgataaatagttctctagattatataatccacctaataatctatgatgtttgtttgcctcccaacttatttaagctggattatataatctcgagggtaaacaaacatggcttaattcaggtgcatttagggtttcttaatctacgtggaagtgtgtgctttcatatcctt

SEQ ID NO: 18592 - DNA, 1457 bp, Zea Mays
tgttccaagcagttccggacaaaaacgaggggaaggaaaacccaaagccagcagctgtctgcgtcgccgtcggcttcctatcctactgcgtgcgtggacctcgctgtgctcacgcggcgaccggtggctcctcctattgctacaactacttgtactcgcgcccgtcccttgcgcacgcaacgcaagcgcagacacgagcgatccgatccgatccggaactgtgccggccagccatggcgactagggttttgctcaccgccctcctcctcgccttcctcctcgtcgccacccctttcaccgcccgagctgaggttgttgaaggggctgatctaggtattgtgggtgatgatacacaggtttccagtgatggacctttaagccctgctcctggtgtagagacagtagttgtattccccaaaaatgctggcaaaattgtactagcaggtgaagaaactgaattactagttggtctgcaaaatgagggtgaatcgactttgaatgttgttgctgttcattcaactctccatcttccttttgaccataatatgtatggccagaaccttactgttcagaatttcttcaacgcatcagttcctgtttctgtgcaagcaaccttcccttataaattcgttgtgagcaagttcttgcagcctggagcttatgatctggttggttacatagtgtatgagatcgaccagcacccttaccagaatgtattctacaatggcactattgaggtcgttgaggctggaggcttactcagtgttgagtctgtgttcctcatcacccttggaaccgctcttcttggtctctttggattatgggcatatggccaggttcagcagctctcgaagaaaacgaagaaggcccccaaggtggagctcggaactggaacaactgatgccaacatcgatgagtggctggagggcacttcgtttgtgcagagaagcaaatccaagaaagcagacctgaagctagctctccagagtagttaatccttggaggatctagaatgaggcatttgagggtagcccttcacaagtgacttctgcagaaagatagatgcctaaggaggtgctgaaaaatgtagtttcgtggtcgaacatctttgttgacaccattttcgaccttgtgtacttcacatggaacttttcttcaaacaaagttttgttaaaaaaaggtatatgctgttgtctctgtgatttctgatcttttattcgctgtcatggccactccaggatttttctttgtgggttgtgtagcagaagtcggcaggcaagctgttgatttctgacttcgtttgtgcattatccttatgcttgttctccatcgcttggcattgtgcgtcacgcatgccagcaagtcgattatatatatctgaaacgttattgcaaagtcaacaaatgtagtgtaccaaacggtttttccttttcaggctcgagtgcttccttcactgc

SEQ ID NO: 18593 - DNA, 2378 bp, Zea Mays
gtctctccccccgtcgagcacacaacacaccctcctcgtcctccaatccaatcaacctggtagactcgcttcgcttctcccccagccgtcggacggagctcctcgcagtcgcagcagccgccgatcagcctgcgctcgggctcagcgctggaaggtgttggaagagaatagcctgaaggttcacagtaaccttcatctgtcggaagatgtatcgggctaagagggctgcattgtcaccgaaggtgaagcgccgcgtcggcaagtacgagctcgggcgcaccattggggaagggaccttcgccaaggtccggtttgctaagaacactgaaaacggggaacctgttgctatcaaaatccttgacaaggagaaggttaagaggcacagattggttgagcaggtcagtatccgtccactattcctttctgagaccatgcactggctagcttcttgttatatccattttctgtcagtaccatgatgcatggatcaaacttttagttaactacaaacattgaggttaaaagcctttatgctcccctgtcgaagccgtgttgtgtgactttcgatttcgaaaatggtaaggagttcagtttgccatgcagccaatcatgtcctcgttcctaacagtcactagctggaccatgtgatttcctttcgtcaaaaatcaaaattcactgccgtcacttacatctttctatcaaaaggaacgaggtggagaatgaattttcttccttggatgctgccgtgacagcatgggagcataggaagatgtaacttcaattaagaaacgatacgtcgatactatacctgcatatttgcatgccatcgagatatatccacatggtggtcttccagttcaagtcatacctgcaccaactcaattaagcgtgaaatttgtatcatgaaattagtaaggcaccctaatgttgttcgactgtttgaggctactaatggaaggttgaaggaagacgaagcacgtaaatacttccagcaactgattaatgctgttgattactgccacagtaggggagtgtatcacagagacttgaagctcgagaatttgctgcttgatgctgcaggaaatctcaaagtttctgactttggtttaagtgctttaaccgagcaagtgaaggctgatggtctgcttcatacaacatgtggaacccccaattatgttgcccctgaggtgatcgaggatggaggctatgatggtgcaactgcagatatttggtcttgcggagtaatcctctttgttcttcttgctggatatttacctttcgaggatgacaacatcatcgccctatacaagaagatttcagaagctcagtttagctgcccctcttggttttcagctggggccaagaacatgattaccagaattcttgatcccaatcctacaactagaatcacgatttctcagatactggagcatccttggttcaaaaaggggtacaagcctcctgtttttgacgagaaatatcaaactagcttggatgacgtggatgctgcttttggagattcagaagaccggcatgtgaaagaggaaactgaagatcagccaacctcaatgaatgcattcgaactgatttctctaaaccaggcactgaatctggagaatttgtttgaagcaaaggaggagtataaaagagagacaagattcacctcacagtgccccccgaaagagataatcacaaagatcgaagaagctgcaaagccgcttggctttgatgttcagaagaaaaaatacaagatgcggatggagaacccgaaagcaggtagaaagggcaatctgaatgttgcaactgaggttttccaaatagccccatccctgcatgtagtcgagctcaagaaggcgaagggggacactctggagttccaaaagttctacagaagcctgtcgacccagctgaaggatgttgtgtggaagtgcgacggcgaggtggacggcaacagcgcggcagcatgaaagtgccctttgaactttccactggacggcgccggttttcctttgtacatagcttctctttcggatgatcccgtgtccattgcagagtcggttttgcaagcaagttctttggtttatttgtagtaagcccggtgaaacaaccgccctggaggctgttgtggatgagcttactggcgtgtttagttcgtttcatggtcgggaggttggatggaatggaaaccacaatcaaggctgtagtagtgtgtgtagtaacgaagtagatacatgcatcagatggtgtaagggagtaccagctgttagttcatggtttcaagcttagccccccttcaatttgttcgatgatgtattacttcacaataaacattattacttagatgtatgaggtgagcacacttggtcttttgtcaagaa

SEQ ID NO: 18594 - DNA, 736 bp, Zea Mays
cttctacttcagctttctgtgtgcatttgttcccatacttaacaaccctgagtttggaggaactgctacctccaaataagcagacatacccgaacataatgatgcttagatccgctctggtggtatcttcccttattattgctctgtccgttccattttttggacttgtcatgtcactggtcgggtcttttctcaccatgtttgtggcctatattctaccatgtgcctgctttttgtctatcctcaggagtaaagtgacctggtatcaggtagtactgtgtgtgttcatcattgtcgttggactttgctgtgttggtgttggcacgtactcttctctttctaagataatacaaaagtaccaatgaattgtgccctagaattatgtatgatgtgtccatgtgttttcgaatagccagttttcttttctgggatggtggcgctggtctggaagggggagggggatgtcattctttgtaaattttttgttggcatgagaggaagtggaggaatttgataaaatagggcaggttgtgttatcgaaggagtattttgtctgaaattgttctcgtgacggtaggtgctgctgggaacgaccttctgttgacgctgccattttcgtttgacccatattgtctcttgtcttattttctcgcatgctggtgggggtgggctatttgtttgatggagccatatatgaataatacaataagtttcgaatacaaaaaaatataacaaa

SEQ ID NO: 18595 - DNA, 3097 bp, Zea Mays
tcccctctcttgcctgcctccctccctccctccctccttctccatctccgctttccctcctcgcctaggcctagccgcccccgcacgccacgccacgccacgccacattcgcatctctggatccccctcccctcgccctctcccattacccgccgccgccgccgcctcgcgcccgcgacccacccggcctcccacttcgatcccgccccgattccctgcccccgccccgattccgattcgtcactgtatcgcgcgcgcgggtgggaagacagcgatggctcgtggcgggggcctctcgccccgccgcgggtgatctctcctctagcggggagccttcccgcgttcccaagcggaggatcccgtcgcagctggtgcctcacctatccctctccttcgcatctccgccgtgctctctcgcgcaccccctcgaccctaggtttgctccttccctcccttcctcgccacccgattcgatctcgctccctccggcctccggctaggctgctccgtctctcctccgccatgttctcgcacggcgctgattccgcccacgacgccggggccgtcggcgtcagcagcggcggggctaccgtccccacccgcttcgtctggccctatggtgggaagagggtcttcgtctcaggctccttcaccaggttgagttgagttgctgctgcctatgtttcaattccccaccgattatcactgcctgctctagcagtatgcatgtacttctatactcgcgattcctcctgcttactcgtgttagcagatagttgctctcgcagttttgcctgtgcacaactagtttcatggttcattgcttcccaatcgaatgaatctggtcgtatatatgcattcctcactttgtataggtctattattggtttagtcatcctaaggtttcttacgcatcagctgcatatatatagatatgtttatatccctctgctctgctctttggtgcaatgtatctgtgatctaatgttatgcatgatacggaaatacagcttactcaaccaatgtagcttcccttaatcaggggctataccagttaattatccttacatggtaaaggtggaattgtttggctttacttctctctgccattcgctaaatcgcagccccctccctgtgaatcatcgctattctggtgcgcctaacagctacaccttttgtcgtaggtggtcggaacatttgccgatgtctcctatcgaaggctgccccactgtatttcaggctatttgcagtctgtctcctgggattcacgagtacaaattctttgtggacggggaatggcggcatgatgagcgtcaacctaccatatctggggagtttggcatagttaacacactttacttgacaagggaatataaccaaataaataccttatcaagtccaagcacacctggaagcaggatgaacatggatgtggataatgaaaattttcaacgtacggttacgttgtcagatggtaccgtttcagaaggtactctgagagtttcagaggctgcaatacaaatatctaggtgtcgtgtttctgaatatctgagtttgcatacatgctatgatttactcccagattctggcaaggttattgccctagacattaatttacctgtgaagcaatcattccatattctccatgaacaggggattcctgtagctcctctctgggactcattcagaggtcaatttgttggtctccttagcccattggatttcatactcatattgcgggagctagaaactcatggctcgaacttgacagaagagcagcttgaaacacacactatatctgcatggaaagaggctaagcggcaaactaatggaagaaatgatggtcagtggcgaccgcaacagcatctagtgcatgccaccccttatgagtccttgagggacattgcagtaaagcttttgcaaaatggcatttctacagtgccagttatttattcatcatcatcagatggatcattcccgcagttattgcatcttgcatcactttctggaattttgaaatgtatttgtagatacttcaaaaactcaactggtaatttgcctattctgaaccaaccagtgtgctccattccgctgggttcctgggttccgaaaattggtgatctgaacagtcgtccattggctatgttgcgacctaatgcatcacttagctctgcccttaacatgttggttcaagctggagtaagctcaataccaattgtggatgacaacgactccctgcttgacacttactctagaagtgacatcacagccctagcaaaagacaaggtctacacacatgttcggctggatgagatgaccattcaccaggctttgcagcttggacaagatgccaatacaccttttggattctttaacggccagagatgccagatgtgcctccggtctgatcctttgctgaaggtgatggagcgactggctaatcctggggtgcggcgggtgttcattgtggaagctgggagcaaacgtgtggagggcatcatatcactaagtgacattttcaagttcttgctgagcttgtgaggagaggagggcatggcggagtttttttaacagtagcaaccctctgggcctttgggtccttgcggataattggctatcgtcagggttcatggtctgtaaagttccttttttttttgtttcgttttttaccatttggcccctcccgcttgtataacctcaattaatataatggcaaccttcatttaatatgaggttacttgagggttacttgaaaaattacaagagatgttctttgcgaatagtctctttatacagagccttatacttgtaatatgcggttttttagctgtcccttgtatttagaaaattaatccgatgtctttggattgtatatgctcttagaacaattttaataatagcccacaacggattttataatgttgccatgtcacatatagttaaataaaagtctactcacataattttatgactaaacaacattttttttttgtcttcggtccgccatttacgttttggtctccatagtacggtaaggcatttttggtcatccgtgagtttttctgatcgattaggcattttaagtcttcggtctgcc

SEQ ID NO: 18596 - DNA, 1475 bp, Zea Mays
ggtcgccacctaaacctaggcgcgccactctccctggcagccgccgtttgttgtcgcgagcgcgttcctgccccgccacagccgaagctcccagcgtcctcctgcaggccgagctgaaggttcagcgcgccggtggagttcgacgacgaaactccgtcacgtcatacctctccgcctcccgtcttccagacgtctccaatcagggctcccagcgtctcggagaagaggagcagcacggcacggcggctgtggcgaggaaggctcctgtcccatcccaacccagttagcagccgcccaaggaggaggagattcaatcggcgtgcgggcgtccgcggtccatccatcgatccaattccaatctgcaggtcattactgcatttggaagactagggacaatgtttggatgtgatatgtataatattaaaccagatcttgtttccatagccaagcccagaaataacggatgtaatttattctcagagcaataaacttgggaaaggaatattgtagaacacgttaacaaaattgctccaaggttccaggagggaatcaaggccttctcaggcagcccaattgttggggagatacgcggtctgggactgatacttggaactgaatttgtcgacaacaaatctccaaatgatccatttccagctgaatggggttcattgttttattgatctcatgtccccttttcaaacatttcagaagtaatccaactttaaggcggcccaaaattgttctctgaagagttaacttaatgttatgaattagcgtagcatgtcgaggcaaaattcgtcactatccccagagttagaagaaaccttgccgagttgattaatggtgacagtatattgattttattacgactggtaactccaggtgttggttcgatatttggcacggagtgcgagaagcgtgggatgctcatcagggtggctggggacagcatcatgctgtcacccccgctgatcatgactcccaatgaagtcgaagaaatcataagcaaattcggcgatgctctaaaggctacagaggaacggattggagaactgaaatccaggaagaattagccgatgctgctggttgtaacgacgacatgcaattgaaaatgataattgatcttttttatgggcgaagtgttgaagatggctttggtgaaggaaatgtcttgttagcatcaagtaagtggcgacatcacaacccctacaagcttgtgccttaaaacaagaggatacaagaagttggagtgcttttgtgaaggcttttgcgaatcacttaaagcgttagtacttttgtgaatgattttgtaaagtgtttgcaaatatgtgcaaaacataataacatgtgtaggttttgtgaatgattttgttgtggtgtctgttgatggtttatgtatgtggatctatcattgtgcaatactaattaaatttgtatatctatgtgattatgtgtataaaaattggtgatttgtg

SEQ ID NO: 18597 - DNA, 600 bp, Zea Mays
ttctagtccctccaatcccctttgtttttctggctcttaaactagccctcgggttatatataaacagccccggagacctctagctcccttgaaccaaaacttcgtgtgctagtcgaggttccgagcgctcgtcggtaccgagcataggccgaaagagagaggatagggagagggacaaccactctagccatctcatgatcatgccatggttcagacgtcgattggtgccatagagaagtcgtcgtcgcttgagaagtttgtgggtagcactatgggacgcgagggtcgaccagagtatgatgagttgcttgctgaaattcgtcgaaccatggtgcaacatcgctgacactcgtcgttggttcaaacaccgaaaagcgaggttacgaggaatctgaagtccaaacttggagaagtgcttggagttaagccaaaaggcagttgtgtcctttatcacattctttgaccttataatattaccttttatgttctcacctaattcactgttaagttaacttgatgggaccttatgttattgaaagggaaatgtgcccttgggccatttctaagtattttggtgattgagtgcaaacacaagggcct

SEQ ID NO: 18598 - DNA, 5470 bp, Zea Mays
cgcttccgctcctccgttcccaaacctccccaaccagcagctctagggttttcgccgccgccgccgccgccgccgcccatggccgccactccggaccgagccaatgccgacctccgccatggcctctccgtcgacacccccctgccgccccagattgccagagagaagcaaggccttgatactgaaatacccctttctcctcagtggcttatgaaggtgggggaaaacaaggatcctgtttcacatggtatccgctcagatgtttcaaaaacatcaggggctggtgaagaccaaggctacaatacgaagaaaaaggatgttttcagggcttcagttcttgatggtgaaactgggcgtcgtgaccgctggcgcgatgatgaaagggaaccaaattcaacccatcggtggagtcgctggagggagacagataaggaacatggcgatgcacgcaaagcggaaagatggtcagatgacacctccaagcattctgtggatggacgtcgtgttccgcaggagcgctggggcgattccaataataaggatggcagttatgaccaacgacgtgagaataagtggactgcacgttggggttccaatgataaggagtctgaaaattggcgtgataggtggggggattcaggcaaagagggtgatgcttaccgtgaaaaaggtttatctcaccatgggaaggatgccaacagttatgaaaaggatgacaatatttctcgttcatggaaacctagttattccgcaggccgtgggcgtggagatttgccaaattatacttctcagacactgccgaaatcacctgctccttctggatatggtagggggaagctagacaatgattttgcaaagtttccaaacagtcgtggaaagttcacatctggtacaagtgcaatcagtagtggatcttcacgaccattccatcttggtcttctttctgacagacctggtggtatatcagatcgttcggcattcagatacagtaggctgaaattgcttgacatataccgaaattgtgatgtcactgattttaagttatctgttgattgtttggaggaactctctgtgttcatgcaagaggatgttttagaacctttagcactatctgctcctgttgctgaagaagcgaccattttaaaagctattgacaaaggggatatcgtaaacagtggtgtccatcaggcttctaaagatggttctgttggaaaagctggtagagaagaccagccaggaggtgtggaagtctcaggtcttgctggaaatactgatttggcagcaagaggggaaccaatgcatcctgcgacatctacttatgttgttccacaaaggtcacagtttattggagaacataaacttggaccatctgaatttgggcatcaaatacctaatttcttaaatcaagaatcaaaaactgttggcatgttgggttttgataactttgccagtccagtgcattctcatcctaatccagaaaacctctctctatactataaagatccacaaggtcaaattcaaggccctttttctggtgccgatattattggctggtttgagactggttattttggcattgatttgctggttcgtccagtgaatgcaccccatgatgttcctttcttaatgcttggggatgttatgcctcacctgcgagcaaaggtaaggcccccaccaggatttgccacttcaaagccaagtgatatgctagctccagagaccctacctacagggaagtttgtcagctctagcatgcaagcaggatcaactggcattggaatatttgacagtgggccaatcaggaaagataatgctgttgaggctcaaaatcgtttcctggagtcacttatgtccaatagtgcgcggaatccttcggcaggcactatctctataactggaggtatgaatgaacttgttagtactagctttggcaacatttctgtgcgcggaggtgagagcggggtcaatctgaactatcttttggcacagaaaggactgttggagagacaaaactctttgcaaaaccctgtttcatattggacaggagatgctccagcatcaaaagtacatcccatggctgatacatctcgccaatctttgcaatctcaaaatgttgatttactagccatgctgcaaccaaaggagaagcctcaagttcctactggtaattcgggtctgccactatgctccaattaccctgaagcaagtatcgttaatcccaacttgcatagtggagatcttgctcaaggggctcttaatatgcgtcaagatatgcagaactcccagaacattggtattggagttcaacaacacaacttaatgccacaaaaccgaccagctttggctcagttgccatctgagaagcttgctgagatgtctcaagatccacaactgttaaatatgattcgtcaagatctgcagaactcccagaacattggtattggatttcaacaacacaacttaatgccacaaaaccgaccagctttggctcagttgccacctgagaagcttgccgagatatctcaagatccacaaatgttaaatatgcttcagcagcaatatcttttgtcacaactacagttgcagtctcagacaccttttacacctcagcctccactctctatgttggacaagatgttattgctcaagcagcagcagcagcagcagcaactgcagcagcagcaacaacaactgcaacagcaactggagcagcaacaaaagctattgttgcagcagcaactgctctctcagatggtgcctcacgcgcatcctaatcaacacactgatgattcttatgcattgaagtatacttctgtgccatctgatgattctaccagtcttggttttagaagaatgcaagaggctattgaagtagatcagaaattttctgtccatggtatgcaagtgggtcaacaacctagtcagtcaattatgaattttagaaatatggatggtatagctttattgcaaaatcctgtaactgcactgccggtgccccatgaaactgctgtgggtgcacttccaaaagaggaccactctcgtcctggaatgtcggaagattttgcaaatgtcgacttacaattgaaatcaactatggtacactcaaagctggtggaagttgcagataggaacgagggttttaaatctcacgaagtggacactgcagcagaaaaaaataaaatgtctgaaaaggagttgaattctggatctactataatcatggggagtgcttctgatgaagctaagaatttgcatgaaccaccactagatccaaagtcagaaaatttatcttctgatatttctggtcaggttcaagagtcaaacctgtctgcagaagatacgcctcctggcatcacagcagctgtggcaactgaagtaaaagttactgatacacaggagaccaaaaaagcagaaaagaaaaggaagcaaaagaaaaaacaggctgctgcagatgctggcaaaggaacatcaaaggcggttgtagcccagcagcaaaggcaggaaactgaggttgacaattctgatattggtggtaataagcatgatttaacagatgatacagaggaactattttggggttcacctatcagagtgcaaaatgagattttaccctccaaaagttttccagaggaacatgacgctgacaaagctgaatcgcagtttagttctctatcatctgatcctcatagcatggcaagccagcgtgcatggaaacaacctactcaaggtctcaggcctaagtcactgctagaaatccaagctgaggaacaactgcgtgcacagaaaggattaactactgaaactgctaagccagcagcttcagttccttcaatttcttggagtggcatgtcaatatcttccgagcaacattatgggggttcaaatatatcattgggaagtatggaaagtgctgttgagagaaataaaagaagccagttgcatgatttgctggcagaagaagttctggcgaggtcaagcattgcagataatgagaataatgccaacgatgcatttttctctcctctgtcgcctgctgctgttcaggctgatgctcctgcccttgatgataatgacttcattgaggccaaggacaaaaagaacaaaaagaggtcagcaaaaacaaaagcttctactgtgaaggctccatcacctgttgtttcctttgatccaccagctatttcgatgccttctgaaaagggaaagtctgccaagcaagcacaacaggagttagaaatattgccagctccaccaagtggtccatcgtttggagattttgttctttggaagagtgatcagactagctctgtgcctgctccagcatggtctaatgactcagcaaaggtgcagaaacctttgtctttgagagatattcagagagaacaagaaaggagaaccgcatctatccagcaacaagcaccctcaccaactccagcaaaggtggccccgaaccaaagaagtcatgtgaatgcttcttcctggcaagcttctggaccacctccatcacaggcagttgcccctgtccaaatgagttccaatgctcccagtcattccaggtcaagtgctgaagatgatttgttttggggcccttctgagcactccaaacaagatacaaagcagtctgagtttccaagtctgttgagccaaagcagaagttccatgatgaaggatcattctgcactgaatcgtcaaaagtctcaggcaggcagattgccagttccttctgctgctactgcaaaccaatctggcaaagggaaagcagaggctacaaacaagcagactgaggcaatggacttcagagattggttggatagtgaatgggccaagcttactggaacaaatgatgtaagcttccttgagttctgcataaagcaatcaactaccgaagcggaaatactcctccatgagaacattggttcccttgaccgcaaccacgagttcatcgacaagttcctcaactacaaggccttcctgtcagcagatgtgatccacatggccttccaagctcccagcagccgtggtgacggtgcagggtgggcaaaccctgctgctgcagctagaggaggcacggtcatagacgcggagctggatggcggcgggaagaaaaaggggaagaaggggaagaaggtgagtgccgcagtgttggggttcaacgtggcgagcaaccgtataatgatgggcgagatccagaacgtggattaggaggatggcggcacaccaacaccaccgtgtatataacatagtttggcctttggttacatgccaccgaagtctcagggctcgagggaagctgggggtgctcggaatggcggtctggtctacctgtttttgccgagggtgggaaactgagcttagatacagggtcatgtgctggtgattttgggttcctgtaacaattggttaggatcctgtaacggacagaaatattttcttcaatagaaactcaccagatggattcagttcaaaaaaataa

SEQ ID NO: 18599 - DNA, 1784 bp, Zea Mays
ctgcttgttcgtagatgtgcatgcttgtccctcttgcactgcttgtctgttacctgcagcaatctttgccaaacggacacagggaacctatgcccccacaggattgcacaacacgtgggataggtaatgcaggtattgcccccgctggctgtggctggccggtgtgcaattcactaggctgccaaatgagccctaaaggccccagcatgggcgaccctctccagagtgattcttatcaatcttgcattggaaaaacacggagcctattattatcagggaagcatttgagccaaagtactatgtacatcaccatgcttttatgtgactatatatataaatataacaaataaagttttattggaccagttctttgaccatgccattggtatcaacgttccaaggtcccgcttcctaccagttaaggcgacatcagatttgaagctagtacagtctgatctatataccttggttgatggcttcgttacacgtaattcagccagaacaaatccatcaaatccctcaattgaacttggtcctgagttcaagaaggttgggagcttccttggtcgcttcaagtccatacctagcattgttgagcttgacatcttgaaggtttccggtgatgtttggttcggttctggaattgtactgaaggggaaagtgaccatcactgcaaaacctggcgtcaagctagaaatcctagacggagcagtgattgggaataaggataattttggaaaaggaaagagaaaacaataccagatgccttacaacctgaattagggatgaaactgctaattgcacatggaagtcaccaagaacttggtaaaggtgattcaatgacaaatctaatgattaacatgtgcgatgtggttcacatgttaatgcatgcaactgaagtgcattaccaatgtcccaagagggtaagggtacagtctgatgtatctgaaaggattgctaatggaactagtgttcatgtaaatactcatgttcaaaatttgaatctggatattgaagagcaatcacacaaacactcgatttcacacatcgaggagccaaacactaataattcagaaggatccctggctggtgctgctgtctgggatgtatttcgcaggcaggatcttccaaagcttaatgaatatctagctgttcatcgggaagaatgtgcagctagatgtcaagcagtgtcttctgttaaatatcctatttatgatcaaacagtgtaccttaacgattatcataagaagatgttgaaggatcaatatgttcaagctctgcaaggtgaggtttgttcagtttggccaaaaaggcatcccctacctgaacacctacgatggtcgcgccatccgctacctcgacccgctcatcaaggccaacgacaccatcaaaatcgatctggagaccaacaagatcatggacttcatcaagtttgacgtcgacaacatggtcatggtgactggcgggaggaacaccgagcgtgtaggagtcatcaagaacagggagaagcacaagggcagcttttgctgcttggagctttttgctatgtctagttttctcctatttgttgtacaggaaaacttagaatagaattcaaatttggtggtcacaaaagtgtggagactttaattcatatataaagttaggcttaacattagtgcaaacagttgtattttagtttagatttagagtacacttatgtatgcgttgtttgacaatgcttatttatgatatattgaatggtacttatttatattatattaattataatgttgttcaatata

SEQ ID NO: 18600 - DNA, 2225 bp, Zea Mays
atcgttcaaaaggagcagagttctgtcgacatggcatctccaagaggaaggatgtcatttccccttcgttcctttctgatgatctgcctcatggctcagctgggagcttccaatgttgtactcatggcgaacaacactaccctgtcgttcgacgacgtcgaggcaatttttactccagcagtgaaaggttcaggtgtaaatggtgtcctttatgctgtggaacctatggatgcatgcagtccattgaaaacaaaagcgataggaggctctgtctcaccatttgcgttggttataagaggcggttgccatttcgatgacaaagttagaaatgctcagaatgctggattcaaggctgctgtagtatatgatactgaagacaacggtgtccttgtttcaatggctggaagctcgtctggagtccacatatatgccgtgtttgtctctaaagcgtcaggggaggagctgaagaaatattcaggccaaactgacgcagagttgtggataataccaacatacgcgaactcggcttggtcaatcatggcaatttcatttatatcactgcttgttatgtctgctgtcctagccgcgtgtttctttgcgaggagacaccagataagacgggacagggctcgacttccccaaactcgggagttccatggaatgaacagccggttagttaaagcaatgccaagtcttattttcacgaaagtgcaagaagacgactgcacatcagcaacatgcgccatttgcttggaagactacagtgctggagaaaagctaagggttctaccttgtcgacacaagttccacgcagcctgtgtggacctatggctcacctcctggagaacattctgccccgtatgcaagcgggacgcgaatgctggaacaccagacccccctgtatcagagtcgacgcctttgctctcatcatccgccattcgcttaccagaaccaaccgcttcggcttccttccggtctacagtggcagcagcagcgtctccccccaggccaatcagccggcatccgtcaccatcacggtccatatcccgcaagcactccgtttcgggttccagcatccctggcacccctatccccaggtttcatgcaagctcatcatctcctacctgcacaagtggaagcagtttggacctcgcaaacatgccgtcgtctccatggcctcgcgcttcgcaccttgcatctgctcactcttcgtgcggtggccgcctgtccccgccgatccacatcaggaatacctctgcagcgcacgtctcgcgctctgcctatggatctcccagccgttacgtaggctcgtcgcacatgtcccgtggatctccgagttgctactaccttggatcttcttcagggcagcagcatccttacctgaggcactgcaccttgtcaggcacgagcctgttcaccatggtgccccaatcaccgcaacagaaccagctgcagcacggtggagactcggaaaaagatctgtcagctgctgcaccattccgtcagctctactacctgcagcattgtccagattctggcacgtcgtctcagtcgcttccagggtgctgattcttcattcttgctgcaaaattcaccattttaacattgatggtggctccagtaaagctcccggccgtgaggaatcttacatggcaccgaattgacatgtggatttgagctcctcagttcaccatgatgatgagagaaaaaaggtgcgacagaattgcttgtaagaagagagaattgcaccccccagaatgtgtggcttcatcttgaagaagcaaatgcccatgtcgggtttcaccagcgtttagcgtgtactgatacagctctgtagtaattctagttgctgtttgtctatcgaggtttgagccggtagcattccttcctctcttttttgttttcctaattttgaattagttatatgacagacaaggttttcaagaaaagaaataacaagttttacccctgcatttttacagagaggtatgttgaactcaggatctttgccttgcctcgatgggatggttttttaccactgtgttgtttatggtcagtgaaatgtgcatgaagcctcgatggcacttgttctcccgttcagtatgaactacttagtaagtcgctagcagactagcaaattcactataggaaatttaaatttatgggggagttgctctgatgaggcggaaagattgttggtgccaagaaacgcagcagcagatcga

SEQ ID NO: 18601 - DNA, 560 bp, Zea Mays
ccaaccggtcaatagcttcgtattcgaatcgtaagactgaagtttccaacttcatcttcgtgcccgttgtcaagacgaagtggcagtggctcagctcggtcattggttatttctctgggtctgaaagatcattctcagggaacactgaaggatatcattgtagctgtgatcgagaatcgcctttggtgatgattgaataactgagctgggcatgggattgacatattcagcccatcgataaagatattgcttagcattgcgcaagaggagccatcgtttataccatgcactaaattctggtagttttgtagttagaccttctatctacttggattaacaaaaggtggctttaagctgctgtcaaaatttgagtgtcagctctcacgctaaacaaaaggcactgtatgctggtaaaacacttctgaggtgaatcatgcttttcgaggctatttgacaatttcggctatagcttccccaggcttgctaccaacccagtccaactccaaggtttggaaaattctgtaaaaaaaatcaaaacaaactcgacatgagggaaacta

SEQ ID NO: 18602 - DNA, 1115 bp, Zea Mays
attgaaccttgttacttgttagcaactggcaagagtgattgcgattgaatttgccgagcacgtcggctatttcgctggaggtgatgggccaccagctacatatttcacaggatccaaactccaagcaccatgggaccacggtctgggatgcatcaatggtgtttgtcaagtttttggaaaagaatagcagaaaaggtcgcttttgtccgtccaaactaaaaggaaagagagtgattgaattgggagctggctgcggtctagctgggttcggaatggccttgttgggtggtgatgttacaacaactgaccaagccgaggtgctcccactgcttatgagaaatgttgaacggaacagatcttggatctcacaatcgaaccccgactcagattccgttggctcaattacagttgcagaattggactgggggaacaaagaacatatcaaggccgttgaacctccatttgattacattgtaggaactgacgttgtttattcggagcatctgttgcaacctctaatggagacgattactgcattatctggtcctaaaacaaaaatattgctagggtacgagatccgttcgacaactgtccatgagaagatgatggaaatgtggaaaagcaatttcattgtgaaaacggtctctagatcgaagatggatgtgaaatatcagcatcctagcatacatctctacatgatggacctgaaggcaccattgatccctgaggttgaggctgccgacaatgggaactacgaggaagaggttgaggttgctgtgaatcaagaggaagacgaagatcctggagtgaagagcgaatcttgttccggctcgtcaccagaggctaagagcggcagtctggatgattgggaaatcagaaggtgtggggctatggctgcaaggcttctgaaggatgtgaaactgtaaacatgaatcctagagatcgttttccccccttgtcagagaactctagagctcctttatgttgttgtccttgatagttgttgtactgcccatggcagtctatgttattgtatcttattgcatcagtggatattgataccattccaaaagaaaaaggaagtttctctatctctctctctgatagatgtcagg

SEQ ID NO: 18603 - DNA, 1222 bp, Zea Mays
tgcacctggtcacacaaaggacaaaactccggatcatctttttggaaacattatgtaatgaccaagatgttcttgagagaaatatacgattgaaagttcaacaaagtcctgattatgcagagcaaacagattttgaagctggtgtacaagatttcaaagagcgattgacctattatgaaaaggtctatgaaccggtggaagaaggttcttacataaaaatgattgacatggttagtgggaaggggggccaactaaagattaatgacataagtggttacttgcctggacggatcgttttcttcttggttaactgtcatctgacacctcgtcctatcctgctaacaagacatggtgaaagtatggataatgtcagaggaagaatcggtggagactcttctttgagtgaggccggtgagctttattcaaggaagcttgcgagctttgtggagaagcgactgaaatccgagcggactgcctctatatggactagcacactccagagaacaatattaacagcacatccgatcattggttttccaaagatacaatggcgtgctcttgatgagatcaatgctggggtctgtgatgggatgacatacgatgaaataaagaaaagtaaacctgaagaatatgaatcacgaagaaaagacaagctgaggtatcgttatccgagaggagaatcctatcttgacgtcattcaaagactagaacctgtgataattgaacttgaacgacagcgtgctccagttgtagtcatagctcaccaggctgtgttgagagcactttatgcatactttgcggacaaaccgcttgaggaagtcccaaatattgagatacctctacatacaataattgagatacaaatgggtgttgctggtgttcaagagaaacggtacaaactcatggatgcaatccatcccacagcggggttgtaagaaataataaatggagctcgccttctaaaagcaatggtagcacaaataaattttgtgatgatatacgtatcacaacattaatcaattataagctatagttcgaggtggaatgtcacaccactaggtttagctcatagatgatttgccatttgacttacaagttttggctggttgtgtagtgtgtactcttaattcatgagttctgaacatgtttaattcagatccgagttctgagcaagtttattcaggccaaagctcgcgccaaagacagtttttccagtaacgaa

SEQ ID NO: 18604 - DNA, 6590 bp, Zea Mays
cccatccctcctcctgctcatcactgctgctctctggctgctccctctccctccatccccactgctgctctcttgccaaatctgatctagggtttcgttccatctccacgcgccgtcccagtacctatctactctagactactacagtatccaaaaggcaagcttatctgcggagggagtgagctgacgcattcccgtgctggcgagggacagccagacccagacggggagatccgatccgattccgtgctagctgctgcggagtgagtgaggtgacgcgggagcgggatggcggcgccggggcggaggacggcggacgtgtcctcgtcctcgcccgccccctcgccgtccccttccaccggtaggcgcctcctgcgcacgcagaccgtcggcaacctcggcgagtccatcttcgacagcgaggtcgtgccgtcctcgctcgtcgagatcgcacccatcctccgcgtcgccaacgaggtcgaggccaccaacccgcgcgtcgcctacctctgtcgcttctacgctttcgagaaggctcaccgcctcgacccgacatccagtggccgtggtgttcgtcagtttaagaccgcacttctgcagaggcttgagagggaaaatgatcccacgctcaagggaagggtccaccagagcgatgctcgggagatgcagcgcttctaccgcgaatactacaagaagtacatccaggcactgcagcatgctgctgataaggctgaccgagcactgctcactaaagcgtaccagacagctgctgtcttgtttgaggtcttgagggccgttaatgtctcgcagtccgttgaagtcgatcaagcgattttggatacacacaataaggttgaagaaaagaaaaagttgtacgtaccttataacattctcccgcttgatcctgaaagtactggtcaagccattatgcgatatccagagattcaagctgctgtttatgctcttcgcaatactagaggtctgccatggccaaaggaccaagacaagaagcctggcgagaagaatactgggaaagaccttctcgattggcttcaggctatgtttgggtttcagaaagacaacgtgtccaaccaaagggaacatttggtactgttgcttgcaaatgttcatataatgaaagtacccaaggttgaccaacaaccgaagttggatgacaaagctctggatgctgtaatgaagaagctgtttaagaattataagaagtggtgcaagtaccttggccgcaaaagcagcttatggttgccaaccatccagcaggaagtgcagcagcgtaagcttctttatatgggcctctacctgctgatttggggtgaggcggctaacttgagattcatgccagagtgtatttgttacatctaccatcatatggcttttgaactctacggcatgctggctggaaatgtgagcccaatgacgggtgaaaatgttaaaccagcatatggtggtgatgaagaagcctttttgattaaagttgtgactccaatatacaaagttatagagaaggaagctgaaaggagcaagaccatgaaatcaaagcactcccattggagaaactatgatgatctgaatgagtacttttggtcagttgattgtttccggctaggatggcctatgagagctgatgctgactttttcaaaactccaaaagatgcttatctgaatcttttgaatggagagaacagatctgcaggtaatacccattggatgggaaaagttaattttgtggagatacgttcattttggcacatattccgtagtttcgacagaatgtggatcttcttaatattgtccttacaggccatgataattattgcttggaatggtggaacaccaagtgatatttttgatgctggagtatttaagaaggttttgagcatatttattactgctgcaattttgaagttgggtcaagcaatcctagacctcatatttggttggaaagcaagaagaaacatgtcatttgcagtcaagctgcgatatatcttgaagttaatatgtgctgctgcatgggttgtgattttacctgtgacttacgcgtacacttgggagaatcctactggacttgcaagaacaataaaaagttggcttggtgatggtcagaatcagccatctttgtacatattggccatagtgatatatatggcaccaaacatagttgcttctatgctatttcttttcccatttatgagaagattcttagagagttcaaatgttaaggtcataacgatcataatgtggtggtctcagccccggttatttgttggcagagggatgcatgaaggtgcattctccctcttcaagtataccatgttctgggttcttcttttagcaacgaagctgactgtaagcttctatattgagatcaaacctctggtacagccaaccatagatataatgagggaacctatcaggactttccagtggcacgaatttttccctcatggaactaacaatattggtgttgttatatcactgtgggctccaataattctagtatatttcatggacacccaaatttggtatgcactgttctcgacattaattggtggtatctatggggcttatcgtcgtcttggtgagatacggacattaggaatgttgagatctcgctttgaatctttgcccgaggccttcaatgaacgcttgattccttctgatgcaaataagagtaaaggtcttcgtgctgccttttcaagtagacccaaggcttctggtgacgaaagacagaaagagaaaagagctgcaaggtttgctcaaatgtggaatgtcattattacaagtttccgtgaagaagacctcatagacaatagggagatggatctgctactggttccatactgtaaagaccgtgagctcgatatatttcaatggccacctttcttacttgctagcaagatcccaatagcactggatatggcagcagacagtggcggaaaagaccgtgatctgacgaagaggataaaatcagatccatacttttcctttgctatcagagaatgctatgcttcattcaagaacatcatcaatactttagtgtttggtcagcgggagaaagatgtcctagcacagattttcgcagttgtggatcagcatatagaagatgaaactctgataaaggatctcaatatgaggaaccttcctgcactgagcaagaagtttgttgaattacttgaattactgcaaaaaaacaaggaggaagacttgggtcaggtagtcattttgttccaagatatgcttgaggtggtcacaagggatataatgaaggaattacaccgctagatcagcaagaccagttgtttgctaaagctattaagttccctgtggatgaatcaattgcatggactgaaaagataaagaggcttcatcttctgttaactgtgaaggagtctgctatggatgttcctactaatcttgatgctaggcggcggatatcattctttgcaaattctttatttatggatatgcccaatgctccaaaagttcggaacatgttggccttctctatcttgactccttattacaaggaagatgttctgttctcattacaaaatctagaagagccaaatgaggatggagtttccattcttttctacttacaaaaaatttacccagatgaatggaaaaatttcctcgaaagggttggctgcaagaatgaagagggactccgtgaagatgaagaactagaagagaagcttcgtctttgggcgtcgtatagggggcagacattaacaagaactgtaagagggatgatgtactatcgaaaagctttggagcttcaggcttttcttgatatggcggaagatgatgatcttatggaaggttacagagcaacagaagtaatgcccgaggactcgcaattaatgactcaatgcaaggctatagctgacatgaagtttacatatgttgtctcatgccaacaatatggaattcagaagcgttctaatgagccttgcgcacatgatattttgagactaatgacggaatatccatcacttcgggtcgcctatattgatgaagttgaagcgcctagccaagatagaaacaagaagattgaaaaggtttactactcagtgttggtgaaggcttctgttacaaaacctgatgagcctggtcagagccttgatcaggtcatctacaagataaagctaccaggtaatgccattttaggtgaaggaaagccagaaaatcagaaccatgcaataatattcaccagaggcgaatgcctccaaactatagatatgaatcaggagcactatatggaggaggctttgaaaatgagaaatctgctgcaagagtttgagaagaaacatggagtgagatatccatcgatacttggagtcagagaacacatatttacgggcagtgtgtcatcccttgcatggttcatgtcaaatcaggaaactagtttcgtaacaattggacaacgagtgcttgccaatccgttgagggttcgttttcattatggtcatcctgatatcttcgatcgccttttccacattacgaggggtggtgtgagtaaagcatccaaaattatcaatctcagtgaggacatatttgcaggattcaattccacattgcgtgaaggcaatgttactcaccacgagtacatgcaagttggcaagggaagggatgtgggtctcaatcaaatatctctgtttgaggcaaagatagcaaatggcaatggcgaacagacgctgagccgtgacatctaccggctgggtcatcgctttgatttcttcagaatgctatcttgctactatacaacaattggtttctacttcagtacaatgattacagtgtggactgtatatgttttcctctatgggcggttatatcttgtacttagtggacttgatgaagcgctggctactggaaggaggtttgtgcacaatgcacctctccaggttgcgcttgcatcggagtcttttgtgcagcttgggtttttgatggcgctacccatgatgatggaaatcggtttggagagaggattcagaacagcattgagtgacttcatactgatgcagcttcagttggcctcagttttcttcacgttctcattgggaacaaaaactcattactacggaaggacattactccatggaggagctgaatacagagccactggacgtgggtttgtggtgttccatgcgaaatttgctgacaactatcgactctattcccgtagccattttgtcaagggcattgagctgatgattctactagttgtgtatgaaatatttagccagccatatagaggggctgtaacttacatcttcatcaccgtgtccatgtggttcatggtgggcacttggctctttgcaccattcctgttcaatccttctggatttgagtggcagaagattgtggacgactggaccgattggcacaagtggatcagcaatcgtggaggtatcggtgtagcaccagagaaaagctgggagtcatggtgggaaaaggagcaagagccccttcgatactccgggaagcgcggtactgttgttgaaatactgcttgcgctgcgtttctttatctaccagtacggacttgtgtatcatctgaatataacgaagaagataactaaggacaaccagagtgtgctggtttattgcttctcatgggttgtaatttttgtgattttgctcgttatgaagaccgtatcagtgggcaggagaaggttcagtgcagagttccagctagtgttccggttgatcaagggtctgatatttataacatttacagccatcgtggtaatcctaatagcgatccctggcatgacggtgctggacatatttgtttgcatccttgctttcatgcccactggatggggtttgctgctgattgcccaagcgatccggcctgtgatccacaagactgggctctggggctcgatcaaggctcttgcccggggctacgagatcctgatgggacttctcctgttcacgcccatcgccttcctcgcctggttcccgttcgtgtcggaattccagaccaggatgctgttcaaccaggcgttcagcagaggtctgcagatctcccgtatcctgggaggacacaagaaagaccgagggacccggaacaaagaatagggctgggctgctgctgattcaaggtttgtgtgcgccactagtatttatgtgtgaatgggtgggtagcatatggctcgagagtatctcctgaatggagattgattgatcctgaagagtagaagagactcgagtgatgtaagatgctgcaggcttgttgctttgttacctaggcgttaggcagaacagatgttttcaggatctctggcctgttaaccacatcttcccctgttcagagtgaattaattcctaatggaaactgatttgtgaattacttcctaatagaggagtgcttccaaactgatttcatgtgtgtgctgtgatattgtttagcatatagtattttaaatgtagctttgaattttcattctttcgcaacaaaaaatgaataggacaagctggtcaaacttgaaaaaaaaagttaaacgggttataatttgggacggagggagtatgatttgagaacctcatcaaatagtcttgcca

SEQ ID NO: 18605 - DNA, 7171 bp, Zea Mays
gattgtgggccgcgaaatttcattataggccccacccccgtcgctcgcccgtcgcccccacccctcggtatatccgcctccgcccggcgcctccctctgcctcctctgctccgccctgccgccgcaaggatccaaaccccgaattttgctctctttttatggcactgtgcttttgagaaggcctttaattgtgctgtctgggccacggaacggcaatgtcgcagcttggattagctgcaactgcctcgaaggccttgccactactccctaatcgccagagaagtccagctgggactacatttccatcatctgcattgccgaggccctcaaaccgaaggaaaagccatactcgttcacttcgtgatggtggaaatgaggtatcagatgccaaaaagcacagccagtcagttcgtcaaggtcttgctggcattatcgacatcccaagtgacgcagtttcggaagtcgatatttcacatggacctaaggatcctagggggccaacagattcctatcaaatgaatgggattatcaatgaaacacataatggaagacatgcctcagggtccatggttgttgaattttgtgcagcactaggtggcaaaacaccaattcacagtatattagtggccaacaatggaatggcggcaacaaagttcatgaggagtgtccgtacatgggctaatgatacttttggatctgagaaggcaattcatctcatagctatggcaactccggaagacatgaggataaatgcagaacacatcagacttgctgatcaattcgtagaggtgcctggtggaacaaacaataataactatgccaacgttcaactcatagtggagatagcagaaagagtaggtgtttctgctgtttggcctggttggggtcatgcttctgagaatcctgagctgccggatgcattgaccgcaaaaggaatcgtttttcttgggccaccagcaacatcaatgaatgcattgggagataaggttggttcagctctcattgctcaagcagccggggtcccaactcttgcttggagtggatcgcatgttgaagttccattagagtgctgcttagacgcgatacctgaggagatgtatagaaaagcttgtgttactaccacagaggaggcagttgcaagttgtcaagtggttggttatcctgccatgattaaggcatcctggggaggtggtggtaaaggaataagaaaggttcataatgatgatgaggttagagcgctgtttaagcaagtacaaggtgaagtccctggctccccaatatttatcatgaggcttgcatcccaggagataagttttaaaagcaagcctaatgtttgggcctacttctcagtaaagtctggtggaggcattcatgaatttgctgattctcagtttggacatgtttttgcatatggactctctagaccagcagctataacaaacatgtctcttgcattaaaagagattcagattcgtggagaaattcattcaaatgttgattacacagttgacctcttaaacgcttcagacttcagagaaaacaagatccacactggttggctggatacaagaatagctatgcgtgttcaagctgagaggcccccatggtatatctcagtggttggaggtgctttatataaaacagtaaccaccaatgcagccactgtttctgaatatgttagttatctcaccaaaggccagattccaccaaagcatatatcccttgtcaattcaacagttaatttgaatatagaagggagcaaatacacaattgaaactgtcaggactgggcatggtaggtacaagttgcgaatgaatgattcaacagttgaggcgaatgtacaatctttatgtgatggtggcctcttaatgcagttggatggaaacagccatgtgatttatgcagaagaagaagctggcggtacacggcttcagattaatggaaagacatgcttgttgcagaatgaccatgatccatcaaagttattagctgagactccctgcaaacttcttcgctttttggttgctgatggtgctcatgttggtgcggatgtgccatatgcggaagttgaggttatgaagatgtgcatgcctctcttgtcacctgcttctggtgtcattcattgtatgatgtctgagggccaggcgttgcaggctggtgatcttatagcaaggctggatcttgatgacccttctgctgtgaaaagagctgaaccatttgatggaatgtttccactaatggacctccctgttgctgcctctagtcaagtacacaaaagatatgctgcaagtttgaatgctgctcgaatggtccttgcaggatatgagcacaatatcaatgaagtcgttcaagatttggtatgctgcctggacaatcctgagcttccttttctacagtgggatgaactaatgtctgttctagcaacgaggcttccaagaaatctcaagagtgagttagaggataaatacaaggaatacaagttgaatttttaccatgggaaaaacaaggacttcccatccaagttgctaagagacatcgtcgaggaaaatcttgcatatggttcagagaaggaaaaggctacaaatgagcgacttgttgagcctcttatgaacctactgaagtcatatgagggtgggagagaaagccatgcacattttgttgtcaagtctctttttgaggagtatcttaccgtggaagaacttttcagtgatggcattcagtctgacgtgattgaaaccttgcgtcatcagcacagtaaagacctgcagaaggttgtagacatcgtgctgtctcaccagggtgtgaggaacaaagctaagcttgtaacagcacttatggaaaagctggtttatccaaatcctggtgcgtacagggatctgttggttcgcttttcgtccctcaatcataaaagatattataagttggcccttaaagcaagtgaacttcttgaacaaaccaaactaagtgaactctgttccagcattgcaagaagcctttcagatctggggatgcataagggagaaatgactattaaggatagcatggaagatttagtctctgccccattgcctgttgaagatgctcttatttctttgtttgattacagtgatccaactgttcagcagaaagtgattgtgacatacatatcacgattgtaccagcctcatcttgtgaaggatagcatccaaatgaaattcaaagaatctggtgctattgttttttgggaattttctgaagggcatgttgatactagaaatggacaaggggctattcttggtgggaagagatggggtgccatggtcgttctcagatcacttgaatctgcatcaacagccattatggctgcattaaaagattctgtacagtacaacaactctgaggtcaacacaatgcacattgtgttattgaatgctgaaactgaaagtaatataagtgggacaagtgatgaccaagctcaacataggatggaaaagcttaccaagatactgaaggatagtagtgttgcaagtgatctccaagctgctggtttgaaggttataagttgcattgttcaaagagatgcaggtcgcatgccaatgcgccacacattcctctggtttgatgaaaagaactgttatgaagaagagcatattctccggcatgtggagcctcccctctctgcacttcttgaattgggtaagttgaaagtgaaaggatacaacgaaatgaagtatactccatcacgtgatcgtcaatggcatatctacacactaagaaatactgaaaaccccaaaatgttgcatagggtatttttccgaactattgtcaggcaacccaatgcaggcaacaagtttacgtcggcacaggtcagcgacactggattaggatgtcctgaagaatctctgtcatttacatcgaatagcatcttaagatcactgatgactgctatagaagaattagagcttcatgcgattaggacaggtcattctcacatgtttttgtgcatactgaaagaacaaaagcttcttgatctcgtcccattttcagggagtacaattgttgacgttggccaagatgaagctactgcttgttcacttttaagatcaatggctttgaagatacatgaacttgttggtgcaaggatgcatcatctttctgtatgccagtgggaggtgaaactcaagttggactgtgatggacctgcaagtggtacctggagagtcgtaactacaaatgtcactagtcacacctgcaccattgatatctaccgagaagtggaagatacagaatcgcagaagttactataccattcagctacttcgtcagctggtccaatgcatggtgttgcactgaataatccttatcaacctttgagtgtgattgatctaaagcgctgctctgctaggaacaacagaacaacatattgctacgattttccgctggcatttgaaactgcactgcagaagtcatggcaatccaactgttctagtgttcctgaaggcagtgaaaatagtaaatcctacgtgaaatcaactgagctggtgtttgctgaaaaacatgggtcctggggcactcctataattcccatggaacgtcctgctgggctcaatgacattggtatggtcgcttggatcttggaaatgtcaacacctgaatttcccaatggcaggcagattattgttgtagcaaatgatattactttcagagctggatcattcggcccaagggaagatgcattttttgaagctgtcaccaacctggcttgcgaaaggaagcttccccttatatacttggcagcaaactctggtgctaggattggcatagctgatgaagtgaaatcttgcttccgtgttgggtggtctgatgaacgcagccctgaacgagggtttcagtacatctatctgactgaagaagactatgctcgtattagctcttctgttatagcacataagctgcagctagataatggtgaaattaggtggattattgactctgttgtgggcaaggaggatgggcttggtgttgagaacatacatggaagtgctgctattgccagtgcttattctagggcatatgaggagacatttacacttacatttgtgactgggcggactgtaggaataggagcctatcttgctcgacttggtatacggtgcatacagcgccttgaccagcctattattttaacagggttttctgccctgaacaagctccttgggcgagaagtgtacagctcccacatgcagctgggtggtcctaagatcatggcgaccaatggtgttgtccacttgaccgtttcagatgatcttgaaggtgtttccaatatattgaggtggctcagctatgttcctgcaaacattggtggacctcttcctattaccaaacctttggaccctccagatagacctgtcgcatacatccctgagaacacatgcgatccgcgtgcagccatccgtggtgtagatgacagccaagggaaatggttgggtggtatgtttgacaaagacagctttgtggagacatttgaaggatgggcaaaaacagtggttactggcagagcaaagcttggaggaattcctgtgggtgttatagctgtggagacacagaccatgatgcagctcatccctgctgatccaggtcaacttgattcccatgagcgatctgttcctcgggctggacaagtgtggttcccagattctgcaaccaagacagctcaggcattattagacttcaaccgtgaaggattgcctctgttcatcctggctaactggagaggcttttctgggggacagagagatctctttgaaggtattcttcaggctgggtcagcaattgttgagaaccttaggacatataatcagcctgcgtttgtctacattcctatggctggagagcttcgtggaggagcttgggttgtgatcgatagcaaaataaatccagaccgcattgagtgttatgctgagaggactgccaaaggtaatgtgctcgaacctcaagggttaattgaaattaagttcaggtcagaggaactccaagactgtatgggcaggcttgacccagagttgataaatctgaaagcaaaacttcaagatgcaaagcatggaaatggaagtctaccagacatagaatcgcttcagaagagtatagaagcgcgtacaaaacagttgttacctttatatacccagattgcagtacgctttgctgaattgcatgatacttccctgagaatggcagctaaaggcgtgattaagaaagttgtagactgggaagaatcacgctctttcttctataaaaggctacggaggaggatctctgaagatcttcttgcaaaagaaataagacgaataattggtgacaacttcacgcaccaatcggcgatggagcttatcaatgaatggtacctggcttctcaggccacaacaggaagcactgctggatgggatgatgatgatgcttttgttgcctggaaggacagtcctgaaaactacaagggatatatccaagagctaagggctcaaaaagtatctcagtcgctctctgatcttgctgactccagttcagatctacaagcattctcgcagggtctttctacactattagataagatggatccttctcagagagtgaagtttgttcaggaagtcaagaaggttcttggatgatgatatgataccaacacatccaacacaatatgcgcatgctacatgttatttttcaagtacatacatagaaggatattgcttggccttgattgatcatgtctgatctaagtcgatcattattttcttgaaacttcctttcggacgtggtgctatggttgatgaatttggatgtgtgcgttctgccaggtgtaagcccaaaggtttatacagaccgagttaaggttaggaagagcacgagtgaacttgttctggttttgcagtggttaaggcagaaagttgtttcactgtagttctgagatgtattaccagcggcgctgtaattttagggtgtataatgcggatgctagtaaacaattgagtggttcattaaattttgaactcgaataatatgtttctgtaggcacatgtgacgtaccactacatgaaataaatgtcgctgaactagggcaccagagttttggtaggactaaggttttgtttggttatgggataaggtgagcatctccagcgttcccaaacttgaatttccc

SEQ ID NO: 18606 - DNA, 889 bp, Zea Mays
aggtttttaacatggatgctagaaggtttttaacatggatgctagaaggtttgttagtgcaatatattcaagcaagcacgtgcaaccaatcacacaaatagtgatgaatttgcccaatgacgctgttgaatttttagatgtgttcaaagggattttatgcaatactaaatcagaactgcattgtgtgatgccaatgatccatgtgtacggattttctaaagctgaggatccagagcatgacttccatgagaggataaatttaacgttaggcgagaacatcgacactgttgaaatgcacagagtacggcttgttgcacccggaaaatggatgatatgtgcaacttttactcttccacagtcagtggcgtctgcacagccgaattacattacctgttgattttttgtactctctccgtcttaaaatattggcaacgactgttatgcaagcagtccttctgtgcaagcgtgcaagcaaaccatatgatccattagattacgatccaatcacagatacaaccatgtttgttagaggttttttataaagattattgagctgttggtggaagggtttaagtgttaaatgtgacatacggttggatcacgatctaatggatcaaatggtttgcttgcacgcttgcacagaaggactgcttgtatagcagtcgttgcctaaaatattagtcgttttagctcagctctggatttttatgtctatatccaaagacatgtaaaacatataaatcaaatgttatatgaatttattaattgtcgaaaatgaattttaatttgggatagagggagtactattcttactgcagcccctcgtatcttctgtactgtcgtcgaatacttcctatcagattatatagatgatgcccttgatcatctc

SEQ ID NO: 18607 - DNA, 1063 bp, Zea Mays
ccctgacttaacatggaagaaaaatacatttatgtattatttaaacaacttttttcatagcacatgtctagtgcagtggtgagaagccttcccattgaggcaaaggtctaggctcgacgcagtctctctgaaaaaatagagggattattcaactggagttcagtcattatgatgtcaaatcgtctaaaacaataccagcaaaggattttgcattgtccatggttgcttctgctgacatgaaccatatcaacaagctgcttgatagagttgatagtttggtcaaggagccagatctgaaggacatacgcatcacctttgaggagtttaaggcatttgctgatttgcgacgaagattggagccactgtcgatggctatctttgcttacggtaaattgaatgggttattgacgaaggaggatctaaaacgtgcagcgcaacatgtttgcggggtcgacttaacagatagagtagtagacatcattttccatgtgttcgacacaaatcaggatgggaacttgagcccagaagagttcttaagagcgttacaaagaagagaaactgatattcgtgaaccaacaataccaggtccattggggttcttgtcttgctggttcagtggtaggaagtgttcttcactaaaacatgtggttatctgattgagcccctatttgatcctcacggcgcagaaggtaatcaccaagcagtgcattgctgatcgttacaacggacttcactgtatgtcgtcttggtggccgaagcttgactagcagtaacagctctaattgtaaatcgtgtcttctgtagccctaggactgagtgatatacatcgttattctcacgtgtaaattaaaccccatatggccatatggcttcaatatatgaaacattgtcatttagctttatttttagttgaaaacgtgactcacttttgccggaaccgtagcgttagagtgccaaacagaccaaccaggtagcaggcaacaatcagccactaacgtcaagacaaaagatttgtagtttttctttcttttttgcgagctgtgtgaatctctcttataaaacc

SEQ ID NO: 18608 - DNA, 149 bp, Zea Mays
tgcagcgagaagaacgtcgtcctgggcgagctagagacgatggagcagagggcatgtgtagtggctagcgaagaagctcgcgcgcggggaagaggagtcgcggcacgcgccatggagagagatggggcgagcacagggaggaacagctg

SEQ ID NO: 18609 - DNA, 3954 bp, Zea Mays
tcccctcgcgatttccacctcctcccccacccccacctccgtaacccacttccaggtgggccccccacatcgccgccggtgacacgcacctccctccctgcctcccccgctaccgaccaccacgtccacgcccccggtcatgacgacctcgccgccgcccgccgagcaggaacagcaggaggaagaggaggtgctggtgccgcatggcccgcaccaggagctgcccaatggagcgcagccaatggaagttgtgcctgctgagccagctgctaccgtggagaaccaacagatagaggatccaccaatctcgagatttacttggaccattgagaatttatcaagagttagcacaaagaagctctactctgaaatttttgttgttggaggctacaagtggcgaattttgattttccctcgggggaataatgttgaattcttatctatgtatttggatgtagctgattctggagtcttgccctatggatggactagatacgcacaattcagcctctctgtggttaatcagattcacaacaagttcacaataagaaaagaaacacaacatcagttctctgctcgagaaagtgattggggtttcacttcatttatgccgctgggtgaactctacaacccaagtaggggttatcttgtaaatgatacttgtatagtggaagctgaagttgctgtgtgtaaagttgttgagtattggagttatgactctaaaaaggaaactggctatgttggtcttaaaaatcagggtgctacctgctatatgaattctcttcttcagacactctaccacattccgtatttcagaaaggctgtttatcacatgcccaccaccgagaacgatatgccctcaggaagcatcccactagctctacagtcactcttttataagttgcagtataatgacagcagtgtctctacaaaggagctcacaaaatcgtttgggtgggatatgcatgattcatttatgcaacatgatgtacaagaattgaacagagttctttccgagaagttggaagataagatgaagggaactgttgtggagggaacgatacaacaattgtttgaagggcaccacatgaactacattgagtatctccagcttgatgtcaaaggttgtcaggatgtctatgcttcatttgataagtacgtagaagtggagcgtctggaaggtgacaacaagtatcatgccgacaaacatggcctgcaggtcctagagccctctgaggcgtctatggaccacaatgggaggcaacatgctcatcgctactggatgtcttcaattccttgtaggtgtgttaaggatgcaaaaaaaggagttctttttatcgacttccctcctgttttgcaacttcagctaaaacgttttgagtatgatttcatgcgtgacacgatggtgaagataaacgatcgttatgaatttccactccaattggatcttgatagagataatggaaaatatttatctcctgatgctgacaggaatgtgcgtaatctttatacccttcacagtgttcttgtccatagtggtggtgttcatggtggacattactatgctttcatacgacctacactttctgatcaatggttcaagtttgatgatgagcgtgtgacaaaagaagatgcaaagagggcactagaagagcaatatggtggtgaggaggagctacctcagacaaatcctggcttaaacaacaccccattcaagtttactaaatattcaaatgcatacatgcttgtgtacattcgtgaaagtgacaaggacaaaattatatgtaatgtggatgagaaagatatagcggagcatcttcggattagattagaaaatgaccgtgaagagaaggaacgtcggaagaaggaaaaagcggaggcacacctctatactataatcaaggttgcaagggatgatgacttaaaagctcagatagggaaagacatatattttgatcttgttgatcatgataaagtcccaagcttccgtatccagaaacagatgacctttgctcaattcaaggaggaggtagcaaaagagtttggtattcctacacagtttcaacgattttggctgtgggccaagcgacaaaaccatacctaccgacctaacaggccattgtgtcctcaagacgaagcacatactgttgggcagctaaaggaactggtgaacaaggcccacaacgcagaactgaaactgttcttggaagttgaacttggactggaccttaaacctcttcctcttcccgacaagactagagaagatatatttcttttcttcaaactctatgaacctgaaaaggaacagctgcggtatgttggtaggctttttgtaaaggcttcaggaagaccacaggacattctgctgaagttaaggatgttggcaggtttttcacaggatgatgatattgaactttatgaggaaattaagttcgagcccaatgtgatgtgtgaatacattgacaacaggcttctgtttcgatcttgccagcttgaagacggggatataatttgttttcaaaagccttcaaaaccagatagtgcagaccgatatcgatttcctgacgtcccatcctttttgacgtatatacgtaaccggcaggtggtgcacttccgttcattggagaagcccaaggacgacgaattttgccttgagatgtcaaagattttcacatatgatcaagtcgtggaaaaagtagctgaaaaacttggcgtggatgacccatcgaaaattcgtcttacatcacataattgttattcgcaacagcctaagcctcaaccaataaagtacagaggcgttgaacgtctactggatatgctgattcattataaccagacttctgatattctgtactatgaagtattggacataccacttccagaattacaagcgctgaagacattaaaagttacctaccatcatgccacaaaagatgaggtgtcagttcacagtataagattaccaaaaaacagcactgttggcgatgtgctgaatgatatcaaaacgaaggttgagttgtctcataccaatgctgagctaagattacttgaggtcttttatcacaagatatacaaggtatttgcaccaaatgaaaagattgaaaacatcaatgatcagtactggacactgcgtgcagaggaggttccagaggaggagaaaaatcttggccccttcgatcgtttgattcatgtatatcattttacaaaagacactcaaaaccaaacgcaagttcagaactttggagaacctttttttatggttattcgtgaggatgagaccctatcttctatcaaagaacgtatacagaaaaagcttaaggttccagatgaggatttctcaaagtggaagtttgcatacatttcactcggtcgtcctgactattttgaagattcagatactgtagccctaaaattccagagaaacatgtatggagcttgggagcagtatcttggactggaacatccggacacggctcctaggaaggcacacacggctaatcagaaccggcattcattcgagagacctgtaaaaatttataactaggcatgttagaaattgagcgatgagctgccgctcaataccaagccaggctgaagttgctggcttgaaatagagagcatgttgctcaggtttttcgatggagctgtggaactagttcagaggagactgatcgggcgacttgtcatctttcctgtttgttttgctgccccggatatataaagttgtacagagatgaccccaccagacaattgtctttagtagataagataactttttacagtcgagtggccgatgttttagtcgatcactctgttctgcagttggtggtggtgctaggtggccttgagctgttgagggtacttgtctttcgactctttctgtatattattgacgcggcggatgtttgtaattccaatgatacatttcttacttgctggtttccggtgctttcc

SEQ ID NO: 18610 - DNA, 669 bp, Zea Mays
catgatacaaactaaatagtcgtcgcagttatatcagacaaatattagagtaacacatttgagttactaataattacgtcaacatggattcataaagcgtaagttaactactataaattagtttaatgggagagtctaattgactaacattagttacacaaaacataattaattatttaaaacgtgagacatgatgaaacgataatattatcgcgtagacgatgctcaccccgtgacgacggtggacgaccggatgggctcgcgtcgtgaggacgtgctgcgcacacaacgaacgacggcgaggctgccgctacgccacacacattacgccgggattacgcaggatgcacgtaaggctgcgccgagggcgcacgcgaacgattcgcgggcaagccgtgggcacgctggccacgcgccacgggcgcatgcagccgcgccgggggcgagatggccgtgccgggggcacagctggccacgccgggggaaacacggccatagccgcagggctgcacacagggttggcgcgcagggctccgccctagccaccgcgcttggcagcaggtcgtatgcgccgagggctcgccatggccgctggccgagccgacagggaccgggggaggcggttgggcaatgggtggagggagggagaaggaaatggggtgatggaga

SEQ ID NO: 18611 - DNA, 1900 bp, Zea Mays
tttgaaggcaatagaaactagttcaccagggagaggtgatgataaaggatatttgctgaccaaacttgcagtagttcttctttaaggaaatagaacttggcgtcatgacacatagaaatatgctctggacacatcagtctgttaatcctgaatgggagcaaagacatgcccaagttcaaccaggaagttcctattatgcaggcactgcaagtgattcatccaacctgggtgtgcaagttgctgtgggagttccaggaaatactgctaatgttggtatatgtgatttgcggaatcatgagtgcccgcatgttcataattcatacccacatgccggtgttacatcaagatttgtcttcccaactactatgtacaaccctagcatgtcagcagcagctgtcaacatatatattcctcagactcaaagctttggactaggcagtgtgctaccaccatctttacataatcaagttcccacaggaactattgatgagagtagcagcagtgtcaattttggtgatagtgctattggattcatgaaaaggaaaaatgcagtagttgctggaagccatcattttcttcatggatttgctgggtcaagttcatctgttcatgtgcctcagaatcctgtgcatgggccatggaatccttcatctcaatcaaattgtttacccagttctgcagcttcaaacctaccagaataccacaatagtaatgggtggccatacttagaagaatcttctgcagatgcttcaaacagtttcagttctgtggctgcttgccaggagctggcacctcatgcctgcaggttatggagtaccacagtggggatatagtaatgcagtggtcaatcctccaggaactgcagacatgtcaaatgggccactgcctcatttctgccagaatagtatgcaggcacctcaaatacaagtgtcccatcaacagttcatcggtaacaatgcggtgcatggtttaaatccttctgccacaggccttcctttacatccaagaatgctggctctcccattcaatgctgagcacacttttgggcatccaatgcacccacctctgataaaccaagttaacaatggggctttaagaattctgccataccagaatgctacagtgatggaccattcaaggatttatgaagcaggacatgttatcgatgaacatagcgatatgcgtttagatgtggataacatgacttatgaggaacttgtagcattgcaagagcagataggcgatgtcaatactggtttgacagaaagctatatccaggaaaacttgaggtccagttttcatgttccaggagcagctagcatgtctgatcagttttctgagctttctttggagaatgatgcttgcataatatgccaggaggagtataaagctaaagaacttataggaacccttgaatgcggtcacaagtaccatgtgaattgcataaagcaatggttgatgatgaaaaacctgtgccccatatgcaagacgacagctttgtcatcagatagaaggaacggatgaccgtcgccaataatgttgttggttgtttaccgcgtggcaaattagcgtggattttgtatatagacatggttgcctttatttgcccgtcccctttgctgtggacataaactgagcttcgaaacactgtacagatattttgtaggatgttttagacgttaaatggcacaatggtgtgtaaagctcccatgactgccttggtagatgccctcttcctttacattgtacattgtatttatctttactcttcaaaaaaagaagcttgaaaaccgtaagttctgtacattctggaattgaaagaaccggaaattttcttcacctgtagagctttttgctagagctttatgagattcagtggtgaatcttgaagtcgtgaaat

SEQ ID NO: 18612 - DNA, 1196 bp, Zea Mays
tactcttctgcataagcttcgagtgatgtgcattcttgaatggtggtcatatgagctgcttgttctgctttctgggatgttaccaaatgcagcacttgaaacttctgtgctctctatatgtatctctacagtaatactggtgtacaatctcccatatggcatcggaacagctgcaagcgtgcgtgtgtcaaatgaactaggcgcggggaacccagatagtgcccgcttagtagtagttgtcgccttatccattataatcttcacggcagttctggtgagcgtaactcttctatcgttgcgccatttcatcggaattgctttcagcaatgaggaggaggttgtaaattatgtcaccagaatggtaccgttgctttcgatttcagttattactgacaacctccaaggagtcctttcaggtatttctagaggctgtggttggcagcatttaggcgcctatgttaacttgggcgcgttctatcttgttggcattcctgtggcgctcgttgccggttttgctttgcatctaggaggagctgggttctggattggtatgatagctggtggagccacacaggtcactctcctaacaatcattactgcaatgacaaactggcggaagatggctgacaaagctagagatagagtatatgagggaagtctgcctatacaagcaaattgattattacgaacttgaagtcatatccgattatctccaaatttcgctgcatcctagttgtttgttgaaagagctatccatgccacggacaccctaccccccacccaaaaaaaagttggcaatgaaagtcgtaaaagatgggctatttttatacctactttgaactaggtgatgatgagaaccgtcttatcttataggacctgtttggttcagtcccagtagacctgtctggcctaggcagcgtcccaggccattgattttggacgcttgagggctacaatggaatggctgcatgcatatctgcctggtaggctgcaatccagacgtgcccatagtctacggtgcaagcaaacagctatactatacgatctattgattatcaccttagggattaatgcacaagtaggatgaaatttgatatgacagtcatgttaatgagaagagaatgagtataacaacatatgaattggggcaaaggtccttgttatatgtccttatattttttatatttcttttatta

SEQ ID NO: 18613 - DNA, 822 bp, Zea Mays
tgttcttctgatgacatctgcacaaatttggatgtgagcacacctttatagtgtgcaaggaagctctcaggctagatattttgtctcacgcctgatcccagctcacaaggaccctacatatgagcaggagtcaaggtttcctcaattgcggacactcactcctgagcaaagggctaggctaaagagcagcttcatccagttcgatgactatagtttttgcgagtggatgcgcagcctcaaattggtcccaccagaaccaagctaacacaactagtctggggggtacacttccgaacggtggatagcaacaaaatctatggcgtggcatctgatagagctttccctctaagatagatgtgatcttcatgaaccaaattatggcatcgccagatattcgtgagccgatcatacgtttggtttggtgggcagccatttaggtgcggtggaactgtatgattttgcataattcattttcttctccttttgaccatgatgtagtagagtaagttcataaacagttccttgtcaattgtcatacaggtggagaaatctacacaataagtttgtcaattgtcccaaatgttacatgtatacaacctttgtttgaagaggtctcactatattatttgaaattccttcatttctcaggggtagccgcagctctcagcctctcaccttcctgggaggatcaaggcctttgcagtataactctgccatttgcatgctagatcaattccattctgtttatgagcagatgtgaaaatgagggcctctaaaataatgttcattttgtttgcctttttgaaaccaagtgcacttttg

SEQ ID NO: 18614 - DNA, 1465 bp, Zea Mays
aaagattattaaggagtggacgacagtaaaacactggcctaagtgctagtgacacgccggatgccaaacgaatgacatcgactaccataagggagtcgcggccgaaggtgacgctggtggcgcggatggttgcgtccgtggccaactacgactacatcatggattgggagttccagatggacggtctcgtccgcattaaggttgggctgagcgggatcctgatggtgaagggcacgtcctactcccacctgagcgaggcccgcgggaacgagggcgacatgcacggcacgctgctctcggagaacgtgatcggcgtcatccacgaccactacgtgaccttccgcctggacatggacgtcgacggcgccgacaactcgttcgttcgcgtggagatggcgcggcaggagacgggccccggcgatgagtcgccccggaggagctacctcagggccacccgccgcgtggcggagaccgagaaggacgcgcgggtgcgcctcagcctctaccacccggcggagttccacgtcgtcaaccccgccaagaagacgcgcgtcggcaaccccgttggctacaaggtcgtccctgccggcaccgccgcgagcttgctggacccggaggatccgccgcagaagaggggtgctttcacaaacaatcagatatgggtgacgccctacaacaagagcgaggaatgggccggcggcctgttcgtgtaccagagcaaaggggaggacactctggatacttggtccgagagagaccgtccgatcgagaacaaggacctggtgctgtggtacacgctggggttccaccacatcccgtgccaggaggacttccccatcatgcccaccgtgtcgtcaagcttcgacctcaagccagtcaacttcttcgagagcaaccccatcctcaagcagcgcccgaccaaagaggatgatctgcccatctgtactgcctccaccgccgcgtagcctactaggagggccgggggcgaactgattaaccggagacccatcaatcagcttgcatgcattgctgtgtgttgtgctcttgctaagctttattagtacgtaccacgaacctaatgcatgggccgtatctcatagtactccgtcagttctattttatttgtcacggtttagtttaaaaatgaactaacgaacaacgaatattcgaaaacggttatgataaatgagaactttgttggtatgatcagctaatgcatggagctatcggttgtgatggactttggatgctcgctttcttttcgatctaacccgggtgttaaccctttagtcctggctggtgtaacaccaattgggactagtgcagaccttttagtcacgacgtctataaaacttgggtccgaaactaatactcacatataatcttggtcggttggaggctcgggattcagggaactaatactcacatataatcttggttggttggaggctcgggattcagaggg

SEQ ID NO: 18615 - DNA, 1316 bp, Zea Mays
tggtactatagtcgcgtgcagtaactccacatgggacattgtttgcactcggcacggtaaaaaaaaggagcggtaataaaacgtgtatagtactagtacactgtgacttggtacaaaatgtctccaaccatggctgatgactgacgaggggaagtgttcctgggtcgtcaatccatcatcatagtgagtacactattacatgcggtatggcaccggagtcggagatcatcaacaagtggtgacggcgacgtggaggagtcgaatcaaagccgaaattgcccatcaccggagtgagtcggagtcggagtcggagtcggagtcggcagcgctgtgctcgtgaccaccgaattggacgggtacaggaccgggccccggctgtggccccgtccacggatggttctcccggcgagtttgaccgtgcacctagcttgcgtcgcggggccgtggaccgagggcaggcaggctggcaggcacaggcggcggagccgaatccgaccaaggccttccccgcttttcctctagcgtcgcgccacaattcccgcctcaaaaggcgaaccggccagttggctcgtgcggcgcggcccctgctggctggctctggctgcaactgctccagtcagggtggctggccgttctgccacgagatgacgagaccaacgacttactccgctctgtatgtcgaatgtcggccacgattccggttttactatactactgtatttttttccagcctatagacgaagtcgctaggacggacctgacgagcatcaacttaacaactttccaacgcataaagtcgacatgaattccaatcatacgcacacgcgtactggtgtatgctgtgcatgcacggtgtaacccgacgccgagaacgaaatgcgcgagattttgcagccacctcgctaacccccgccggcagccaggcgcgccgaccgggacggacggagcgcgcgcgcgcgctcgggctcaccacctgacgacgaaccgcccagatcagacgacgacgacgacgccgaacgccgacaggccctggtcgtcggcgaaggaagtcacgcgacgtgtcccgcgccgcgacagacatgcatcgcctggtgacgagcccaaggcgaaggtgaaggcggtcgacgtcgcgacgtgcccggtggctactggcctgcctgcctctcgcccacgcaaggccgcgcgcgcgcgactacgtgacggacacgtcgcgcggttcccccgcgcggcgcgttgctcggtactccagcaatatgtatggacgcaggcgtcgtcgagaaggcgcgtcatgcatcaggctaactgcagcggtggac

SEQ ID NO: 18616 - DNA, 336 bp, Zea Mays
ttcctaatctcaaacgcacttgttctacagattcatggaattgctctttgctagtaggcaggaatatttgacttgacaacaacctcagcagctaccatagacttggaagtgttattagctctagagatgacgcaacattggtgttcagatctttgatgcacagattcggaatgagcagtgggcacagcttgaaagaaacaatcgattggtacaccacctttccctatcaccacgaaagacaagcatgggtgccaactgcccgagaaaagaaacgcccatccaatccatgtcccgatctggcggaattgagcatcagcattatagaaccgtcagttc

SEQ ID NO: 18617 - DNA, 2228 bp, Zea Mays
cccggaacgcgcggccgttcactcaagctctcgaataaaatttcccggttttccggtccggatcccaaatccagaaatcctacgactcgctcgtcctctcgtctcctccgatccgttccgttcgcgagccaccgatcccgccaacgggagcgaacgagaacgatcgcgtcgtcgtcgtcgcagccgccgccatggatccgacgccgcagtcacacccgatccttgcctacgtgctctcccgcctcccctcgctgcccgcggtgaggacgccgaggtccccgcgcgagcgggacctcgagcagccgtccccgcgcacgccgtcgggtgccgcggagatcgacttggtggggcgcatgccaggcctgcgccacccgtccgtgctgtctgccatgacccgcgccgtcgccgacgtctcctcggcgcgcgacgcgatccgcctcctggggccccggcccgaccacgagcaagtcgacgcctcccgcgaacttctccgcttggccgatgctgggaagaaggcagacgccaacgcggacgtgaagacgaaggatctcgacgaggagaagctggccaagtgccgggaggtggtgcggctggaggaggaccacgaggcgtacggcgccctgctgcgcgacgcggaggggaagctggagcacgtgtaccagatggcgatgcacgggagggacatcaagaaggtgggcggcggtgatggcaaaggggaagagggttccggggcggtggacgaggaggtggtgcgggtgctcaaggacgcgggggaagggaaggtggtggagcgggtgaacctcgccgatcggcagatgcgcctactgccggagcccattggccggatccgcggcctcctcgcgctcgacgtctcccgcaaccagctcaaggttagggactcgtacctaagcattcgcgccgtctccctacatcatgcattgtgacgtccacgaattttctgaatgagttgttgggattggtcgaatggcagtattttgtagtgatcatatcgaagttcattctcccttgcacattgcacaaagtgctttgaaattaaagtggttttctgtggaattaaagtggttttatgaaattcttaaaccgattcacatgaaaaggtctgtacaatttcggttaaattttcgcgttcaaacggatctaaattaaactacacatgtggcgctgtggcagttcagttcacgggcgaattccctgtttggcgccttcaacagtgatgttccttgcttgaattcgcaggtgattcccgacgcgattggtgggctcgaacacctagaagaactccgcctcgcttccaacgacttggtttctcttccagactccattggccttctctccaacctcaagatcctcgacgtctccggcaacaggctgagggttctgcccgacaccatctcgaaatgcagatcgctggtggagctggacgcgagctacaacgccctggcttacctcccgacaggcatcgggcacgagctggtggacctgcagatactgcgcgtgcacctcaacaagctgcgctccctaccgtcgtcggtctgcgagatgcgatcgctgcgcctcctggacgcacacttcaacgagctccacggcctaccggccgccatcggacagctgtccgcgctggagacgctggacctgagcagcaacttcagcgacatgcgggacctgccgccatcgttcggcgacctagctggcctgcgcgagctggacctgagcaacaaccagatccgtgcgctgccggactgtttcggccggcttgccaagctggagagactccgcctggaccagaacccgctcgctgtgccaccccccgaggtggtcgccgacggcgtcgtcgcggtgaatgagtacatggcgaggcggtgggccgaggccgttgccgaagaggagcggcggcgtgcgaacgcggccgccgtggcggagagccccagggcgtccacgcccagggagtggctgacgcggagcgtgtcgtcgctgagcacctgggtgtcggacgtgacggtgaaggttgtcgggcaggagaaggtggacgatgaggacgagttcctgcagcaacagttctgaacgtgagctggcaccaccatcgcccgaccattaccattcaaataacagcagattgtttatttgtgaggatgataagacattatttaattgcttttcaaatttcattgcttaccagtttaccactttaccagttgagtgaccgtgtg

SEQ ID NO: 18618 - DNA, 230 bp, Zea Mays
cgcgcacgcgtgttcgatacaagaccggtcgggtgcaccacgtgcttgcacaactcaaatccgatcccgttcaggttgattgatttataataatacatgtgctttggttgatgtcgggcaatgcatgtatatatgtggatgtgtgtaatatgtttcgatattacgcgttggtaggatcgcgtttacgattggagaacaagaggttgttgatgtgtgcgatttgtagtttg

SEQ ID NO: 18619 - DNA, 1159 bp, Zea Mays
ggtcgaagcaacatatccgtccattcagatgtcgttgtcaatgccaatctcggcttctgggcttcgacgattacatccccgcgtacgctggcgcgagcggcgatcagctcctcaccggcgtcaacttcgcttccgccgcagccgggatccgtgacgagaccggccagcaactggggcaacggatcagcttcggcgggcagctccagaactaccaggcggcggtgcagcagctggtgagcatcctgggcgacgaggactccgcggccagccacctgagccagtgcatcttcacggtgggcatgggcagcaacgactacctcaacaactacttcatgccggcggtctactccaccagccagcagtacacgccggagcagtacgccgacgtgctcatcaaccagtactcgcagcagctccggaccctgtacagctacggggccaggaaggtggcgctcatgggcgtggggcaggtcgggtgcagccccaacgagctggcgcagcgcagcaccgacggcaccacctgcgtgccgcagatcaacggcgccatcgacatcttcaaccggaagctcgtcgccctcgtcgaccagttcaacgcgctgccgggggcgcacttcacctacataaacgtgtatgggatcttccaggacatcctgagagccccagggtcgcacggtctgacggtgacgaaccaagggtgctgcggcgtcggacggaataacgggcaggtgacgtgcttgccgttccagacgccgtgcgccaacaggaacgagtacctcttctgggacgctttccaccccacggaggcggccaacatcctcgtcggtcggagggcgtacagcgcggcgctgccgtccgacgtccaccccatggatctgcgcacgctcgccaggatctagctgtatggatcatgtgaactcgtgaagagaagcaaagcttacagcgtcttccttttttttgttctttgtttcccctcgtgattgtattgcttaccactcgcaaagggacgtatggtccctccatctaaactatatatataaacatgatatatactccctcgctcccgcccaatatatatactgttcgttgtacctttaaaattatgtgtccatattcaaatagatgacaatacatctagacacgtatataaattaaaacacat

SEQ ID NO: 18620 - DNA, 1273 bp, Zea Mays
tgctaatctgtcctttataatgtcaggaaaaacaacagtccatgctagtaaacataggacgcttctgagtttgctgcacacaaggcattttcaatgcaagatagggaaaaacttgaaaaccagttgcatgacatggctttgatgattgagaggctagaggggagtcgtcaaaaactgctaatggagattgattctcaatcgtcagaaatagagaaactgtttgaggagaattcggccttatctacttcttatcaagaagccatagctattacagtacaatgggaaaaccaggttagagattgtctgaagcaaaatgaagagctccgttctcacttggagaaactaagacttgaacaagctagcctgttggaagtaagcaatatcactaccaaatcagatggacaaattgaaaacagtatctcaaacctaccagaaatggtcaccgagaatatttctctgaagggtcagcttataaaagaacagagcagatctgagagtttgttggcagagataatgaaactttcagctgagcttaggaaagcagtccaagcacagaataaccttgtacgcttgtacaggcctgtattaagagacattgagagcaatctgatgaaaatgaaacaagaaacttatgcgacgatccaatgatacatggtgtcaaactcaatccacgatactgtggaatggccgcatagtcacaagctccaccgtaggcctggttcggttgcatctgaattggagacgcaaccaacaagcccttgctcaagatgctggtgaatgtattggtctcatgccattttcaagatgctggtggaaagcagttctttcggtggctaccattcataagtagagttctgtcgagatcgttcaacctgtatcatactcttgtatacccgattcccaccggttcatcttataaactgggggcaaatggagaaaaagattggttagggcttgtttggtgaaaaagattggttagggcttgtttggttacaacttacaagggaggtggaggggactggagggaaataaactaatttttcccttaatccccacatttcccttctaaccaaaacaaattattatccctgctctcagtccacaaattgggcgcaacaactttttaaatcatgtcatttgcgtccgcatgttcgtttggccgttggatgggtccgcatgtagggtgtatttggtttggtgaatgaggtggtctatttctctcttctcacttttttatttggtttgtgaaatataatagttaatctatcattat

SEQ ID NO: 18621 - DNA, 1748 bp, Zea Mays
gcctccggggctctcttgcgctcacactcccaccgccgcatatccgagtagagcgccacgaactccacgagctctccgcccagcgagactgtccgatgccccctccttcacccgcctcgcaagtgcgcacttgcgatgctggcgccgcgtagtcgcccacgcgcgggacggtgagtgagatggcgcgctacttccgcagcagcaacctcgcctctaggatcttcgaccgtcagctcatctccccgctccctggcgctaccgttaacacgattagacagttttatgaaaatttggtcccaagctatactatatatgacatagattgcccagattattcgtttcgcaagttcactgatgatgggaaatatcttgtggcttttagccgaaaccatcaagatttgattgtataccgtccaatctggttcacatattcatgcaatgaagaatgtgaaactcatgagcttccgccaaaggcaaagaagtttgacagcttctttaagcagctttattcaattcctcttgcatctagcaatgagtatatttgcaaggactttttcctgtacatggaatgccatcgatttggtttatttgcaacatctactgcacaaagtaacgaatcaactgccactgagggtgcaatacatggggtgccattgattgagaaaataactttccatcttgtgaggctagaagatggtgtgatcctggatgaaaaggctttctgcaatgattttatcaatctggcacatagtattggtgcttacatgtatgaggacctgctttgtattgtttctttgcgataccaaacaatacatatcctacagatacgagattcaggcaaccttgttgaggtacgcaacattggtgcattctgtcgggaagatgatgagctatttcttcactcacatattcagactggttatgggggttcttttcttcctggcataaagcaacggttgttgtcatatattttttgcaagacgtggaatgaggttccagatcagactttgagggtccaacatctaaagaagaagttctattttcacttccaagattatgttgatcttatcatatggaaggtacagtttttggatcgccatcacctatttgtcaagtttggtagtgtggatggaggggtttctcggagtactgaccaaaacctagcattctttgccgtgtacaacatggagacaacagatatcgtttcacttcatcagaattcttcggaggatatctatgccttgtttgaacaattttatgatcattttcatgcaaatccacaagcttcatcacatggaaaatttatctcctctcattccaatgatattcatgctttggatcaacttcgggttataaaaaacaaagcaagtagctcctcacagtttgtgaaaaagatgatgacgtcattaccttacacttgccaatcacaaagtccttcaccgtacttcgacctgtctctttttaggtatgatgagaagctgatttcagcaattgatcggcatcggcattgcacagagcatccaataaaatttatgtcagtgaggcaaaatgttgtcaaatttaagatcaagccaggttcagattctggtgcttctgacagcagagcaaaaagaatctcgtccttcttgtttcacccatttttcccgcttgcactttcgattcagcagacttatatgcagccaactgttgtcaacatccatttcaggagatagaaaagtctatacagaaaggagttacagaatgaggga

SEQ ID NO: 18622 - DNA, 616 bp, Zea Mays
ggagccgcataaactattcggttggtagctcgacaaagattgaaatgtggggaattcctattgttgctcattggacatgtttttgtgaaggaaaactctcccatacatgaacaaatgaaaaatctgtttggtgagcagtgcgcatcacttatatgggcagcaagccggttcggctccaccttggatgcagagcaaaggcagacgaccttgcaaatacaagcaatgagagttgtcgaatccttggaaccctactaggactggtgcattcatctgtgtaacttacgggtgatgacaatttgatgtctctaatctgagctgcatgctccattttgttcatgcaagctttgttgtcattctcttctgtgtaaagccattcttatgctactctttttagtaagctttgttaaaaggatcgtattagttccatttgagaacaatgcattagggagacactaggaaaacattaaaatatccattttgttgtggtagatttgagctgttgtacctgtgattcaaataaaagtggttagtccaaagtgctagtgaatgttattgatcccttaactgattaaactgaatacagtcggttcttgttcagtgcattggcacgcattgc

SEQ ID NO: 18623 - DNA, 1939 bp, Zea Mays
cccactcccagctagctttcctccccgttttcgttttccggtgccttgcttgttctagtagccggttctcaatcctcacccaagcgcctctaggccgaggctcggaggccacggcgaggaggagcagcagctgccagcaggggaggacacggatagtagccggcctcccgccgcccgaggcccaaccgcccccgcaattactgttgttgctgcgtgcagagcggttttgaattgccgtctcctacccaggaataatccatggccccgcctccgccatggcttgccgccctcctcttcctcctcctacccgcgctgctgccggcggtcggctccgtctccggcgcggcggctgccggcatcttccgggtgcggcgtaagttaccagccggagttggaggggacactggcgccaacatcagcgcccttcgtgcccacgacggtcgccgccacggccgccttctcgcggctgccgacctcccgctcggtggcctaggtctccccactgacaccgggctctacttcacggagatcaagctcgggacgccgcccaagcgctactacgtccaggtcgacactggcagcgacatcctgtgggttaactgcatctcctgctcaaaatgcccccgcaagagcggactcgggttagacttgacgttctatgaccccaaggcgtcctcgagcgggagcacggtgtcctgcgatcagggattctgcgcggccacctatggggggaagctgccagggtgcactgccaatgtgccctgcgagtacagcgtcatgtacggtgatggtagctcaacgactgggttcttcatcaccgatgcgctgcagtttgatcaggtgactggggatggacagacacagcctggcaatgctaccatcacattcgggtgtggtgctcagcaaggtggggatttgggcaactcaaaccaagctcttgatggaattcttggttttggtcaggcaaatacgtcaatgttatcacagctagctgctgctggtaaagcgaagaagatatttgctcattgcttggataccataaagggtggtggaatttttgctattggaaatgttgttcagccaaaagtaaaaacaacaccgttagtagctgacatgccgcactacaatgtgaaccttaagtcaattgatgttggtggcactacattacagctcccggctcatgtttttgaaacaggagagaaaaaaggcaccataatcgacagtggtactaccttgacataccttccagaattggttttcaaacaagtaatggatgtggtatttagcaagcatcgagatatagccttccataatttgcaagattttttgtgtttccaatattctggaagtgtagatgatggattcccgaccatcaccttccattttgaggatgatcttgcactgcatgtgtatccacatgagtactttttcccaaatgggaatgacatatactgtgtgggattccaaaatggtgcattacaatcaaaagatgggaaggacattgtgcttatgggagatcttgtgctttcaaacaagttggttgtctatgacttggaaaatcaagtcatcgggtggactgactataactgttcgtcgagcattaaaattaaggacgacaagacaggcacaacctatactgtcgaatcacatgacatatcctccggatggaaattccactggcacaagtccctggttctgttgttggtaacaatggtgtggagctatttatagtacactaactctattgtacaacacgaacacgcacttaccgaaattcatttgattcgtattcttttcacaaaaaagaatatctagggttttaacttgcgttctctgaccacggaaaacgatgaaaacaaaaacgttgtgtgccatacaatgagcctgtgtgtcactagtgttatgctgagacaagtgttgatcccacttttgggcaggc

SEQ ID NO: 18624 - DNA, 1932 bp, Zea Mays
catgatctaagtttgtataaagggccaagggcaatggccttggaagatgggagcccagctacttttactccacaagtgattgctaatgcatttgtcaaacaatactatcaaactcttcgatatgccagagaggatgcctataaattctataatgacaaaagtattcttggtcgaacagattctaatgggaaaatgatttgtgtaaccacaattgatgatatcaaggagcaacttgtgtctacagattgtgctgactgtttgatagagatcgagactgttgatgcacagccatcccatgtggatggtgtgatcattttggttgctggatattttacaacggctgttgtgaaacagaagtttatacaatcattttttctcgctccacaggaaaatagtggctattatgttttgaatgatacattcagacttactgggatttcattcgaggtgaaggtagttgcagctaaccatgataacaaaagcacacaaattaccaccctgcccaatgagccagaaatagattcatttaaggagagtgaagtgccaggtgtaccacctgcaggaaacattctcgtcaatgatggagttatcagcacctctgcaaatgttgtttctccagttaagaatgaccctgttgttgagacatgtgtgaaagtggttaacgaggatgttgtgaagatacctgtagccgctccagcttcaactcctgttacagctgaggaagttgttaacaaggattttgtgaagattcctgagtctgctccggctctcccttcatcagttgagaaggctgctccagcacctcccgcatcagttgagaaggctgctgcagcacctcccgcatcagttgagaaaggtgctccagctcctcgcacaccagttgagaaggaagtaactaggaagacttatgcatcagttgttaaaatcccgagggaggacacacagcctgccccagctgccagaccctccaagcccaacctaaatataaagatggttcaaaatacggagaaaaatgtgtcctcaccatcgaaacctgctcatgctactgttaatgccctaccgggcgataagggtgttcctaaaaacaaatcacctgatgagccagggtactcaatttttgttaagaatttaccttttgaagcaactgttgaaatggtcgaacaagagttcagcaagtttggtgctattaaatctggtggtgtacaagtcaaatgccagcctgatcagttttgctttggctttgtcgaatttgagtctcagcaatccatgctagcagcaatcgagttgttgatggtgttatcacccgtggggatgacaatggcaacggcggtggcggtcggttccattctggcagaggtggtggttactatggggacggctacaagcggcagtggggcggtcagaacaacggctactacaacggcgcggataacatgaggaacgactactcaggtcgtgtccgtggaccgcaagggaacggccaccctcagaacggccacggctaccatcagaacggccacggctactactctgggaatggctaccaacagcgacgccccaacagcaatgggaacggactgagggtcgagcgcaacaatggcttcaggcagcaaggccctgcatctgcctagaccttgtcatttttgcagtccatccttgatacgaaagcagtggggatattttgatgtctataggtagatactttgtcatggctgaattttgttgtcgcggttgataagagcaatcgtgcgtcctttgactggaactgtaatgaggagtggagtcagtcgtgtcgcaaaggggaaaaaaacatctatcgaaatccctgctactcttttgtcgtgctgtcctcttcaagctgtctgcgtgtacatcggtttttctgcttagcaattggactgggcggagacaagcttctctccaattctcaca

SEQ ID NO: 18625 - DNA, 888 bp, Zea Mays
ggaccgtccgctccgccgccgtcgccttttcatgcctcgtgtcgtctgcgggtccggtcccggtggtctcggtccgaccccaacgaagggcgaggagagaggaagaggcgagatgccgcaccgagcgcggccgatgacggggctgctggtgttcatgggcgtcaacctcgcgctcttcaacaccatcactcccgtctacgacttcgtctgcttcctcccccactgggaacgaaggagagaacaccgccgaagggaacttgaaggtctgcaagcgaagggttctgtagaaactactaactgaactctctcctaggacttccagactgatctgcacgcatcatgaactcgtccatgtctttctcagtccctaagtatgcgtagcattaaaaccccccgcaaacaatggcccaatgtacacagccatcggtgaactaagccgtaaaagtagctccattgcatctgtgtactgatacacaaatttgcttgcttgagctcctatacacattacacacttgctgcttcactataggactatgtctcgcctcttcttgttgttcattggctccgcaccagctgtccctttcctcatcattgccacaaactctgaataatctatccttccgtcctacatgtgcaaaaaggtaaacttaagccttttgatataataggaaactaaaactacatatatattgctcagtacgaagaacagctactatgtcaactgaaatttacacaaagtttgttccttacgttgtcggagtccgcatctgcgatgacctctttgattttgtcggcgtcgtacaacccttgctccttcaaggcatgctcaagctcttctttagtaatgtacctgtgtggggtagacgatgcgctcttctgtgatgtatg

SEQ ID NO: 18626 - DNA, 1369 bp, Zea Mays
aattaatttcagtgttgccttttcttatttttacaggttgtacttgatgggggtattttgatttgctttctttggccaagtggtttgtagcagtcttcacagtactaaatcgacaaatattgccttcgtgatcatctttcataggatgccattgaagaatgtagaaagctctgtggcggacatggttacctgaacagcagtgggcttcctgaattgtttgctgtctatgttcctgcttgcacttatgaaggagacaatattgttctgcttttgcaggttgcaaggattctaatgaagaccttatctcaattgacatctggaaaacaacctgttggtacaatggcttacatgggcaatgtacaatatctgatgcaatgcaaatgtgctgttaacacagctgaagattggcttaaccctgttgccatacaagaggcgtttgaagccagggctctcaggatggcagtaaactgtgcccagaacataggccaagcagcaaaccaagaagaaggtttctatgagcggtcccctgatttgctagaggctgcagtagctcacatccagttggtcattgtaaccaagttcatttcgaaggtgcagcaggacattcctggacctggagtgaaggaacagctccagaacctttgcaatgtctatgccctctacattctccacaagcacctgggcgacttcctggcaaccgggtgcatcacacccaagcagggagcgctggcaaacgagcagctgggcaagctttacgcacaggtgcgtccaaatgctgttgcgctggttgatgccttcaactacacagaccactacctggggtctgtgctggggcggtacgatgggaatgtgtacccagcgctgtacgaggaggcgtggaaggaccctctgaacgagacggtggtgcccgaggggtaccacgagtacctccgccccttgctcaagcagcagctcaagctctccaggctctagtctgatcggctaccccccctggaattctccatggcggctgccttctcagaaaatctcacgcgacctccgaatgaaagtgatgtaagctactaacgattcttgttagagccaggaaagaggctctccagccaattataaatttattcctcaagctctgaggatcaagttcaagctgtggattatataggaagcacgtttaataattaataaagagggagaggatgagcatctctctgttgctgctcaagtgttgtgcgcagtgcgagtagtagaatgaatatgtatgtacgagtgcgtgtattgtatggtgaattgaagttccatttgtttgctaaaagtatatcagaaaacaatggcttgatttgcctaagtccaaaatgaaagccagattccgaac

SEQ ID NO: 18627 - DNA, 1758 bp, Zea Mays
atcgggtgttcatgtttacaccgatgccctttactggatctgcaattgtttgttgaagatggaaaataaagagttgttcaagatgggaaatgcacatacagatactgctgcactgcacaaggagtgggatgatgttctctgtccgatatgcatggaccatccgcataatgctgtccttctgttgtgcagctcccatgacaaaggatgccgatcctatatatgtgatacaagctataggcattcaaattgcctagataggttcaagaaaatgaaagtgaatgatgaggacagtccttcacagccaagctcgtccatgcctaggggtacaggaaaccaaaatgttgtccagagatctcgttttggtctcactagagagagccccaggctacacatagacatatctgtacccgatgaaacttccgatcatcaagatgccagccatagacctgctgccatagttggagaacaggaagaaaacatctacaatgaaggcccagatttgacattggaaactcacgaggttgggatcaatggttcttcagtgtcaagtgacgtgtcaagcttaaaccaattgttgtgcccactgtgcagaggggcggttagtggctggaagatcatcaaagaagctagacagtatttggatgggaaatccagagcttgctcacgagaagcctgcatgttttctggtaactacagggagatccgtagacatgccagaagggtgcaccccacaacaaggcctgctgatgttgatccctcaagacgtcgtgcgtggcaccacctggagcatcagcgggattatgctgacatagtaagcgcaataaggtccgctatgcctggggcagttgtgcttggtgattatgctattgaaggcggagaaatattttcacatgaccgggaaaccagtgaaccaagtgggtctcttctgacaacattctttctatttcatatgctcagcagtagtccgattagatcaggtgatgagccaagaggcacatcaaggggcctgagaaggcagaggagacgctatctgtggggagagaatttgttaggtctccaatatgatgatgatgatgacgacgacgataacgaaggggaggaggatgaagtggatgctgtggatgaagttcagagaccaaggagtcgtcggaggttcataagatcaagatcagaggagcgggcctaatacattggtacctgtggtaattacattctgtactgctgtgaagttctattaccatgaactcatgatgactccttgcatgatctttgcatgccagtggagatgtggatgatgtgcttccttgcttggttaaaatgctgtgcgcatccctgcaatcaaagaccaaaaggcaaatggacctcaagttcaagtttagatgatttggatgcgtctgacaccatccatgtgccctctttaatctgacgatcataagaaacactcattcttagggcaaagctggactgctctcagaccagaactgacatggaagctagcgtttggagatgctcgctccatcacaacagctggtgccgtcactcattcaccatgcctttttacctttgcactgcgtgtcatctgcatctatagtatattcttcccgtattacgtctcattgagtccatgctgctactgttctggttgatatccttgttcaaaggctataaaatttattatattttcatgtgatgatgttgtaatgctctataatttatcataccaagccttaatccacttttaaataaattaaaatcatt

SEQ ID NO: 18628 - DNA, 150 bp, Zea Mays
cagctcctcacccgcaaaaagacttcgcagctccccctcacctacactcgcaatggccggcaaggacaacagttcctgcctgctagccctgcccacacgaagccgaccgccgtccacctcactcactctacgcttcgcaaccgcccttcg

SEQ ID NO: 18629 - DNA, 711 bp, Zea Mays
cggcggctcgtgatctagctgggcgggttgggatgtcgctgggttgacaactaggcactggagaagtggatactctgatctactctgctgaacgagtttaatatttgagtatggcggcggcattgacatggcggttcaatggaagcaatggcggcacccatggcagcgccgatctggaaaggcacgtggacaaagttcaagactcagagccaccaactcctatgtcagtcatgaaaatgggcaagaaccgagtttaatgtggaggatgaggagacactttcaagcgttgctcaatgtattgagcatctacgacagagttcttcatcctcacaggacaaagagagctctttgaagcagttattagatcttgttcaaactcgtgatactgcattcggagctgttggatcgcattcacaggctgttccaatacttgtatctcttcttagatctgggccatctggagttaagatgctggctgctactgttcttgggtctctttgcaaggaagaggagttaagggtgaaagtcttacttggtggttgcatccctccattgcttgctcttctcagatcgaagtcagctgaaagccaaactgcagctgccaaaaccatctatgcagtttcacaaggtgggataagggatcatgttggatcaaagattttctttacggaaaatgttgttcctgtactgtgggagcaacttaaaattagt

SEQ ID NO: 18630 - DNA, 1244 bp, Zea Mays
gacagggtgactccgtgaccgtgagtgcctacccgccgaccgcacgaaccccactcggtcactcccagtctccatctcccactacggcactaccccatccccggtgcggcgccaccttcccggcttccccttccgacctcccccctctcgtcacttatggtgcccagccgctcgctgcgcaactactagcgcaccgtcccctcctcagccatggccgcggcgtcgttcgcccgcgccttatgtctccacatgctcctcctcttcctcgtggttggctcggcgcgctgcaagacggtgaagagagacgtgaaagcattgaatgagatcaaatcttcactaggctggagagttgtatactcatgggtcggtgatgatccttgtgggcatggtgatctacccccctggtctggtgtgacatgttctcagcaaggggattacagagttgtgacggaactggaagtctatgctgtatcaatagttggccctttcccaacagcagtaactaacctgttggatctaagaagattggatctccacaataacaagttgacaggaccaattcccccacagattggacggttgaaacatctcaggatattgaacctgaggtggaataagcttcaagatgtgcttccacctgaaattggtgaactgaagaaactgacacacttgtatttgagcttcaacaacttcaaaggcgagattccagtggagcttgcaaacctgccagaactccgttacctttatcttcacgagaaccgcttcaccgggcgaatcccccctgaacttggaacgctaaagaacctacgtcacctcgacgtgggcaacaaccacctgacaggcactctcagggattttatcggcaacgggaacggcttcccgtccctgagaaatctataccttaacaacaatgagctgactggtgtgctgccagaccagattgcaaacctgacaaaccttgagattctgcacttgtccaataacaagatgatcgggtcgatatcgcctaagctagttcacattccaaggctgatctacttgtacttggacaataacaacttcattgggaggataccggaagggttgtacaggcatccatttctgaaggagctgtacatcgaaggaaaccacttcagaccaggaaccagatcgaagggaacgcacaaggaactggatgcgtctctcaagacccatgtgcggatgtgccgaatagatgatgtcgccacggtattttatccagattc

SEQ ID NO: 18631 - DNA, 1161 bp, Zea Mays
aacctccatttgttccacaatccacattccccaccccccacggcccccgggcccacccaccctctccctcttcttcctcactcctctctccctctctctctctctctctctctctctcgtcctgcgccacacgccgcggccgtctccgggcaggaaggaagggggcgggaagatgatgatgacgcgggcaccgatggggccgatggagggcgcggcggtggacgagatggtgcgccgcctcgtggagggcggccgaggcgggcgccaggtgcagctgtccgaggcggagatccggcagctctgcgtagagggcaagcgggtgctcctctcccagcccaatctcctccgaatccacgccccagtcaagatctgcggtgatatccatggccagtttgtcgaccttctgagattattcgatttgggtggttatcctccagcttcaacttacgtattcctcggagactatgtcgatagaggcaaacagagcctggagactatatgcttgctgctggcgtacaaaatccggtaccccgaaaatattttcctgttgaggggtaaccacgaggatgcaaagatcaacagagtctatggtttttatgacgaatgtaagaggaggttcaatgttcggctgtggaagatattctctgattgcttcaactgcctgcccatcgcagcgctcatcgatgacaagatactgtgcatgcatggtggcctctcgcccgaattgactagtttggaccagataaaagatattgagcgacctgctgagattcctgattatggtctcctgtgtgatctgctttggtctgatcctagccccgatggagaagggtggggggagagtgacaggggtgtctcgtgtacgtttggtgcagataaacttgtagagtttttggagaagaatgatctcgatcttatatgccgagctcatcaggtggttgaagatggctatgagttctttgcacaacgaagattagtgacaatcttttcagctccaaattattgtggagagtttgataatgttggcgctcttttaagcatagatgagagcctaatgtgttcatttcagatcctgaagccaactgatatgggtccaccgcatgcaagaaaacaaattccaaataaggcgcatgatttgatggcaagcaaactgattacatc

SEQ ID NO: 18632 - DNA, 1801 bp, Zea Mays
taattgtcaaatattcacatttggatcagacatgagctacttgtattcaatgagtcaaagcgcattcaaataatcagaggcgaagctagcaaccaaatcaagatggctcctgacatcgactggggtaaaaatatacgcataatattggatgtcggatgcaaaagcgctggctttggtattgctctactcgagaaagatgtgataacactatctttaggccttacaaatgaccaaacagaccttgcgcaagttgcccttgaacgtggcatccctgcaacagttggcagtctgggatcgcgaagattacccttccctagtggtgcatttgatgctattcactgtggtgaatgcaatataccatggcattctaatggtggaaaacttctcctagagataaatagaattcttcgtccaggaggatacttcatcatctcaagcagaagtgctgacctggagagtgaagaaggaatatcagcttcaatgaccgcactttgttggaatgcaatagcttacaatagtgacgatgtcagcgaggctggagtaaagatatttcagcgaccagtctcaaatgaggtatatgatctgagagcaaaaaaggatcctccattttgcaaggaagagcagaacaaagctagtgcatggtatactaatatcaaacattgcctgcacaaagcacctgttggtatcgaagaaagaggcagtgactggcctgaggagtggcccaagaggctcgagagtttccctgagtggcttggggaaacagaaacaagggtggcttctgatcataaccattggaaggctgttgttgagaaatcttatctggatggattgggcattgactggtcaaatatccgtaacataatggatatgagggctgtatatggaggatttgcagctgcactggcatctaaaaaggtttgggtcatgaatgttgttcctgtgcatgctgcagacaccctacccataatctacgagcgtggcctgatcggtgtgtatcatgattggtgtgaaccatttagtacatatccaaggtcctatgatcttttacatgctgaccatttattctcacgcctgaagatcagatgtaagcaacctgtctcaattgttgttgagatggaccgtattttgaggcctggaggttgggctatcatccgtgataaactcgagatccttgacccattggagacaatcttgaaatcactgcattgggaaattgtcatgaccttcagaaaggacaaggagggtatcatgtctgtaaagaaaacaacatggcgtccataaactgagctcagattcacaaggctccagcataccattttttgcactatactgctgtcgatttccccggattgtgagacagccattttgtgaatctggggtagatgtacaatatttgttcattcatctcatgacaatatgctcgccgcatctctgtcgggtagtttaagcccagttggatggttggttgtggttagcgttacattgatcaattctttgaagcagcatccaagacgaccagctctagtttcagaaaaagagggcccttcgattccataaacagggttgtacgagatacaagattgtttcttgttgtttaaaaatgtaacaatatagatatatgtaaaggttgtcactgaattaactgcttggtgatgttgtaagttgcaacaatccgtgaagattcaatgcatgaattttcttattgcaaattgtgagcaaacagcaaaagagtttccgatgtatattctgctgtcatttgagaccgttctacacttctgatattaaagttgtaccagaaaaa

SEQ ID NO: 18633 - DNA, 2732 bp, Zea Mays
gggcacacgatgcgttgcattgcatggctccgccacacacaccccttgcatgtaccccacccaccacggcggcataagtatctccgccggctacgcgcgatccaggcccggccgcgtgcgtgcgtgcgtgcgacgactgcacccatacacacatatacgcgctctggctggctgcctgcctggcttgcggagctccgtttcggccggccatctctcgctacgctacgagcgcgcgcggcccccgcgcccgtgtcttcccgctgtcgaccgtcgtgttgatcgtacatgcagctgctagtagcgaactatagttgcagaccgcatcagtgcgtgacaagaggatatatattatcagacacgcacgcgatcgcgcggagatgaaccagtgcgtgccgagctgggatctggtggacgacccgacggcggcggtagctggcggcggaggcggcctaaaccatcaggtctcgacgaccgggggcgcgcaccggggcctgctcctgcaggcgtcagctggaggagcaggcggcgggggcgcgttcgctcccgtcgtcgtgcccatgtcgaaccagtactacgaggtggcggagctgacgtgggagaagggcaacatctcctcccacggcctgctcaaccgcccggcgcacaataagtacccgcccgccgcggcgccgtcgtcggctcagctgcatgccatagcaggaggaggcggccgcggcggcgggtcgccatccggggaccgcgagacgctcgaggcggtggtcggcgaggcggccgcgcggtcgcacttcctctcgcagccggcgccgccgtggctgatcggcgccgacgccgtggcgcgggccgcggcggacgcgctagtgccgtgcgccgcaagggcgggcgagtccgctgcagacggcggagaagcgggcgcctcgaggaggaagcggccgcgcgtggtcggcgacgacagtctggtggtgtgcgccagccaggggagcaccgcgcctcgccgccgcggcgagagcgcgctgctcacgcagctggacgcctgcggcaccgaggccgacgacgtgtgcggcttcagaacgaccacaaccaacaactccacgtccatggaccgtgacgacaaaggctccccggatactgagaacaccagcatcggcggaggggccagtgattcgcgctgtttcagccgtcgctcacagagagacggcttatgcgacgacgacgaggagaacgtggtgatcaacggggacgacggggcgatgaggtcgtcgatttccaccaagaggagccgggctgctgcgacccataacgaatctgagcgtaaacgaagggacaggatcaaccagaagatgaaaacgctgcagaagctcgtcccgaactcgaacaagacagacaaggcgtcgatgctggacgaggtgatcgactacctgaagcagctgcaggcgcaggtgcagctgatgagccggatgggaagcatgatgatgcccatggcgatgccgcagctccagatgtcgatgatggcccagatggcacagatggcgcagatggcgcagatggcccagatgaacatgggctccctcggccagccgggctacgcaggcctcacgccgcccatgatgcacccgccccccttcgtccccgtgtcctgggacaccaccgccaccgccaccacctccctcgccccgcaggccggcagcggcacggtgccagcggacgccttctccgccttcctagcttgccaagcgcagcagaacgggcagcaaccgggtagcatggaggcgtacaatagaatggtggcgctgtaccagaagatgaaccaaacgcagcagagcgcgcccagcaacccgtccaagcagtgagcatgacattctttcctctcaattgatgaggcctggaactgtgtaacagaggtgtgaaacccgtcgacgcggtacctgtagcatcatgtatttgttttggttcttgaccactctatccttgtatataaggagaccagacgttgcgcaaccgttgagcggagaccaactccagcagactctctctccgtatccgtatttaggacggccaacagtttctctctcctctccgtatccgtctccgtttctagcagactccgtatttacactccgcatgcagtctatgacagctggggcccgcgagcaggaggtggcgcatgcagtcttctgcagagaggagagagaaatcgtggaaaaagggagtgcaggtacacggtgtctgttttgcggagacagatgtggaggctgctggagagcgaaatagtgactcagagcgtgtataatgcggatgcggagtgggatggggagtgtagctggagttggtcccagaagcaccggaagtcgaacaggtgatgaaggcgatgtcacgcaagtagtagtagtgtgtacggtactaaagactttatttatttctgctggcaaatgagtgcagattagataaatcaacccaagcacgattgaagaccattatctgattgcttaacttgtcaatcattaatcctacatctcaatttttagggaaccgtttgtctgcctagaatattgtcacacccggcttttagaagaaacacaatacatatgtatgtgttcccagtaaattactcacacatactacgacatcgttaatgataatattacactataccggcttactagagcatgcaaaacccacataaatgatatatatcttaagagatatcaagtgggtaagtgtaaaaaataccaaag

SEQ ID NO: 18634 - DNA, 1136 bp, Zea Mays
ggacgcgaacgcgtcagacatcaagaaagcgtactacaagctctctctcaaacaccacccggacaagaatcccgatccggagtcgcggaagctcttcgtcaagatcgccaatgcttacgagattctgaaggatgaatccactagggcgcagtatgactttgccattgaacatccggaggaggttttctataacacagctcagtactatagggcatactatggacataaaacggatcctcgtgcagtgttgattggtcttcttctaattgtttcagcatttcaatacattaatcagctaacgaggtataaccaggccatgaaaagtgtcaagcaaactcctgcttacaaaaataggttaaaagctttggagtatgagcgaacaggaggaattgctagcaaaaagaagggcatcaagcaggaaagttgaagaagagctaagtaatgaagttgaattgcaaattcatggggttgaaaaaccgtctgtttggaggctgtttggtgtccaatttatactttggccttactctgttggcaaggcgcttacttggaagatttgttggttttggagataccgggtaaagaaattaccatatacatgggaggatgcttgctacttgacctggatttcactccaaatacctgcgaatgcatggaaaaatatggatgagtccaggaaggaggaccttgtgagaagacacctctgggaaaagagcaacatggagaggtatacttcagggacgaggaaggaaccaaagcgtaggaggtagctgtgcaacatttttgacctgagactacagcaactttaaacaatacaacatactcctatattggagtgaaaagttattgaccaggcttgagttcaccgatagctaattgctaggatccccgggaagtggcatggctaaggaatcatgtttggaggacaattcatgtaataaagtgatcaaggcgacttttgtaggtgtttcttaatcttaatttctgagtagctaataactgtaaacgaacgagtcatgcttcatcgctccactcaacgtaccaaaatcactgcaaagagaacatactaatgcacttcctctcgtctactgctgtatgcacctgcagccattttggtagtcatcaagttgaacacatgc

SEQ ID NO: 18635 - DNA, 847 bp, Zea Mays
ctacattcttgagtcatgtttcctgtttttctggtttaagttaaggtgtgaagccttctcaacctatcctcgaacatacgatcttctccacgcatgggcagtcttttctgaccttgataaaagaggctgcagtgccgaagacctgctccttgaaatggatcgtatcctcaggccgactgggtttgccatcgtgagggacaagggcaccgtcattgagttcatcaagaagtacctccacgcacttcactgggaggcattgactgtcgtggacgctgagcccagcccagaatcagaggagagcgaaatgatcttgataatccggaagaagctgtggctaccaaaagcaggcccgcaggattccggcacgtagttcttctcgtacctgttcctctcccagcacctgcagctcagaagccaggcgcagctgcaccatccaaaatggttcgacacttgtagctcctgagatagagtcagtcatgatttctagccctaccgcccacatgaagataggttgtttacgaggatactgcaagtagtatgtagcaggcttggattaaaaaaaaggcccttttttgtcgcgacagatatggattggtgtttgttatctagtttggttaggaaataaacattctttttcttttaggtgtttcgtgtcctttttttttgaagtctgctatagtctgtagcaagtgtatttggtgttttcttgaaagaactactgcgctcacatttttgggatatgtgctttgccctagagcctcaaggctgcgggtcctcagctcgaaactactcgtgcaaatctcaaccgggagagcacttcaatataaacaggtaattttacagcaca

SEQ ID NO: 18636 - DNA, 1637 bp, Zea Mays
acttatggtcggactcagcaagtgggggaaaaactaatgcagactttcccattcgtgttttatgacctgcttgagcaaagcttgcctttctacaacatgctgaagcgccaaataaggaagataagaggaccgcagcaaccaccattatcggaccctcctctgcctgtccctgcaaataaaaacattcttgtttgggttggagatgaacttttgccccgtaacagtgcaaaggtttcagtgtttgattcagttgtacaaggaggagatgctgtttgggaaggtttacgtatatatgatggaaaagtattcaaattagatgaacatttggacagattgtttgattctgcaaaagctatggccttcagcaatgtgcctactcgtgattggattaaggatgccatctttaagactctgattgcaaatggaatgttcaacaatgctcatataaggctcacgctcacccgtgggaaaaaggtgacatctggaatgagtccagctttcaatctttatgggtgtgccttgattgtgcttgcagagtggaaaccaccagtttatgataactctcatgggataaaattggttactgccaccacacgtcgaaattctccaaatagtatagattccaagattcatcacaacaatcttatcaacaatattctggcaaagatagaaggtaatcttgcccaggctgaggatgccattatgctagataaggatggctttgtatcagaaacaaacgcaacaaatatttttatggtcaaaaagggaattgtattgacacctcatgctgactattgccttccaggcattacgcgagcaactgtcatggatcttgtggtgaaagaaaactttgtgttacatgaacgacgcattagtctgtcagaattccatgctgcagatgaggtatggacaaccggaacaatgggtgaaatcacaccggttgtaatgattgatggacgtgaaatcggcgacgggaaaattggtccagtcactagacaaatccagaaggcatacaagatcctgacagcagggcaaggagtaccgataccgggggttgctgaggtgtaattgtctaagatgcatccctttatctagttaggatcagtcccccaaggagctcaatgatatcaggctagcgcaacaataaattaataatctgcattgatcactgatgttcaaagacaccatggtgccgtttggttcacatatttgtaacgtaatgggtaagtgataacgttaaattatgtttgttttagtccaaccgtaatcagatatcatactaaaaattgataccgaactattcaaacttgttacggccagtaatcgagtgtaaaccattaccctttacgttacatttcgcgaaccaaacaacactcagtcattgttattcgaaacaggatactgctggagattataaacgcaataagccattgcgctggcatgcgctcgtatgcgtctaagttggctaatactctaatccccgtgcccgtgcatacgattccagtgcattttgtcgaatctgacttgtttttttttcctgtgaaacaaagagagaatatgtagacgcgaattgcccacctctaataaatttccttgcagcatgcattatatatctttgcagccttacaggaaagcac

SEQ ID NO: 18637 - DNA, 4423 bp, Zea Mays
aaacagcatgtggttagtagctgtcctgagtcttgacccttgaggttgtaatgatgatgccgtgctgaatactgttcaaacacatgatgtgttgccaaattgtaccttggtgccatcctcatcacagctaaatactgaagtaccgaagaacaatgcagtgggtctggccagttatactgaagcaggaattgctcaagttattgacaaagcaaagagttacagtggccagataaaacatgctaatcaaactgaaggtgcttatattatttccacatcaaaggcatgtgttgataaatctttaaatgagagtaatatgtcacatgctgtggaggagctacatgcaagtcgagaccatggggttggtgatgatgtttctgataaaaagcaagtcatggtagaggagcaactgctggaagagatacaagcaaaggataatctttcacaagcaaaggagcacaaaaaatgtaggactagttcttttgacacatcatgtatggatctactggaaacaggcactacttctcttgtggaatctttaaacacttctaatcatcaagaagtccatgacaccttacatgaggagtccattcagctagaaaatccaagcactgttggaaagaagaagaaaaggaaaaggcgtcaattgtccccttcaaaatctgcttctgctcaagagacaacagaaccgtcagctacagcagttgatttattaatacccacaggtgaagttctgtctaataacagcccagggatacagatccataatatacatgcaatggataatctttcacaagaaaaggagcagaaaaaatctaggactagttctcctgacacatcaaataggcatttactggaaacaaaccctacttctcttagggaaactctaaacacttcaaatcatcaaggccatgacactttagatgaggagttcatccagccagaaaacccaagtgctgctggtaagaagaaaaagaaaaggcgtcaattggtcccttctaaatatgcttctgctcaaataacgacagaaccatcgtctggggcagccccagcggatttatcaaaatccacaggtgacaaagcatataatgctgaattgactagcaaaggtgaaactgtagttgaagcatctggtttgcctctttcatcatatgaacataatgatggaaaccaggggggcaaaagtgttaagtttgtgagcgatgatcaagcatctactgatttaatctctgaacaagagaagtttgatcatgctctcaagggatgtagggatcctttaattgcagatgacatttattctacaggtgaaaatgtagctattgaaggaaagactacaaaaggaagttgtgcccctttaaatggaggggacaggcatgaagaaataaaacacctcaatgagggatgtcataatgcaggtgtacctgaaacaagcaacatggagaaagatggcaaaagtacagatgtctctgacaagaggcaaacaagtcaaaatacctcgcaagtgaagaagcgcaagaaatcaaaggttggttctgttgacatgccttccgtggatgcttctggtgaaaaagatcatcggtatagtgaaaatgcgaccaaacaagatacagcttctactaaaagggagattgtccacgaaccttctatgcaacagatgtcaaacattgtgcatcagggggattcaaatgtaatagaaaatccaagtggtgatggaaagaaaaagaaaaaaagaagacaccattcagaatccttaaagggtatgaatcctagtcaagatctgaccaaatcttctggatttgtaacaaacgaaagctcgatacaatgcacaggtgctgctccaataaatgcaaagcaaacaaacttagtcattatagaaggagaaacagttactgggcacaggaagcttagtgaaaatctagatgtagcggcaacacatgttgttgatgaggtattggcagatctaagatctaaagacggcttaagtaaggatctggatgaaaatctattaccaggacaaactcacctaggcagcaatcagaatggaatagaagttcctgaatccattgctgttaaagttggtagtactactgcagcattacctccgaaatatcctgcaacagttcactctgcttctcctgttaactcacctagacaaaggaagtctaaggggaaaaaattgaaagtgctatccaccatggctgactcttctcatcaatcaagtggtgtacccgaagaagatgctaatagaaaattaaaagagtctgattctttgaggtttgctgataaaacaagtgatcatgaggatatagtaactgcaaatgtggttgctcaagctgatgaaaaacgcaaagccactaagcgtcaaagaaagaaaggttctgtaaagcaggtacttgatacattggacttgaaggaagtgaatgacacagaagaaaatttggttcagggaggttctgtagttgacactcccttgagcactgctgggaacgtagagcagaaagactggtcttctgagactttgagtcctaaagaacaagaaactaattgttctactcatgggctggatagtcacacagctaaggacagccaggatgagtatgtaactgacaccattgggacccatgataatgaaaatgctgcaggaaccccagccttgcatgtagttcagaaagatgccatggccctcaaatccgccagccctaattctcaaaaggagcaggaaacatctttgaactctgaactacaaagtcaggattgtcctctggaacatggttttagtgcagatttggtgaactccaggactgaaaagggagtcaggactacaagttctgctagtgctgttaaatctgattacaacaccatgtttcatcctgctaatggtagaatcaatgtccttgatcattttagccgcagcaatttgaatgatggttcatcaattgtcgcagaaagtaagcaaaacaatgaagatggaagtttaagggaagtgaagaataaaaagaagaaacgaaagcaaggtactggtagcgttgaaccaaatgatgttatagaatctcttccctcagagatagctagcttaactggtcattttggtaccagcaaagctgttgtgtcatctgttgcaacagaaaacatgaatggaggaaatgagaatgtgaataaaggcaaggagaagaagagaaagggcaaatctaatatggaagtacctactgctggaaaggaccatcctaattgtgatactcaattcattgatattggtacccaagaatcacttatttctattgtacaaaaagaaaggacaggtcaagacaatggaaaagagagcaacagtaaagctactcagaatgccagtataatgcaacatgaaccagaagatgccacttggaatcgtagccctgagaagaatcaccaccagagtgttgatgatgatcagaacaagttgctcactgaaaaggatcatgcacatataaataaagaagtgagaaaattcactcctcaaacaaaggcccatgctaagattagaaagcctgatgggtctactatcaaggaaaaggtggctccaaatcctaaacctgtaaccaaccttgtgaaggatttttccatgagcccacgagcatcaagtgacagcacagagggcatgccacaaagtgctaaccgatatagagttgcagtccggaaagtaccaagtaaaaggtatgaagagaccagtggaaactccaataaggcgagtaggaaagtaggctctggtgcaatattcaatgactctatcagcgaaggttctggtgatgaattggacaccaagactgtcatggaaagatcacctaataagtcatctacatctgctgattcaggtatttcatctgcagcctctggtgaaagcgaggttcctgatgatgatggcaccgtatcactatctcagaagagtttcaaaggtctgcacattagctccatcctccgtggctcccgtagctacaagaaggcactaaagaggcaaatggagctgctagacgacgacaccattgtgcctgatagccagcccgcggatggcctttggggctgaacatggttatcgtcaagagaagcgccgaccctgcttcatccttttttgccattgtccacctgatacgctggtgggctttataagttgtctaaaacacatgcccgaatgcgtgatgtcgctgatggcattgccatacgccacacgcagttcccttattttgtcgggcttaagctgtgatctgcctgaggatgaatcgatgatgttcatgatacagcttaccagctatatatatgtgttaatgtatgtaagaatgatacgcacgcttagtctctcacccatgagccatgggtccgttgagtcctgactgaccatcgccagaagttgtggtttgtgacaggaaattccatccttctggcttatctgttgtgt

SEQ ID NO: 18638 - DNA, 2194 bp, Zea Mays
gtaaccctagagtccagttgcctagttgccttctctggtagtccagtctaacgctgtccaaccatttgtggcggctgccgcaacaggctcaacgctcacgcgcacacacaatccatagccgcctcccacatctcactctcgttccgagcttccggccatggcggtgacctccggcgcccccaacgacaacggccgggacgctggcgccgctgcgactgacgatgagcaccgcgtggatctggaagttaggcacaaggacgccggcactagggactcgccagcaccgatagcggcagctgcgcctgcgtcccaatcccgagtggctggaaagcttggcccctcagatccaaagcacctcatctatgcgggatccaaattaaagcatattaaagctgcacctgctgcaccagacaagaatcgccgaccacctttgtctccaccagcacctgccgtcaatcgtggtcgtggatctgtgcgcacacctttgggattaaaaaaatgtctaccgaaagtggcagtcaatccccattatctcaagcatcacaagcaccgatgtctccatctcatgaacctgaatcgtctcgtcctgagtcagataatgactcgatgccaatttaaatagatgacaatgacaacattgaagtagaagaggaagaatacgacgctgaagctggttctaagagaaagctcacctcaactgtttggaaagagttcaagagagtgaagttcaatggcacagtccgggcaaagtgcaactattgcttcaagcaactttctgcgtcaagtaataatgggacaaaacatcttcatgttcatttaaaaagttgtgtgcaaaggaagattaagttgaacgggaagacattggcacaagcttctttgagatttggtagaacggatggtggaacagtttcaatagagaattacacatttgatcaagaaatagctagaaatgaacttgctgcgatgatagttctgcatgaataccccttaagcatggttgatcatgtgggtttccgaagatttgttggtgctcttcaaccacttttcaagatcggaaccagaaacatgataagatctgatattatgaagcattatgaggtggagaagaaaaaagccattgaatacatggctggaatccagtccagggtagcggtcaccacagatttgtggacgtctgacaaccaaaaaagaggttacatggccataacagctcactttattgatgaatcctggactcttagaaatattataatgaggtttatctatgttcctgctcctcatactgctgacgtcattggtgaagaattgtatgagtcattggttgaatggaatcttgatgagaaaatatcttctgtgactcttgacaactgcacaactaatgatgcgaaggccaacaagcatggggctcaaatctgagctagaccggtacttggatgaagaaatggtgaacatgcaaaccaaaaacttcaatgttttagattggtagaaggtagctggaactcggtttcctattttaagaaggattgcaagagacatatatgttatccctgttacaactgttgcttcagaagctgctttcagcactagtggtagagtacttagtgagcatcgcagtaggcttacttcaaagatgttggaggctctcatgtgctctcaagattggcttaggaacaaatacaaagttgatgagaaaactaaacaacctgccaccttttggtcctgtctccaagacatgcaagagggcctccaggaacttgcactttgacattttcatttcaaggatttaggtggcgttaatcttttggctgttgacatgtagtgaacaagtcaagtacaagtagcaattgacaagatcacaagaaccttttggctctcatgaacacttgatatggatcttttggttctcatgtttttactcaatggtgaacttgtaatgaacttgtaacagatgtgcttttgggagcggtttgcacatctgttgatgcgcacctatgttgtaagcacattgtatgtgttaatttggaaatttggatgtttaatgtggtgaactagtggcgccatgctaggggtggtggacactaactggatattaatctagctgtgaacatctgatgtctgatgtgatcaatggtgttatgatttgtgaaacacttaacattgaccactctatcagtcttattgttgatgtttctta

SEQ ID NO: 18639 - DNA, 2083 bp, Zea Mays
tgtggctgcctggtttcgtgtgcggacccttggtcatatggctgcttttagcttcaatcgggttggagagagcgagaggcgtcaaggaggatgaacggcgagggtgtatgattttgatcgggattacaaagatataggcattgccctgtttacaactaaatactttgttgtgcggaattgcatggttaatgcgaaatgtgacaccttattgtctgcctggaacacacctcctggaaaaattaacatgcttcgtgtggatgccaagcaaggtgctcctaaggatggaagttctccacttgagctcttccaggtggagatctacccactgagaatatatctatctgaagcaatgtatagaatgatgtgggattacttcttccctgaagaagacgattcacaacgaagacaggaagtttggagagtttcaacatcaaccgggcctagaagaacaagaaggctctcttctggtgtcgatgctgttacttctagcagctattctgtcagagatcatgaacttcctgggaaatcaagtacaactgtatctacatcaacaaatgtttcaagttggcaaggtatactcagcgataactcacaggtgtcaaagtttcagagtataaaagcaaatatggtatgtggttcgcatcaagagttgcaccggtcgtcttcatttgaaaggaattgggaagaaagcgctgcagaaagtgttgcaagtaatgatgtggtatcactcctgaattcttcaattgtttcttcaaaagtagatgctagcaattctgtcttagagaaccctgttgtgggaagtgagatgtggagaagtaaaacgaaagattctaagcctgccaagtctggacgtctatctcacgaagaaaagaagcttgggaagtctaatgatgaaaagaagacaaaacctcggaagtcaatggaatttcataacatcaagattggcaaggttgaacttcttgttacatacgagggatcaaggcttgctattaatgacctaaggttgcttatggatactttccacaaggcagaatttactggtacatggaggcgactattctctagagtcaaaaaacatatcatctggggagttttgaagtcggtaaccggaatgcaggggaagaagtttagcaaccatagggaaacacttgagggttctattcctgaaaatgatcttaacttgagtgacagtgatgttggtcaacctggaagacatgatcaattaacagcttcatggttgaagaggccaggcgatggtgcaggtgatggatttgtcacgtcaattagggggcttttcaatacacagcgccgtaaagcgaaggcctttgtgattcggacaatgcgcggtgaagggcataatgacgaatatcaagacgaatggagcgagagcgatggtgaatacccttttgcgaggcagcttacaattacaaaggccaagaagctcatacgaaggaagttccgtccaagggtgcaaaagaacccaggtctgtcgatgcaagattcactcccatctagtccgcgggaaacaactccatatcaaagtgactcctccaggtcatcttacgaggacttccatgagcagtaaaacaatctggtgatgctgctttcagcttctacatttggtcgataagatgcagccatttatattggttatagtagggtgtatgtatatagtaggatgtaccatcaaaatccaatgtatcatgtatagtggttaggcaatactccgtaattatgtgcttgtaagttaataagaggccagctcgtactcctagaaaacaaaacccgtgatctatggcatggggcattctcattcccttgtacttcaggactagtatggattgtaaattcaacggtgaaggtgttgcaacatttattcagtaaagtatccttgttgaagaatttgtaaaaactatggcagaaacaatagggaaggagcaagtgactaggtgcctaggtgtattatgattcttttgctgactagttggaagttagaaatgcattgctccacgtcaaaaagaaatgcgtggcagacaaggttgttgcttaacagatcggtgagctatgaaatgctatctgttca

SEQ ID NO: 18640 - DNA, 342 bp, Zea Mays
gtaggtccagtcgtagggcttgagcgagaggcggccctgcccgtagctggacaccaccacagcctccccctgcgcagcgcatccgcggggacccggcgccaaccccgcgcccatcaccaacgccagcaccagcaccagcaccgcggcctgccgccgcgccgcggccatcagagtccaacgaccgaagcacccgcgaaatccgcgaagctctgactaaacccacgcgctcgcagtcacactgcaccagcacactgtttattcaggtaccggggaatgggggagagaggcgaggagctgtttttccggcacggcgctaatctaatctgctgctgctggtttgct

SEQ ID NO: 18641 - DNA, 749 bp, Zea Mays
ccagactcgtacggaaaaacagcccagtgtattcctctgcctccacccacatggcgctccaggcgcagcagcaggccaccccgtcgccgacgcgcgacagggcgggcagcggcgagtggctggccgacacggagaagctccccggcgccgccgcgtccccggaggacgtcgtcgtcgcctccacgcaccacgccgccgccgccgccaggtactcggaggccgtcaacgtcgtcggcttcctgtactcggtgttccagttcgtcgcgctcgccgagctcatgaggaggaacaagcatttgattccccatcccaagcgtgatctcttcgacttcaccatggatcaggtggtagcataccttctgatatcgtcatcgtcatcagcaactgctcgagcaagtgatttgattgagaactgggggagcgattccttcccgagcatggcgaacggctccattgccatatctttcgtggcatttgttgttttcgccatttgctccctcatctccgcatacaatctgttccgccgagacatgtagctgatcctgacaacttcatttctgaacaaagtttttggtgcaggtttcatgtgtgtataaatgtgatgggaactctgaacttctagcgatgatgtatctacatgtcaaatggcaactcacttgtgtggtaaatgaaattcagaagttctcgcaattttttctgcatgacatcacaatggtcatcagttggtgtgcaatcagccaatcaccaca

SEQ ID NO: 18642 - DNA, 1351 bp, Zea Mays
aaggatcaatacccctgtgcctcaattcaaacaaaaaagagcctggaagcaatttccgtgaacagtacactctgttccagaagaaaaagaaggagcttggttgcccctcatttatctggaattttgcctattttttggtacagttcccttgctttattctttggatgacgagtataaggagcatgtgcttgaataatcaccctggatttgataatggtgggattctgtggttccataacttgactgagtttccacatggtactttagctcccatctttcctatcttagttgctggtctgcattacctaaatgttcagatttcttttcaggggtcccagatcaaggatcacccaggaatttttggcttgctggctaagtactatagaatatacctcaatgtcctgactatccctttgtttcttgtcgcacatgtggttcctcagggatgcctggtctactggactacaaatggtttattttctgtagctcagcaattatccttgagaaatgatgctgtccgcaagctgttgggattgccagatactagagctcaggttggttacagagcacaaaagtcacctcttgagtggtcacagcttgaagatgctaacttgcaaacgaaatcgatgccatctgacaagggaacagccagtgagagtacaactcctaattttgcaatgggaagtatggatggaaatatatctgcgtccagctcacctgaggagctacttgaacaagcattacagtatctgggcacaggctgccgagatcaagccattccactgatcaggacagcagtagagagaaacccagatctgtacacagcgttgattgggatgggacaaaccctgttctcaaatagattgtttcccgaagccgcggtttgttttgaacatgctataccaaagattcaagaagatgaccctcttcttgtgcttgcgtattttggggcaggtctttcgaacaagcgtcagggggataatgagacggcaataaaactcctggagagattagcagagctcaaggaaccagaaaagcccatcaacaaaagccgctacttccaagggatgcttgctttggcaagtatattatatagagaaggccggaattcggaggctgccaaatatctgcggatggctattgcttatgatccttctgtagaaaggcttctcaaggaatgcgaggaaggaatggacgatcagccaaagccagaggagaagtgatgtgctggacctgaaaaagccacagtaacagagatagcacaccgcttttgtttttgaacactaaaaccgcccccagctttttaccctttacccatatgatcgtgcaaaacagagtgaagttgaataga

SEQ ID NO: 18643 - DNA, 1602 bp, Zea Mays
accggtgatcctgccttctctgtctatatattgcgtccttgagatagtacacttcacagcgtccgttccctgccacagagaaacgaactctcttgagtaccacaaaaaaaaacattggcattctttgtagtagagcacagagcgaagccgtcaacgatggcttccgctccgctgccggcggccatcgagcccgggaagaaaggcaacgtcaagttcgccttcgcctgcgccatcctcgcctcaatgacctccatccttctcggctatgatatcggagtgatgagcggcgcgtcgttgtacatcaagaaggacctgaaaatcagcgacgtgaagctggagatcctgatgggcatcctcaacgtgtactcgctcatcggctcgttcgcggcagggcggacgtccgactggatcgggcgccgctacaccatcgtgttcgcggcggtgatcttcttcgcgggcgccttcctcatgggcttcgccgtgaactactggatgctcatgttcgggcgcttcgtggccgggatcggcgtgggctacgcgctcatgatcgcgcccgtgtacacggccgaggtgtcccccgcgtcggcccgcggcttcctgacgtcgttcccggaggtgttcatcaacttcggcatcctcctaggctacgtgtccaactacgccttctcccgcctcccgctccgcctgggctggcgcgtgatgctcggcatcggcgcggccccgtccgtggtgctcgccctcatggtgctcggcatgcccgagtcgccccggtggctcgtcatgaagggccgcctggcggacgccaaggtggtgctggggaagacctccgacacgccggaggaggccgcggagaggctcgctgacatcaaggccgccgccggcatcccgcaggagctcgacggcgacgtggtggccgtgccaaagaagcgggacagcgaggaggcgcgggtgtggaaggagctcatcctgtccccgaccccggccatgcgtcgcatcctcctctcgggcatcggcatccacttcttccagcaggcgcagctagctagctagctgccattgttgccatatgagctaagctaggctgaagcaacgtgggaagattcgctcgctggtccggcgcagctggagagcgacggccagcaagctcaggccggccagctcgtggctcttaaagttttttaaatcatgtctctaagttcgtggactgtatttcacactttgttttgcccgcaagttgttgatgaagtcgccgaggccgccaatggcaggtgcccaggttgctagtaacgacacgtcgtcctctaatgactatataatctgtgtagcagctggtgctgctgctgctgcctcgctgcacgagtcacggagagcgaggctggaagaaaactggtagtggttcgaggattctactgagggagtcaagcaagcaagccgtgaagagtgtgtaataaggaaacgttatctatcatccatatctatctaaggattgcgcggagattatttatccctgtcaaatggtaaccgttggttaacgcagcaagtttggtttaatcaactactcacgggactggaatctgaggtggttcacatcacatagagctt

SEQ ID NO: 18644 - DNA, 5882 bp, Zea Mays
ctgcggtcactgtgcatggtcgaatttgcccatcctgcattgttctcatggtcatgaccctgacctgcaaggacaagtcgagacgagacatcatctcttctctctccccatctctcgacccgacctcgctcgccgtctctgttgtgccctgcccctgtcccttttctctctccgcctccgccccacctcggatcgagtccaagccgccgagcccactccgctgacccagagcctggaaacccccaatcgagcccgaccggagcccgtcgattccgccggattcgagctcccgccgggtgaggcggtccgcccgaatcggccgattggactcgaattcgggtggtccggatgcgcgcagagcggaggctcgcggatctagggtttcggagggcctagggttagtgccggtgatctggtgatggtggtgcgacgcggcgccggagctcggcgaggaggagggttcggcggcgacgttggggaagatgcagcgagccggatatgcatgggtggcgcggcgctgagggctgtatttttactttctgcaaatgatgcaaggcagaccttgcttgtgccggtgttcatttcaataacacagttgcccgctgcttgtttgattgctaacataacgagcactgtgactgacggtcgtgaaattagagtaggggattgtgctctttttcgggctgtcggtgctcctccgttcattggattgatacgttggattgagaaaaaggaagaagcacatcccaaattacgtgttagttggctttatagacctaccgacgtgaagcttaacaaggatatacaactcagcgctgccccaaacgagatcttctactctttccaccaggacgaagcatctgctgtttctctactgcatccttgcaaagttgcctttttacgtaaaggtgttgaactaccagctggaatttcatcatttgtatgttggcgcgtgtacgatatagacaacaagtgcttatggtggcttactgacaaggactatattaataaacggcaggaagaagtaaatcgacttctacacagaacaaggctagaaatgcgtgccgcattgcaatcaggtggacgctctccaaagcgtttaaatggtccatcagcttcccaacaactgaagactgcttcagttggtacgcaaaatggtggtttgtctaaaggaaagaagagagatagaagtgaacagggagttgatccagctaagcgggatcgggatcatctacttaaggttgacgagagtgagcctggaaactttaacttggatgatattaagtctgaaatatcaaagataacagaaaaaggtgggcttccaaatgcagaagcagttgaaaagcttgtacatcttatgcaacttgatcgaactgagcagaagatagaccttagtggtcgggttatacttgctgatgttattgcggctacagagagtcctgattgcctcggcagatttgtgcaatcaaggggccttcccgtgttggacagttggcttcaagaggcccacaaagggaagtctggtgatgggactagtcctaaagaagcagataagcctattgacgaacttctctcggccctgcttcgtgcattagctaaattgcctattaatctcagtgcattgcaaagttgtagcattgggaaatctgtcaatcatcttcgtagccataaaaatctggagattcagaagaaagctaagtgtcttgttgagaactggaagaagcgtgttgatgctgagatgaagtcaaatgatgtgaaacctttagtttcaggtcaatctgtttcctggtcaggaaaagcaggtttccaagaaatttcaaatgctggtaccaaacgaggtggttcaagtgagaacagtccaaaaaatccagtgcccactctttcatcatcaaaaattttgactgataagcctgggggcacagatgctgaagcgaagttgaaccctggggtatctgccttgtcaaattcacaacacgtgcaaccgacaaatgttactaccaatttgaaggatcagccctgcaaatcaactggtggaactggtcctgagctgcctactgtaaaagaggagaaaagcagcagttcaagccaatcaccgaacaacagccagtcaatatctagtgagccatcgaaggatgcaagaagttcaactgctgcttctggtggtgctagcaaaacttctgaaagttcttcacgaagccatcgaaaggcaaacaatggtcttgtttcagggaacctgaaggaagcttctgtaggaagatctgtctcccttgatcgatcattgctacaggacaagtcatctcaaactggaacagcttctgaaaaaggagttgatatgccacctgatcatggaaataatcatagattgattgttcgctttccaaatcctggtcgtagtcctgctaatagtgcaagtgctggatcttttgatggcccatctgtaactggggatagagcttcatctcctgtggttgcagataggcatgatcagactgagcgctgggtgaaagggaagactgaaaattctcggcctcatttagcatctgatgctaacacagagtcttggcacagcaacgacggagctgctggttcagaggaaggtgataaatcgccgtgtgctatattagatgatgacaacagcaggacacccgacgattctgttaaggatgcacatgcatcacgagttgcatgctcgtcacatatgaatgaaaaagatgtcagtgaaactaaggtgggaactctgttcagcccaatgaatgctcttattgaaatcaagtactctgaagctagtcattcacggcaagctggagatgacgcagctatgaatcttcttgctagtgtggcaggggaaatatctaaatctgaattggtttccccagtttcttcacccagaagttcttctgcaaagaaattggcccgtgagagtgacaacattggaaaggttaaagtagaaagtgacatgggcccatcacatccagggcaagcagatgctaagaaaggtgccatggggaaggaagtaaaaaatgatgcttgtttggtttcaatggatgaacaacgccaaactacgccatctcctgagctaccatattcaaaagcagttgtatcttcagctaagattgaaacccatgaagttgaagccaagattgcaaacaaatgcaactctcagcatgcttcaattgattccaaaggtgaaagtcaggatgcctgtactgcccatgggaatgttgaagatggcagtacagacaaggatggtgccatggaatctgcattgggcagccagtgtagcttggttgtttccagtagaaattcaagattggttcatgctggggaatctgcattgtctgctgctgacaaacaggcacagggtttgttaaaatcaactaatcataagcagcttctgagtgtatcggacaacccaggagcctttgatagacgtgacagtatggctggcaaattagatttgatggctgcagaggtgagaaaaactgatgtcctgggcaatagtagcatagtgcagaacgaggctgaaaagaaggaacatgcttcttcctttttgcctgatgttcccaaactagttgtagcagcagcatctccagttggtgtggcaaatgtgaataaggagattaaagaatcaaaagacagttcaagtgaatccaatagccatgtaaaatctgaaggtgtcaattctcatcaaagcgagcaaagtgcaaagcagagttcaaagaaatccagtgatggtgtgagtggaaaagaggacgaaaaagaagaccatgtcttatcagacgaaggttcttctctagccgctaacaccaagtcaaatgctacagccaagcttgatttcgacttgaatgaaggaatacctggagatgatgggcatcagtctgagccaactatctcgcctgttgtatgttcttcagcaatccatttaactgggattttgccattcacttcgcctattacaactgggttgcagccagcttcagttacagtagctgcaccagctaaaggaccctttgttcctccagaaaacctgctaagagcaaagccggagattgggtggaaaggttcagcagctacaagtgcatttcgtcctgccgaaccaaggaagattttggagatgcctgttgctgcacgcgacatttcagtttctcatgctgctggtaagcagtctcgtcccacgcttggttttgatttgaatgttgccgatgatcaagctcttgaggaagatatcccacagagttctgcacaaactacctgttctgaatctggaaatacgagaagtcgagatggctcttcacgaagcgctggtattgaatttgatctgaacagagctgatgaagttgcagataatggccaatttgtgccaagtgcttcgcacagagttgaagtgccattgttgtcaacaagatcgttacatggagttttctctaatgctggcctgaatagctcgagggactttgatcttaatagtggaccaggtcttgatgatgttggcactgaagctgcaccaaagagcctaccttctaaaaatacaagcagtattcaattcctaccacaagttcctgttaggatgaatagtgctgccatgagtaatatatcaccatggcttgcctctgccagcccttgtggtccagtagctatacaatcttttttaccaactagagaacagccatacccaattgaggcagcagctggggcccaaaggatcattgcgcctacagctgatgctggccaattcggaggtgatccctgcaggcctccagttgtttcaacgtctccagcgatggtttatcatccgcctgcatatcagtatccaggattcccttttcctcccagtgttcaccttcaaacaccggcattttcaattggatcagcaacatttaataattctgcatctccaggagttccatactttccaactgtctccccttcttttgttgggccagctggagcgttaactccccaacatttaaggcagtttgctataaaccttgctgagggtagcagcagcagtggacgagacagtaatcgtaaatgggaaagtcagggccttgatcttaactcaggccctggaagtatagatttagaaggaaaggatgaacgggtacctttaccagtcagacaaaatttgatcccacccccacacggctttgtggaggatcaaggaagaatctaccagatgccagttgtaggaacaaagagaaaggaacctgatggcagctgggactcagaaaggtctacatacaagcaattatcatggcaatgatggctctgaagatcattctgcaccggactggtctgcgacgagcatgtacctgcatgtagaacttgggcggtgtgttcttcagtcactgcactatacttgggggattggggattcagcccatgacgatgatgtgggatcgaggaaacgaaaacttgctgtaattgttgtagattttttccctagctgttaggcttttggttctaatttactcaggagggggtatggctgcggaggaggaatctttgtgattctgagctctggggctattgtaattagaccgtccgctctgtgtttgttggtgatatactattgatcacatgctgcagctttacattacataagaatttagatgtgaccttgttccttgctggggaagcgttacgtcagctgaccatatgaacactggtgcaacgaacagctcgagttgctacgccatgtatctttggattgcagtgcagctgtatgtataagaattctagcagatcagcaagctatatttttttgctgtttttttttgtccatctgcatctgatttagtcttgactcttgatgctctttctttaaactatttgtcggaagtgatgaccagcaggtacgaacaggaacaaaataaatgaag

SEQ ID NO: 18645 - DNA, 139 bp, Zea Mays
cagtcaaatagctgagaatatatttgctttgctaagccatccctgctaacagtagcagaattaggatcaactgttgtggttataactccttctggtgtatttattttcctctttattaatgcgttctccagatttccac

SEQ ID NO: 18646 - DNA, 1435 bp, Zea Mays
gacgtcccgcgcgcaggagaggaaggttcggtcgcacgggcgtgtaccgaagcttcatgttcagcagcccgactgtgctggtgacgacggcggaggggtgcaagcaggtgctgatggacgacgacgcgttcgtgacggggtggcccaaggcgacggttgcgctggtcgggccgcggtcgttcgtggcgatgccgtacgacgagcaccggcgcatccgcaagctgactgccgcgcccatcaacggcttcgacgcgctgacggggtacctgcccttcatcgaccgcaccgtcacgtcgtcgctgcgcgcgtgggcggaccacggcggcagcgtcgagttcctgacggagctgcggcgcatgacgttcaagatcatcgtgcagatcttcctgggcggcgcggaccaggccaccacgcgcgcgctggagcgcagctacacggagctcaactacggcatgcgcgccatggccatcaacctgcccggcttcgcgtaccgcggggcgctgcgcgcgcgccgccgcctcgtggccgtgctgcagggcgtgctggacgagcgccgcgccgccagggccaagggggtctcgggcggaggagtggacatgatggaccggctgatcgaggcccaggacgagcgcgggcggcacctggacgacgacgagatcatcgacgtgctcgtcatgtacctcaacgccggccacgagtcgtccggccacatcaccatgtgggccaccgtgttcctgcaggagaacccggacatgttcgcgagagcaaaggcggagcaggaggcgatcatgaggagcatcccgtcgtcgcagcgggggctgacgctcagggacttcaggaagatggagtacctgtcgcaggtgatcgacgagacgctgcggctcgtcaacatctccttcgtctccttccgtcaggccaccagagacgtcttcgtgaacggatacctcatccccaaggggtggaaggttcagctctggtaccggagcgtgcacatggacccacaggtgtaccctgaccccaccaagttcgacccgtcgagatgggagggccactcgccgagagccggcacgttcctggcgttcgggctgggcgccaggctctgccccggcaacgacctcgccaagctggagatttccgtcttcctccaccacttcctcctcggctacaagctggcgaggacgaaccctaggtgccgggtgaggtacctgccgcacccgaggccggtggacaactgcttggccaagatcaccagagtcggtagctagctgctagattgtgatggaagtacgaatgaaaaaaaagcccagcagaaactctagcggctgggccggctggaaattatgggccgggccattgtggttgccccccctgtctgtgcaaaaataaaacaagcagaaaggaataaaaaaaaggaaaagtattacttcgaacgctg

SEQ ID NO: 18647 - DNA, 3093 bp, Zea Mays
ccctggacattttgatgtcgataccattaactaaaataaatagtttttcttcgatgtaaatgtccgtaaaatatttagttcctgaatttctttcttcctttctagtgtgactgtcccatctaatattctgaaggtgacatgtcattgttgggttgaaaatcacaaggggagagaaggaaaaaggcagggaatgggaggggaaagtacctaagccagctaggaagcaagcagctggaggcagagatgccaaccgcaatgtcctgtcatctttgctcatgaccaaatcggtcaaggtcgcccatggatggagatcacaggaggcaagccgccgccgcggtcaccgtcacgcaagtcagcccggcgcggcgcctgatcgcctggctgaggcttctcttccgggcgttcgttcatagatacggcaaggtcgcgagctggaacgcggcggggcgccctgtcttcgtcgtcctcgcggtcttcttcctccagaggagcctgcgccgccggtacctgtcatggaaggagtcgtcgcgtcttccgctgatggccgccgccgccgtcaccgtgcagacgaccgtcagggcgatggcggcgcagcgcgagctctctgtccggaagcagaccagagctgccacacgcatccaggcgcaatggcgtgcgcacagggcggtgtggagctacctgacgacgaagagagccgccgtcatctgccaacgtgcttggaggcaaagcgttgcacgcaaggagctcaggaagctcagactgtgtgtgcaggagaatctggagagggaaatgctggaggaggtgtgcaggctgcgtgagatggtggacgtgctccagcaggctgtcaatgacgccgagacgagggccgtcaacgagagggaggcggcgaaggatgcgatggcgcagttggaagcagcctcggcgatcgaagagaccgtggtgatggttgaggacactgagaaggtcaagtcgctgagtgccgaagttgaccgcctcaaggatttgctgggagctgaaatgagtgaaacttttgccgccaagaaggcgctttctgaagccgagctgaggaacgagaagctggccaggctgcttggagttgaggaagttaagaacaaacggcttcaagacaccctgaaaaggatggaggagaaggcttctagtctggacgaggaaaacagaatgctgcgacaggctgtggcgtcaaaccctgctattgtcaggtcgccatcgggcgaaaaccatgaagcacctggaattcaggcagctcctgataatgagaaatcaaggaatggtacagtgaagcctatagcagtggatcgggaggctaatgtccatgagaagggcgctgaacagcccagctcaaatggtcaagaagctgggaagcaacagcaagagcttctgatcaagtgcctatccgaagacctgggtttctcggtcggcaggcctatcgctgcatacctcatctacaggtgtctggtgcattggagatcatttgaagaagagaggagcgtggtctttgaccggattatccagaagattactgctgcgcttgaggcgcgagacaacaacgatgcactagcatactggctgtccaattcatgcgcgctcctggttcttcttcaaaggacactgaaaatcaacggggtagctgccttggctcgtcagaggcgaagaacgtcgtcacctctcaaggtgccacaggaaaaccaagatccagctcccgacggacagttgatctgtggactagcccaagtctaccaggttgaggccaagtacccagctatcgcgttcaagcagcagctcaccgcactgctggagaaggtctatgggatgatccggcacaacctgaagaaggaactgtcgccgcttctgggcctctgcattcaggcgccacgcacattcgtcgtcagtcccagaggatcgtgttcccaaggaacagatctggcgcaacaagcctccatggcgcattggcagagcatcatcaagatcttgacaaattctctcgatgttctgaaatcaaattacgtgcctccgttcctgatctgcaagatgttcacgcaagtcttctcgtttatcaatgtgcagctttttaacagccttctgctgcggcgtgagtgctgctcgttcagtaacggagagtacgtgaaggctgggctggatgagctagagcattggtgcttttggctgactgaagagtacgcaggatctgcatgggacgagctgaagcatatcaggcaggcagttaccctcttgatacttgacgacaagcatagccggagtctcgcggagatcacagacgacttctgcccagtgctgagcatgcagcaactgtaccggatcagcacgatgtactgcgacgacaagtttgggaccctgggcattccatcagaagtcgtctccagcatgcggaccaagatgatcgagggctcgtcgagcagcccgtcggcgcacgacgacatcaactcgttcctgctagacgatgacttcagcataccgttctccgtggatgacttcacgaagctgatagtgcacgtcgacgtagcggacatggatttgccaccgctcattcaggagagcagcggcggcggctccaaaatgggacattgaggagtgacaatatgcacgccttttttgtgtgtgttgcggtgatgtgcatagtgcgtgacatattgctctgagaccagggttttgtttttttcttcgtcgactggtcttccatttttctcccatatgactactacctgagtgagtagtgcctgtttgggtttgcgcgtgtgtatgattgtacagaactgagctgtggcatataaggtaaggaaagaaagcctgtgtgattcaattttttttatcaaaagagtgagtgatgcttgcaagtcaagctttcctttgccaagtgtgatctcagattctaactgctgtgacacctgtacttttgttgtttgtttgttttttttttttttttgaaagaagcctggcgctgatggcctccatttaactgttgagcatctgtcactcgctcaatagttaatggtctagagaaacattgtcgaccatctgtgtcactagaattgatgacttgttgtctatccttat

SEQ ID NO: 18648 - DNA, 617 bp, Zea Mays
gctgcagtcctttatgcacggatcaatatatcactatgtacacgaaaaatctacagcacaattacaacgcttctgttcatggctagcagctgcgtgactaggatctcaacacaattacaacgtgtggtttgaggaataaggtgatcaattatcttctcatttcttttttttgtttggtttgtgtaatagaatataataagttgatccattattatgttattctttatagactaataattattaatataataatatgaggaataggttcatttcacaaaatttatagaatatactaacgataaaccacctcatgtagaaaaacagccgttagtcgatcatggttgcttcttttgtcagctttacgtgcaactccagcttcgttcccggtgcagagatgcaaacggcgccaggctaccaccagctgctcaacgcggtggttgatctcctcgctgatgggcaccctgacccaggccaggaggaagacgtcgtttcttgggcttgtggtcgaccacacgatcagaagcatgcgtccatgaggcagcagcaacagattgcggcaaaccctgcacagctgccaccggcaaaatatatcttttttcacaacactacggctggca

SEQ ID NO: 18649 - DNA, 1813 bp, Zea Mays
tcacaagaaaaattaaccagcttagcgcagcccacttccttccactgctgcagattctcgatggagatgaatggggttctgcaagccgcggatgccaagtactgggtttacaagggtgagggcgccgcgaatctcatcctcagctacaccggctcatcccctactatgcttggcaaggtattgcgggtcaagaagcttctaaatgacaagtcacagctgccaccaagttgtatggtcttctcaagtcatgagcaactcctgtggggccatattccagaactggttgagtctgtcaaacaagattgcttggctcaagcctatgctgtacatgttatgagccaacatctgggtgccaatcatgtcgatggtggggttcatgtacgtgtttctagggattttctagagcttgttgaaaagaatgttcttagcagccgtcctccttggagagtaaatgcaagttcaattgatatcactgctgatgccgctcttctaatagcagaccactctttattctctggtactccaaagggtagcagctgcatagctgtagagataaaggccaaatgtgggtttgtgccatcatcagaatatatatcaaaagataattctatcaagaaacaagtaacgagatataaaatgcatcagcacctcaaatttcatcagggtgagatatcgaagactagtgaatacaatcctcttgatctattttctgagtcgaaagaaagaataagcatggccatcaagtcatttttctcaactcctcagaacaacttcaggatttttgtcaatggatctttagcttttggtggcatgggaggtggtgcagatagtgttcatcctgctgacactgataagtgcattaaagatctcagcaaggtcagtggcctggaactccctgacttcactgagctcctgtcagagacaattttcaaatctggggtattgggcaaactgttgaccactcaaaagctggatgatcatgacattgaaggggcaattcatctgtactacaacataatttctcagccttgtttagtctgcaaaaacctaactgatgtagagctattgcggaagtacacactcttgcattctcttccgttggacaagagcttgaagattgtcagaaacttcctcatttctgctactgcaaaggactgtagcctgatgatcagctttcggccaagagagaatggaagtacagattctgagtatgattcagtgtttcttgaatcagcgaagcgaacctatgagtacaagacatatttcgttgatctggatgtgaaacctctggacaagatggtacattattttaaactggatcagaggatagtcaattcctacacaagatatggggaggtcttgccacctccaaagggcaagtaataccaaagacacttcggcgattcagctccaacaatgaggagcctctcttcttactatatacgtctggactatggagaagggtgcatcagagagctccagcccactacgcccttaggttctgtgcatatattgttgtatctcttaactgtttgatgatatggaatattcttttcccaatatggtaccgagcctttcttgagcctcctcctcgctgccgctcttcttcggaatgccgcggcatttgccctcccctcatgtttggcgagccggctgcacgtacagcacgacagtgagtgccagggacatgcacatcatggcgacggtttaagcttgtggacactcagcagatagggtgatgaccgccattccctgtatgacagacacgatgtgcatgcaacatgatcagccattcgatgcatttgatttgatg

SEQ ID NO: 18650 - DNA, 933 bp, Zea Mays
aaaccgaaacaaacagtcactcatcctctttctgtctttcacccccgcgttcacgccggcccaaaccccaaatcgcacgcgtcatcccaatcccaacccaattacgacacgcctgccgccgccacgccgcccgaaatccggaggggaagctcctcgacgacgtagcggccagtggcagctcggacgatggcctcgtccaactccgccgccccggctcccgccgacgggggcgacgacctcgaccagctcctcgacagcgcgctcgacgacttcaccaacctcgatctctctgcctctgccgcccccaaaaggatatggactccattgttgaaacaatgatgcagcaacttctgtccaaggagattcttcatgagcccatgaaggacattgtagaaaagtatccaaaatggctggaagataataaagataagataagcaaagaagaatatgggcgttataataatcagcttgaactcatggtgaagcttattgaggtctatgaaaatgatcctgagaacatgactaggatttttgacatcatgcaaaacatgcaagaatgtggtcaaccccccagtgatcttgtccaagatattgtacctgatctggatctaagcaagttgggacaactgtctcctgagatgcttgaatcagctccaaattgttgcgtaatgtgaggaccaaaagcattccatttgggattcgaattccatgaagttttctttacctgtacgaacccccctttctggctttagtagattgaagataatttccatctggataatctgtaaagccttgcaaatatataatgagttcaatgttctttctggttcttgaatggaatctatattctttctgttgatgtactgtaacactcccttccctcttatacaatgagtacatgcattgcctttcaaaagcccctccttttgtgac

SEQ ID NO: 18651 - DNA, 1409 bp, Zea Mays
gtcctcattggtgtcgcgttcctcttctcttctccccaatctgattcactaccccctccgtcgtcgccgccgccgccgcaacagcagccatgtccccgtcgctcctcctgcttcactcctctgcgactccttgtagggggcttctgcctccgccatccagctgcttcgccactttctcgcgcgcctcctcccccctgcggccgcgacaccgcatccgcctcgtgtgcgccgccgagcagcccaacggtgccgcctctcctggctctggctctggaggcgacgccacggcaaacccaaccaacaacggactggattacgctcctggaactcagaaaaaggtaaccggggaagttatccgttggaacaaggccactggacctgagaaaattgatgctgtaaaatatatagaattacttgaagcagaaatcgatgagctgagccgtcaagttgctaggaaaacatcacaaggaagtaatgagctgttggaatatctgaagagtctagagcctcagaatttgaaggaactcacgagtactgctggcgaggatgtcgtctttgccatgaatgcgttcataaagcgcctgttggcggtctctgactcagagcagatgaagacagcagtctcggaaacaagtgcaagtcagctggccaacttgctgttctggctgatgatcgttgggtacagcatgcgcaacattgaggtgcggttggacatggagcgagtgctgggtgctcccccaaaggtcgccgagctaccaccaccaccatctggaggagagaacatataatacgcagttagaagaatagagccaacaaaccaacctggaattgtagatgtagccatgtaagaatgggctctgaaagatgttgattgaatcaacgattggctggtggcattccattgccttgctttgtactaatatacagcagcactagtaccataggtgattgacttgtcatggctgagtgaggaggcaaagatgcatatccttgaattgatactcttgtgtgcaaagaaatggcaatgcaaattggggaggaagctgttgtttgagctgaaattccagttccagtccgcccagacagacacgcagcagttccgagctcccctccgtcaagtggctgatccgcaaccacctgttggtgcataggctaaggttgagttgtctgtcttgttgattctacttgtcttccttctactccatgttggttaccaggagcgagggagggaaggaaggggaatcgataggattagggtgctgtttggttcacgtatttgtaatgtgataaataactgataatgttaaattatgtttgtttaaatctaactgtaactagatgttaaggattatggtgctatttggttcaaatatttggagtgtgatggtaacattaaatcatgtttgttt

SEQ ID NO: 18652 - DNA, 953 bp, Zea Mays
aaggaatgaataggccctactaaagcagtttccaaggaagtagaacggattgatcaatttttctatacttatgccgataactcatctgtcatgattgacccagaaggcattgaaacactctgttctcaccttgaagttccccacaccgacgttaggattctaatgttagcatggaaaatgggctgtgagaagcaaggttattttaccttggatgaatggagagctggtttgaaagctcttcgagcagacagcatcagtaaactgaagaaagcatttcctgaactggttcaagaggttacaaggccgtcaaatttccaggatttctacatatatgcatttcgttattgcctcacagaggataagaagaagtgtatagaaataccagttgcttgtgagttgctgaatctagtattaggcttgcagttccgccctcaggttgacaagcttagtaattacctcaagtaccaaaatgactacaaggtgataaacatggatcagtggatgggatttatgcggttctgtaatgagataaacttcccatcacttgacaattatgattcagaccttgcttggcctttgattctagacaattttgttgagtggctaagagaaaataaaagctagatcttctattcatgtggtggtgaagttgtcattcaaaatgtaatattcaagaattttctgcaccctggaggatgccgattcggcttgtttccggttgcttcggtggaggctgctcccagaaaatttaaagccttctcatgtcatcttttgattttgcatatttttaaaactggaaacggtctgcatctgtctgtaaaatttgtatcaggatgctatatttaatggccatgtcatgttaatcagtcttggtagagttttaagatcttgcaagttgcaaatatttccatagattataaataaaaagaaattaactggcgagttcatccatc

SEQ ID NO: 18653 - DNA, 1299 bp, Zea Mays
ctctgacctgcgggtccgcactccgcttgctcagccagctatgggccgctattgctgaaaagagtaaaaaaaccgacagccacagggcagggagccagggccgctccgctcctgctcctgctcctgctcctgctctctctctctctctctctctctcggcgtcgattgggcgaccgccgccgccgcccccaggtcttcgctgggcccgtcgccggcgacgagcacccaccaggttcggaaacattgctgacgttcacctgtaccacagtagttcagtcgagtagctgtcggactcggaacacacatgccggcgatggcaactgctcctgtgaaattctctgtggctacgaactccccatgtgtccagcctagcttgcccctgaggcgtacacctgccgccatctccttcccttgtcgtccatggtcagccgcaatgaactcatgtactggattgttgaggcgctctgacgtggttgcagccgcggggcaccagaagttgatgggatctttgaccactaacgagggactcaggtttggggtgggtgccctggaaactttcgagcgatactctgttaaagaagaaaatataacagttgttagtgttcccggaagctttgaggttcctataacagcacaaaagcttgggaaatctgggaaatttgatgcaattctgtgcattggagctgtgattagaggtgacacaacccactatgatgctgttgcaaactcagctgcatcaggtgtactcaatgctggattatctgctggtgttccttgtgtatttggtgttctaacctgtgaagacatggatcaggcgctaaaccgcgctggtggcaaggctggaaacaagggtgctgaagctgctcttactgccattgagatggcctctctgttccggcatcacttaggctgacgcttttgcgtattctggtttctatacacgaggagcatattttttgctgataatctgatgtcaaaggcaagatcatgaaattaagatggccacaatgttctatttctgaagtttattgttggacagtaagttttccggttctatcgaactgcttattgttaacgttgtccttattagttatgcgatcttaagcgttgacgctgcactcattctaagatacatgtgcccgctatcactgcaaacaaggaacatacatcacgattacatgaattcagagaagaatgcgtgatttcagaggcagcaaacatccaggttgttggatgacacactccaaaatttatggattttgggatgtgaataggaaacggaaatggtgcaacgatttt

SEQ ID NO: 18654 - DNA, 986 bp, Zea Mays
atgggtttgggaagcaaaaatccgaacccgattacccatgggtatttcatacgtgtacacctatcatgtttgtatgaatgagttgaggccgagtcggccaccaagcgtagcacgacagcgcactaggcctaagttctagcccaacaaggcaacacagcaaggcaactagcagactagcaaaaaacaaaaccctaaaataaccagccatacgctacgccctatccagccggtcaaccgccgcacgcctggacgttgctctggcactgcacactagcgacttcaccagcgacgaggagcaccgctgactgctaagagcctaggatgatggtgacgaccatggattctcaggcgccaacgaacttagatggtgacccaggaaggtgaaaaagatgctcagcataagagaaagctaactagcaaatggaagcccacgaccaaaggcacactgaagagaacctaccgagtacgttcaacggatgaaggaaggcggatcctgaaggagattgcttcagttctgtcccaagatgatcattttgtggatgcttcgtctcacaagggttgccaaattaggagggaaagtgctcatggcgaaagtgtttgctgctacaacgtgagagcgttgttcgatgagcttccaactcctcacttgcttctggagataacaccgtttcctgctggacaacttacggacaacgactaccgtaaggcagagaggcttgagatggtcctgaggctcagcacttctatttaaaaaacctggggactgatttttcaatttcccctaatacttaatttgcccaagttgtaaattgtcttcctatgggcctgtaaattgacgcagttggcaaagaatcacttgaaaacacaagttctggttgcatggattgatccattgagatactttagttcattaatttcccctcaatccctgggaatgccgaagaggatttaagtttccaaactaactctaattaactgaattttcc

SEQ ID NO: 18655 - DNA, 699 bp, Zea Mays
attcgattcacacccttccgtgtgaaatgaagccattggagggaaaatcgatctgacattgatttcgatcatattattcagtaataggcggccaagagcaatattcaggagtgtatctagctgaaaagatgaacagatacctgggagagaactggaagagctttaccagtaggaattattttgatcgttctggagtttttatctctgtcgtctggtctgggccccttattgtcatatcgattgtcagtgtgattagcagcctcattgcattatgtcgattgatggtgaaatggaaaagagcagaacttaggcaccgggctcgacttgctcatgacaagaaggattgagagaagagaaaaaaatccttattatgggagaatcgaatgatttagtgattttgaacttttctaagtttgtatgccgcttgtcaacagggcactcaagaattaagtgttggaaatcctggataagcgaggagtgtctacagctattgttcctgctggtcactgtaggacagtagcagctagacatacttcataaaaaaatagatatggtacctgtctctatcttgttttagattgtagatgtaaacatggatgtaatcttgattgaaactgccaagatttgtagaacaaagcctcactgtttcgtttcccatcacaaatatgaaatatgagacgcggaagtgatacgagtaga

SEQ ID NO: 18656 - DNA, 876 bp, Zea Mays
attcaagtcctccagttctttgagaccaacatacataattcaaaggtatatccgatacgtggtaagagatacaaatgccaggactgcactgagttaataggctttgacctttgcgaagcctgctacaactccagttcaaagctcccaggacgctttaaccagcggcacacccctaatcacagaatggaagttgacaattcagcactcgtgcataggatactgagacaccatggcatacccgaggaaggccctgagggactgatgatggaagtggttggtcctgatgcaatggtgcagatactcattgataatcaaggaatggaggagggcaatgacgagggcccaggagaggcggccattgaagaaccagttggttctcttggctcaatgtcgcgtctgtcgcatctattcatgtataatccagaaatggaggatggcaatgacgaggactcaggagaggaggcggccattgaagaaccagttggttctcttggcgcaatggcgcctctattcatgtatgatcaagaaatggaggacaacgaggaggatcaggcacactagatgcagattgcaccagctgcagcgaagcctttgttttgtgttgctggggcggctctacttatgtaatgtggaatggagggattgcgcaagcttaaaagtatggctggatcggccttgttttttaactggttctctagttactgccatctaatagccaacatttttcccgcttttgtaaatccgtgcagttgtttgtttcaaaggaaaatgcaataaggatatgcagaactatattccttattttaaactctactcctttcgtcccgtgaagcaagtcattttaggctatccgcaaccattacctctaaatttttt

SEQ ID NO: 18657 - DNA, 1684 bp, Zea Mays
ggcctccacccagcgtacatgcgctgcggtcgtctgttgccatctcgcgttcggtggtgactccgggctccgggcgccctgcgcccctggatttcgaaccgagaaagaaagctgctgcccaccgtttcccaagtcccatcgccgcccaagaaccggagccacgccgcagatccgccaaaatcacacctcctagcccgtcctccgtcccaatctcttctcgggccagggaggcggcgggacttggtgcctgcatccgagccctagacatggatcaacctgaggaaaaccctgaattcccaagctgtgatgcctactttgaagctatccagtccaagaagaagttgccactgactttgcaagaatcactaactgctgcctttgctcagattccagtctcatccttccctgaggttccagctggtcgagtaattgaaattcctggtgatacttctgttattgatgctgtaaggactctctctgaacagaacataagggcagcaccagtactgaatccagaacctggggctcctactgattggcaggggaggtaccttggtgtcatcgattactcggcaatcatcctttgggtactagaaaatgctgagcttgctgctgttgcactctcggctgcatcggcaactgctgctggagttggcatgggtgctgttggtgctgttggggtggcagctttgggaacaactggcccagctgctgtagctggcttaactgcagctgcaattggggcttctgttgctggtggattaactgctgaaaagggtgtggcgaaggatgggctaactgctgcagatcatttaggggaggatttctacaaagttttacttcagcaggaacctttcagatcaacaacagttcgatcgattgttgagtcgtaccgctggtctccttttgtccccattacactggacacttccatgctgactgtacttctgttgctctctaagtacagattgcgaaatgtccctgtgattgagcctgaaaagcctatcatcaggaatttcattactcagactggtgttgtcaaagggctgcagcaatgtaaaggaagggactggtttgactacatttctgcacttcctctttcagacttaggacttccatttatgtccattgatgaggttatcaccgtcaacagtgatgatcttatcttagaagctttcaagtgcatgaaggataacaagattggtggtgtcccagtagtagaaggccccaaaagaaaacttgttggcagtgttagcataagggacatccgctttctgttgcttagacccaacttattttcaaatttcagttgacagtcattgaattcatgaagactctaggctccactcttcctgattcagagagcaattgcctggtgaagccaccacccacttgcactcctgacgcttcccttggtagtgttattgacagcattgcatcaagaataacacacaggatatatgtagtggatgatgaccttgaggttgttggtgttgtgactctgcgtgatgtgatctcatgctttattcatgagccacccggttattgcgacaactatttggcttcagcgatggagaagcttgaggggaaaggagtcagatcagtggagaaaatttgagcttttctgtagcgtgaatgttgataataacagaacacctagaagaagtgaaagttgaagtggaag

SEQ ID NO: 18658 - DNA, 2021 bp, Zea Mays
aggaaaccgacgccagttccaacgccgcgcgcggcatcaggccgcgctggcgcgcggggtccttgatatcccgcggcggccggcctgctggtttcccgcggttcctccccttccccgatcggcgccgcgatccctgttcttcctccgcaattcaacaacctcagattattattattattgttgtcgcgacgtcgatcggtctacaatcatctggttcggatcgtgaatcttaaatcgagcaagaactggtttcggatcaatcaagcgtgctcaaacaagggttccaaggttttgcaagacaagcgtgtgtgtgagagagagacctgcattgtttggtcgccactactaccatgcgcgatggccgcgtcgctgtcctcggcgctgagctccatggaggtgatgctggacgcgctcatgcagcgagggataggcaagccggaagaagccagcagcaagcccaaagaagaggagccgccaccggcgctgcccagccgcccgacggggcgaggcagactcccggcgctgcataggcccggcggcacagcagcggctccgtggatccaccggccatccccggtaccgcagccaacgcaggaagacgatgaggagaaatgtctggtcggtcgggagctggaaagacgggcggccaaggcagaggaggaggtgaagcagaaagacgaggagatgaggcagaaagagcagctcatcgccacgctgcaacggcaggtgcagcactacgaatcccggctctcggaatgcgaggtcaggatgaaatctgtggagaggcagatcacttcgttacagatggctcacagtcacagccagaccgctggcgtaagcgtaaggagagatggatcgacgaggcacatccagggatcatctcgtggaggccttccgccgtcgtctcagccatcgtcagtgaggcgccagcagcgcggttccgagcccgccgctgccgacgagagcgagaggacgacactggcggagccggtagtgaaccagctggccagggagttccagacggggagggaggcgttcgagcacaacgcgcgcgcggtggcggaggccagcaggctgccgacgtcgtcgtccactcctggcagcgccaggtcggtggaggagctcaagacgctcaagagccagttcgccacgtggaaaaaggagtacgaggcccggctgaagaagaccaaggccgagctcaagaggctcgtccacgccgagaagaggaacggcgccggcgaccggcacgcgcaccagcggcggtgcgggtggtggaggatcaaagcgcccaaatgctgcagggcgcccaagtgctgcagcagcttcaagctacccagccccaaatcgtgctgctgctgcttccgccgctgatgcatacatgattcactgcaaatgcatgggttggctcttcgcatgctcagggttggatttgacgccccaaaaatcattggaatatgagaccatagtgagtgaacaagaagagaattactggtgtcttttactcgttgttggtaccgatctagacaccaatctagccaggtgtaccgtcatcggtgctttctgctcaggcgtggatagtccgcgacctgtgacaggagcgggatcttgtctacgccgaagccggacggtccacgggtgcgcagaggcggtggcgttcgccaacagcacctggatctaacctcccgaaagggaccccatcacgaagaagagatcatagggtttatcttgggattaacataccacccaagacacctttagacgacgtgaagccgaagagaggtgaaaataaagatgagaaggctaagttactgctactccgagggcataaaaagtgaaggaatgataaattaattaattggttcgattgttgtgttctcaatcgtcagtacccttcaaatatataaggagaggtatggaccctttcctaggcgttctccaatagctcccacgagtttagagggataaacacgcgagaagaaaggagcttaactgtctgatctaatcctattgtggaccgtccg

SEQ ID NO: 18659 - DNA, 612 bp, Zea Mays
ctgattctgggcaatgctactgctacaaaaggggaagtgtgttgccattggaggtccaacgggtgaaatacttgaaactaatgcccatgttttgggtcaaatttcgtcaaaccttagcaacatgcagatacaggacaatatctctctgctctgccaaactcgcgataatatactcagggtcttgaaagagataaacgatgctccagatatcatgaagcagatgcccccgctacctgtgaagataaacgaggagctcgtcaactcgttgctccctagaccaactgtacctatgcagtagtgatagcaaaatgagcttttaagataggcagctgaaataaaaaaaaaaaggggcagccctggtacttttttgttcgttttgtagctccatcctctcgccttctgtattgtatgtttcgtctggatgcttatgtttgttccaaccttttgcaagtcaggcggttggaacgtgtaccaagttaccaagggctgcttccacataagtatcaggtcctgactctgttttgtaatctatagctgtttggtaatgccatggaatcggagtacactttagggtctgtttggttgggcggtggctgtgaaaaaagttgctgc

SEQ ID NO: 18660 - DNA, 980 bp, Zea Mays
cttagaggcggcgaatgctgatatggcccgacagtattctgttcttgaagaaaaacattctcaaagccaggctgaactggtccggcggtgctctgatcttgaggaaaagtattcccaaagccagactgggctggcccaggtttctgctgctctgaatgatgctaacatgctaaattctactctccgcgctcagctcgattatgaaaagacaaggtaaaccgtgctgttagcaccgcaatctatttcctacttcccgcagggagtgtttcccgtctccaccgcattccctgtgctgaaacctggcacttctacaagggagagcctctcacggtcttcgagcttcacgacgacggtcacattgaccttactgtcattggcccacaccttgaggcaggccagcgcccccagtataccgtgccaccgaacgtgtggtttgggtcgttccccacactagacgtcgagtcgttcgcatctgatggcagcgttcttgtcaagtctcggaagagggaccctgagctgcattactcccttgttggctgcacctgtgcccctggcttccagtacgaggattttgaaatggccaaatttgaggacgtgagatccatcgctcccaaggctgaacctttcctcaagtttcttattccctctaccgattaactccagagcagcctcagatgattgtggatgggttctcagcgactttctatactgcatactgtacggatggtgtttctagtgtgattccatgagagttctgctttcacgacagtgtagacagtaaactgtacctttgtggtggcaccggttgaaacgtttggtgcattgaaacagaataacagctggtcttgatgttgaatagcaggtgcttttgcaaaaccctgaaaccgtactaggatgctgggagcataggaggatctgataaggtttcacgtgattaaattcaaccgttcatggctctcgatcgtgcagagcttctcccg

SEQ ID NO: 18661 - DNA, 2953 bp, Zea Mays
gaccgggccacgccatggataaaggagcagccggtggctaaatttttggttggccccgcgggcgcacgtcgtttccgctcgcccccctgcgatgccgggaccggccgtggaggcagcggccaggagcggcggcgaccaccacggcggctgctgcgggaaggcggccggcaagtgggagaagacgtacctggatgtcctgggcatctgctgcaccgccgaggtggcgctcgtcgagcggctcctgacgcccatccaaggcgtgagggcggtcaccgtcgtcgtcccgtcccggaccgtcatcgtcgaccacgacaccgccgccgtctcccagttccacattgtgaaggttctgaacaaggcgggcctcgaggcctccgtccgagcctatggcagcagcgccggcgccggcgggcggtggcccagcccgttcaccgtcgcctgcggcgccctgctcgccctgtccctgctcgcgccgctgctccccccgctgcggtggctggcggtggcggcggcctgcgtgggctcccagcccatgctgctccgggcgttcgccgcggcgggcaagctgacgctggacatcaacatcctgatgctcatcgcggtcgccggctccgtggcgctcgggagcttcacggaggccggcgccatcgtgttcctcttcaccgtcgccgagtggctggagacgctggcgtgcagcaaggccagcgccgggatgctgtccctcatgtccacggtgcccaagaccgtcgtgctggccgagacggggcaggtcgtcggcatgggcgacgtcgcggtcggcaccgtcgtcgcggtcagggccggcgacgtggtccccgtggacggcgtggtcgtcggcgggcacagcgaggtcgacgagagcagcctcaccggcgagtccttccccgtgccgaagcagccgcagtcggaggtctgggccggcaccatcaacttagacggctacatctccgtgaggacgacggccctcgccgagaactcgacggtggcgaagatggagaggctggtggaggaggcccagaacagccggtctcggacgcagcggctcatcgactcgtgcgccaagcactacacccctgtgtggttgtgtcttttgcatgtgcagccgtggtcgtcctcgcggcgggggtggtcctcgtgcccgccctgctgggagctcgcgacctggagctggagcattggttccggctgtccctggtgctgctggtgagcgcgtgcccgtgcgcgctggtgctgtccacgcccgtcgccaccttctgcgcgctcctgcgggcggccaggatggggctcctcgtcaagggaggcaacgtcctcgagtcgctgggcgaagtcagggtcgccgcgttcgacaagaccggcaccatcaccagaggggagttcagcatcaaggacttccatgtggttggggacaaggttgaaatgaaccagctactctactgggtatctagcatcgagagcaaatcaagccatccaatggccgctgcacttgtcgagtacgctcagtccaaatctgtacagccgaagccggagaacgtgaccgagacctgcatctatcatggcgagggcatctacggggtgatggatgggaaacagatctacattggaaacgaaaggatcatagcaaggtcctcgtgtcgtcatcatcaacatgctggccaccaagaaacagacggtctcaaaggcgtgtccatcggccacgtgatctgcgacggcgatctggtggggaagttctcgctgtccgacacctgcaggacaggggcggccgaggcgatcctgcagctgaggtcgatggggatcaagtcggtgatgctgaccggggacagcgcggcggcggccaagcacgcgcaggagcagctcgggggcgtcctggaggagctccacgcggggctcctgccggaggacaaggtccggctcgtccggggcctgcaggcgcggcacggggcgacgctgatggtgggcgacggcatgaacgacgccccggcgctggccgcggcggacgtgggcgtgtccatgggcctgtccgggtcggccgcggccatcgagacgagccacgccgcgctcatgtccggcgacatcctcagggtgcccaaggccgtccggctcgggcgccgcgcccggcgcaccatcgccgtgaacgtggcctcctccgtcggcgccaaggccgccgtgctggcgctcgccgtcgcgtggcgccccgtgctgtgggtggccgtgctcgccgacgtcggcacgtgcctgctcgtcgtcctccacagcatgctgctgctcagggacggcgccgcccgccgcccgaggtgctgcgctagcgctacggcgtgcaagagcaagcaggcgtccaagccgtgctgcgcgacggtgaagccggtggcgacgacgaggcacaggcacgggcacgggcacgggcacgggcacgcaggcgcggggaagcccgggacgctaggaggcgacaagcagggtaaggactgccatggttgctgccagaaggagagcaagccgcccgaggacgccgtcgtgatcgccattccgggacgggccgtggagcaccggaaggaggccttccctcacgagaacgcgggagccggggggtgctgcgctgcagcgcacggtgccgaagacgaggtatgcattgtcatcagcgccaggtcgccctgctgcagcaccgcgaggagtcggtctggttctcccaaggacgcattgtgctgccacggctccggtggtaaagacggcggcgccatctcagccctcgtgtgctgacctcacctaccagcactaccattcgtggaatacggtcgtcttgtatataaaaaaattactcatatcctatgccgtagacaggaagttgtttctattacgagtactaatattcttgtaatctatgttcccctgagatcattagaaaaaaaattatatataatactctattaaaaatctaatgtgg

SEQ ID NO: 18662 - DNA, 2151 bp, Zea Mays
gaggaaggagatattcaaaatggtcagctagtacaagaagaagagagggagaaagaccagaacgaggaaggagatattcaaaatggtcagctagtacaagaagaagagagggagaaaggccgggttggatttattgtctactggaagtatattatgatggcatataatggagcacttgtgccacttattttgctagctcagataattttccaagttcttcaaattggatgcaatttctggatggcttgggcagcaccaatatctgaaaatgtgaatcctccaatcagtagtttgcagatggtaaatgtgtactttgcattagcaattgttagctcattgtgcatattcattcgatcacatcttcttgtcatgaccggatgtaagactgctaatattctatttgagaacatgcacaactgcattttccgagcaccaatgtctttctttgactccacacctagtgggcgaatcttgaacagagcttccacagatcaaagcacagtggatacaagaatttttgacctgatgggctatcttctatttcctgctattgagattctaggaacagttattctgatgtcacatgttgcatggcaagtcttcatagtttttgtccccattattactgcatcgctgtggtatcagcaatactacatagatgcagctagagagttgcaaaggttggttggagtttgcagatcccccgtgcttcaacatttttctgaatcaatggctggctcaaatataattagatgctttcaaaaggaaagacaatttatccgttatattggatatttggtggataatttatctcgaccaagtttgtataatgcagccgcaatggaatggttgtgctttcgcttggatatgctttcatcctttgttttttccttcacattgatacttctggtctcttcaccatctgctttaattgacccaaagactgctggtcttgcggtcacttatggactaagcctcaatatgctacaagggtgggctattgctgtcctctgcagtttagaaaatagaatgatatcagtggaaagaatgttgcagtatacgactattccttcagaaccaccacttacaatatcagaacgccaaccaaatagacagtggccaacaaagggcgaaattgagtttcttaacctccatgttcgatatgcaccgcagctgccttttgttttaaaaggcctgacgtgcaccttactcggaggaaagaagacaggtattgttggtagaacaggtggtggcaaatcaaccttgattcaggcactatttcgcattgtggacccatgtattggccaagtgtttatagatggcactgacatctgcaccattggactacatgacctccggacaagattgagcatcattccacaagatcctgttatgtttgaggggaccttgcgaaccaatattgacccccttggggagtacagtgacgagaaaatctgggaggcattggattcatgtcatcttggggatgaagttagaaagaacgagcttaagcttgactctacagtgacagaaaagggcaaaaactggagcacaggtcagcgtcaacttgtgtgtctgggaagggtgattctgaaacggaggaagatcttggttttggatgaggcaacttcatccgtggatccaattacagacagcttgattcaaaaaaccttaaaacaacaatttctcaaatgcacaatgattacaatagctcaccgtatcacatcagttcttgatagcgacaaagtcttgcttctggataatggtgaaattgcagagcatgacgccccagcaaaactgctagaggacagttcatccctattctccaaacttgtatctgagtataccatgggatctgataagtggcgaatgcaagaaagcagctaaatcaatactctacagataatacaggacaaacgccctaggaagtgtgagtatctacgtgtcaccaattttatagcttaataaaaagcaaatttttaaaaaacaaaaaaaaaactatgaatatccatattccccaaggcccttggaagtgtgatatatttgtttcattgtatactagttaggggcctgtgcgttgctacagtttctatatatcacattgataaacttgctttattgagataacttttgaaacatgttcaattgagc

SEQ ID NO: 18663 - DNA, 1055 bp, Zea Mays
acccttggccttggcctggcgctcgcacctcacagcagcagcagcaacaacaacctccactgccgcaacccaccgagaggcgagaccggcggcggcaaaaggacgatacaaaagcagccagggttgctggcaacagcgtcggtcgcccgcccgctcgccatggggaggtcgccgtgctgcgagaaggcgcacaccaacaagggcgcgtggaccaaggaggaggacgagcgcctggtcgcgcacatcagggcgcacggcgaggggtgctggcgctcgctgcccaaggccgccggcctcctgcgctgcggcaagagctgccgcctccgctggatcaactacctccgccccgacctcaagcgcggcaacttcacggaggaggaggacgagctcatcgtcaagctgcacagcgtcctcggcaacaagtggtccctgatcgccggaaggctgcccggcaggacggacaacgagatcaagaactactggaacacgcacatccggaggaagctgctgagcagggggatcgacccggtgacgcaccgcccggtcacggagcaccacgcgtccaacatcaccatatcgttcgagacggaggtggccgccgctgcccgtgatgataagaagggcgccgtcttccggctggaggaggaggaggagcgcaacaaggcgacgatggtcgtcggccgcgaccggcagagccagagccagagccacagccaccccgccggcgagtggggccaggggaagaggccgctcaagtgccccgacctcaacctggacctctgcatcagcccgccgtgccaggaggaggaggagatggaggaggctgcgatgagagtgagaccggcggtgaagcgggaggccgggctctgcttcggctgcagcctggggctccccaggaccgcggactgcaagtgcagcagcagcagcttcctcgggctcaggaccgccatgctcgacttcagaagcctcgagatgaaatgagcgcgcttctaccctctctgtgtagcttctcccccccgtcgtcctcgttttttgatgatggatcaacccattct

SEQ ID NO: 18664 - DNA, 377 bp, Zea Mays
cgttgcgttaggctagatccgctcccctgcaggccacgccttctcgccgctcgcggaaccaccgccgccacctcaccactccagctccagcccccgcccgccataatcgcgtccccttctcgtccttccagagcttcttaaaccacccggcccgctcccagcgtcccttctccgcccacagccagcggcgaactcgatcgagcaggatggggtttatcggcgcgcacggcgtggagacgctgaagcggtataggtacagtggagaggaccgctcggtggtggccaagtacgtgctgcagcccttctggagccgatgcgtcactctcttcccgctctggatgccgttgttctgcagatcactatgggaagttgaggag

SEQ ID NO: 18665 - DNA, 2194 bp, Zea Mays
agcttttactcctcagtcctgctccatctgcctttgctacttttgggggacctccacgcccctcaaatccagagaacaaaaaggagagagagagagaaagagagagagagagagagagagagggaggcagagagcttgccatcccaagcaaaggttccctccttccccacctcgcgctcaacccccctcatcctcgcacatccgattgtgccctgtgctctgccgttctcttatccaagatttcgctggcggcggctcagggagcgaacaaagattgttttttttttcgggctatggagacgaggcctgattcattcaggcccgggcggtggagtggcttcctgaccgggtctgattcgtattggttcaaatgatctgggcggcttaattggttgcatccgcttccgccggggaatcggagctagggctgtggtttgttggccggctggtggatttgtcggcttgggtctggtgagatctggagggtttctggttcagcgcacgggccgcaggtctgcgtagatcccctcttcgattccgtggcggatttgtttagggttttggtttgagtctggtggaacatgattaagcagatccttggcaggctgccgaggaagccggggaaggctggggatagccgggaagctgctgctgcggggaatggaactgagccgtcgaattcctacagtgttgtgaggggcatggacccagggaacaagagggctggaaatggagactatccagttccatctggtctaacttctaacccagtgatgaatggggctgtggtgtatcactccagtgagccgttaccggcattcaaggatgtgccggcatcagagaagcagaatttgtttgtcaagaaggtgaacctatgctgtgctgtgtatgacttcgcggatccaactaagaacctcaaggagaaggaggtgaagcgtcagacacttatggagcttgttgattacatcacttctgcgaatggcaagttctcagaggttgtcatgctggagatcacaaagatggtgtcgattaatttgttccggagctccagccccacccctcgtgagaacaaggccattgaaggggttgatctggaggaggacgagcctctcatggatcctgcatggtcgcacctgcagatcgtgtatgaggttttcttgagatttgtagcatcacaggagacagatgcaaagctggccaagagctcaaaggaggtgatgttcttgggtgagttagaagaggttttagaggcaacacagcttgcagagttccaaagatgcatggttccactcttccgtcagattgcccgtagcatgaacagctctcatttccaggtggcagagcgggccttgtttctctggaacaatgaccatatcgaaaacctaatcaagcaaaactacaaggtgctattacctatcatctatccagcactcgagagaaactccagagatcactggaaccaagctgtccgtagcctgacgctgaatgtccgcaagatcttctctgatcacgattctgcattttttggggagtgcgatcagaggttcagtgacgaggagctcaagcaggaggaatctgattcgaagcgagaagccctatggatgcgcttggaggaaatggccgcctcaaaacctcgcgaaaacagtcccttaggcgcaccgaatggcaaacccagccaagctgctggctagaatagcccaccatatcagccgcagccgtgtaactctgactctgggttgtgattttagctttgggacttttttttgtcgttggtttgcctctggccctgttgtaggtgggtaggatgtgtttggttttgtcaggactgtatgttcaaagtgtacacatacagaggaatttgagagatttggcatgtgtagtaacattactcaggattaccatatagcccaataaacaacgtcgattttgattgcaaatacctagtttgggtggtttatataccgaaatgacaatgagcgatgtgttcttgtttctgctgttatattatgtactcctatatgtaatggcgctggaaactgggacatggctgtccgtacactttggttccttcgtgctgttcgtctaattcagagtctggagcactgcacggttttcttgcgatctgttcttttgttcctttggctgaaacagaacagcattgacgtaacagaacacaagtgattctgcttgtcta

SEQ ID NO: 18666 - DNA, 1272 bp, Zea Mays
aatatgcttttgccatgggttctgtaacactattaactggccaaccaaaggagggtgtttttgttgaagcaagatctgaatccacaggtttttatgaggaagctaccacggattcttttggtagatttcgtcttagaggacttgtgcctggatcgacttactctataagagtggctgcaaaagataatcttcagtttgcagcagttgagcgtgcttcacctgaatatttgtcagttaatgttggtcatgaagacatgactggtattgattttgtggtttttgaacgccccgaagtaacaatcttgagtggccatgtggaaggagatggcattgatacgttacatccgcatctctctgttgaaatcagatcagcaacagactcttctagagtagaagctgtacttcctcttcctctttcatactactttgaagtccgagatttgcccaagggcaagcatcttgttcagcttcgatctggccttccatcacatacacataggtttgaatcggagttagtcgaagtagatctggaaaaggatccccaaatccatgttggtcccctcaaatataaaactgaggagcgtcatcaaaagcaggaactgaccccagcaccagtttttccgcttattgttggagtttctgtggttgcactggtgatcagtatgccaaggttaaatgacttataccagagcgctgtagggatgacttctctgggttcagggatggcaccgaccaaaaaggagccacgcaagaatatattaagaaagagagtgtaaatggcagattagcttagccttaggggtcgagaaatgagacatgacaaattgagcaatttcaagagtggaatagcttctggtttccccctcgggtaattttgccgacgaaaaggaatgccagttttgttgtacgatagcactatgcacagtttttgaagccttagattgtgccgttttgcagttttagactataaagaaagagttgctgcatcatgaatgaactttctcaccagtcagcatgcacgatcgaataggttaatctgagcggtccaggactaagtagaatagacaagtttgttgtggcacgttgtttgcccctctttttgattgtacaacgaccaagtaaagcgtgcgcaatgacttctctatgacttacggatctggttcgccctttagcatatgtggtctagcgtggagcgtttataatataaatttaaatagtttttaaaattatttttaatgtaaataataaataaatatgatttatctaagcgtg

SEQ ID NO: 18667 - DNA, 986 bp, Zea Mays
cacattccaattccgccaccgccacttctttcttccccgcggacgcgtcgaaaagcgagcctctggggagactcgaggccactctgccttcccctcctatcctgtgagctgtaacgcttggaggtatgtgaactatccatataagttcctgtgagctgtctcccgctcactcggtccctgtccatccgtagcgttccattccattccatcccatctccctcctcgcctacggcttcttccaccgcggcatcgtgcccggcctctgcttcggcgcgggcctggggattacgctgttcggcatggcctacatgttcgtccacgacggcctggtccaccgccgctttccggtcggccccatcgccgacgtgccctacttccgccgagtggctgcctcgcacaagatacaccacatggacaagttcggcggcgtcccgtatgggctcttcctgggaccaaaggagctggaggaggttggtggcctggacgagcttgttagcagtccggtgagtgaagctactgatactgaagacgcaggagaagaaaagacgcgtccagttgtatgcgttgtccgaacaagcgtgttcatgggccagagtgtgccaaatgagttctagctttaggcgagtgggccaaatgagtgtgggctgcgtcccagggtagtataagtactatgagtctgtaataatcaggacaagaagaatttaggcgagtgggccaaatgagtgtgggctgcgtcccagggtagtataagtactatgagtctgtaataatcaggacaagaagaatttaggtaaagtaatacatctatcgccatcttcctttcattctctcctacacgctactctcttctctgatcttctctccctcgaatcccagtagcatccagtagctaacagagctggaaaaggagctcgcgcgaaccagaagggccatctgatggattcgtacatggagctggaggaggttgtgagtccggcgcggcgagc

SEQ ID NO: 18668 - DNA, 935 bp, Zea Mays
ggaaaatatgcatagaaaactctgggaagtgggaatttaggaaaggaaaagtacaaggttcacgtgaggcaggaacagaagagaaacctgcttcacatcatggagacaaaggtgccgatggaagatctgacatcaattctgaaaacaacaaaaatggaggacaggaggatgccaagtacctaagtgacctgagctctggcgatgaggaagacggagactacagtgacaggggtgtcagctccgctgacagtgacggagacaataatgcttctgattcctacaagagcgacatggaggaggatgtgtctgtaccacgcaagagaacccgtcttgctgcccgtttggcaaatgacaagcctcggccagggcttcgtcggagccaacgaaacatgaagaatgatgaagagactatgcatccaggtcaggtcacccctccaccaatggcgaagaaaacactgaggcaaaggcccacgcctgtctccaagcagcctgacattactttctcgagctctgaagatgatcttgcacaggttgttgcagactcagaggatgaaagtgggtaatttggcagaggttcggttgcatgcggtattttggattttgccttgtgggagccggttgaattccacaggtttagcgtcactaggcacttccatagtttcacttctaccggctggccggaatcagacgcagacagcaccggcgttttccccatatccgatgtgttatcttcacgaagtcattgggacacctctgacccacttgtatggtgatttgtacatatgcatttagacactatactgcgatgcatcaccactggagcacccaaaaatcttgctgatgaaatgcttctgatgtgaactatgttatccatgcattcgaagagaaatggtgcttatgtttgctttagacagcttgcctctctaagactctaa

SEQ ID NO: 18669 - DNA, 1557 bp, Zea Mays
cctaatcggctacatgtgaccgaccagactgattaatcgcgagggacaagattgaagaggctttgctcttggcaaatttgtccgcagaaaaacctcatttctctcactgtttagagtggcttctgtttacagtatttgatgcagatatatcaaggccaagtgcttcaaaaaatcaggcttcacaaaaagttgattctcccaagaaatctcttcttgagaaaacttgtgacctactacggaattttcctgaatatatggatgttgtagtcagcgttgctaggaaaactgatggacgacactgggctgatctgttctctgcagctggacgatccacagagatgtttgaggaatgcttccaacagaggtggtacaggactgctgcttgctacatactggtcattgctaagctggagggccctgcagtcagtcagtattgtgcactccgtttgctacaagctacacttgatgagtctttgtatgagcttgcaggggagttggttcgcttcttactaagatctggaagagattttgagaatgccacttcagactctgagaagctatctccaagatttctaggctattttctgttccgttcaccttataagcggcaatcttctgatttgaaaagtaactcaacgaaagaacttagtccacatattgcttctgttatgaacattctagagcgccatgctagctatttgatgtctggcaaggagctttctaaactcgtcgcttttgtcaaggggactcaatttgatcttgtggaatatctacaacgagaaaggcaagggtctgctcgtctggagaattttgcttctgcactcgaactgattggacaaaagctccaaatggatacactgcaaagccgacttgatgcagagttccttctagctcatatgtgttcagtcaagtttaaggaatggatcgtggtgctagctactttgttgcggcgtacagaggttttggtggatctctttcagcatgatttgcgattgtggaaagcatatagcattactctacagtcacatgatgtattcagggaatatcttgaccttcttaatatcttggaggaacagctttcgtctgtctctgatcttacattgcagaatggaccattgtcatgaatgctggacggtgacactgattgaaaaaaacaactgaatacggcgttttagccttgagttaattaacacatacggcgggaccaggaatctgatgtaaatagattattcagggtgtttttctctttgagcaacaccccgaggtgctatggcagttttttgtacagtgatcagctaagcacctattgttgtatcattagtttgttgcagcggagttgagtctgcattcttcgccttactgtaaatatgtgctgcgcccttaacattgtaagccatataccattctgagcagcaagttcttttctctgttccatagaatcgtgtttaaagctagaagcctagaacatgtagatagtcttcacctgatgtttgtagactccgagatattattaaaactgacactatgatttcttaattgcattttttccatggcata

SEQ ID NO: 18670 - DNA, 1327 bp, Zea Mays
atcctcatcacaggcaacaaggcaccacacctcttcttcttcttcctcctcctcctagcacagctagcgcctgctccccttcgcctgtgatcatgtcttgcagcagcggcaagtgcgactgtggctccagctgctcctgcggcagcagcacaagcaagaaccacacctcctcccttcgcctgtgatcatgtcgtcttgctgcggcggcaagtgcgggtgcggctccagctgctcctgcggcagcggatgcaacggctgcggtatgtaccctgacgtggagaccgccgccaccagcagcgtcaagaccacggtcctcgccgcgccgaccaccaaggccagcgccggcggcttcgaggcggccaccgagggcggcggctgcgactgcaacacctgcaagtgcggcaccagctgcggctgctcctgctgcagctgcaactgagctggcccggcccggcgatggcgcacgagagtcgagaggaggaggacgacgacgaggcgtataaatataatagcggcgtccagtaaataagatcctgtcaactgcacccgccattatccatggtcgctcgctcctcgcctgcgtctcctggtcctggggttcgtctgaacgtcctcgcggcttcacgacggcgatgccgcctccgtcgatcctgtccgtctcgtgccggatttaatattagatctatatgcgtgtttttctgcgttattactacatctacatgtgtctgtctgtggtgtgtctctctgacggccccatgcgtcagcgtcactgcttgcttcagttctgcatctcactctgttgaggtgaaaaactgataacatctttgcagtgctagaaaacctgagaacctcatgatatctaagtaactgagccaagagagagagagagagagagagtatctaagtaccttgatccacttggacagcacagttagactctgaaacgatcgttgcataatgcagagtaccctgaaattcgaagcatcgacatgaccagctacagttccggctactgttatgggtttttctcttcgcccctttagataacagaatatcgatatctttataaaggaaataatggaatagtaatgggcaatgctacggcaatttccctactagaacgcaatttcttaaataaatttgaacagttattttttttagtttttaaattgattatttcattaacctacaaaataaaaaaaaacacagcaaagccctgtagtgatatctaactagcccaaaaagaacaaatgtatgagtatcttaatgtgcttggaaatatttttcggcgagagagagagtgagagagctcttaatgtgattttaa

SEQ ID NO: 18671 - DNA, 2601 bp, Zea Mays
cagtgtacttgaagttatggtttcatctttcaccgaagcggtttcagcgcatgttaatgacctgcatcaactcattgagaacacattgaaggcaaagcagcatttggaggctatgatctggtgtatcaggcatagctttattcaggatatctgctcaaggtacgctgatcatacatcatggagttctgatgtgattcaaaggaaagcatatgcagaaacaaaatggcctggattttctgatgaagtgtcagatgtaaatcaagccagtaagagtacactattcattgagcaggccctacaaaaccttgggattgaacaaagttatatggataaggaggaagaaatagcaatcacatgtttacagaatgaacaatcatcatctatgttctgttccacaattacaaccgatcattttagtattgacagatacccttttaagaatttgcgtgaggcagttgatgtactctttctacacggagcatcagacatggcatgctacttcattaaattttcttgacgcttctcagttattgtattatctatttgatcgacattggagtaggccagattcagaatggaggtatctggtggatgattttgctgctacttttgggattactaatagaacattgcttgagtgcctggtattttgccttctagatgattattcttcagaagccttggaggaggcctgctctcatcttcccaagatctctagcaaggaaacacatccaaagatagcacaagttcttctggaacgacaaaaatatgatatggcacttcttgtgctaaagtgcacagggcatggaagcttctctgctacagaaaactttaaaaaagatgacatttcatctcttagtgaggcagtgactgtggttcgtgtcagaattgaatgtcgcctcctaacagaagcgtttatgtatcataggagctactgctctaaggtgaaagagcaacactcagcagatatgacacatgctgaggatgcattaaaaaactcttgggtttatcatgttgagatgatggtgaccgaattttgtgctatctgcattaaaaggaatttagttgataaaatgattgatctgccctgggattctgaggaggagaaacatcttcacaagtccctctttgactctgctcatgaaatgcccatgaaaccaaatggtagtctgcttgttgtctactaccttcggcgttatcggtatttggaggcatatgaggttgaccgtagtcttcaaaaatttgagcaaaagatattggaaaatacaactgaagagattgcttcaaaaatcagagcaattgctcgatggagagaaagtttagttgttaaatgccttgacatgcttccggaggtccagagagagaatgtgaaagccatcaacagtggagaacaaagtcaatttgctcgaactgctcaattatcttctccagctcatgtgggcaaatcacaaagtcctgtcatggacttgagcacaacttttacgacttctcttcaaaataagtcaagcctcctccgaaaaaacaatgcattgactgattctggtggtctgatccgaagcagccgctcagaatttggtagaaaggtcccatctgttctggataccagggcatcaccccatgggccacctacatccaatatgagatcaagtgcaggggatatgttccccacagtgggccagagagttgagagtccatttttgaggggggcgaaagatatcagttctagaaaaggagaggagggtttcaaaaaagggattaaatatggtgatcacgatccagtgcctatgtatttgaacttaagttctggtgatacacctatgaaagactaccgaacgagtttgctgaagactgcagttaacaaaaccactatttttcaaggaaaagattctgttggaaaaggagagctccactttggttcacgtgccgagaagcctttcatcttaaatggaactggtgtaggtcaaaatggcctcgctaaggtgtctggatatgctggttttcgtgaggattacaaagtaccaactaaggagaacatcttgagctctagcaagagatcttcaatcgatggagcagaagccagcaaaggtgtgtcaaggtggagatccgacgagtctagtgaagacgaagaagagagaacaaacagggagagcggagcttctcttgttactagaaggcgacctagattttcgagaagatgatatatccacgtcctcatggatctttattaattgtttgcagggcgaggattttttttgaatatctccacagttattaccctaatgtaacaaaaaaaacgtttcatcggaaaagtgtatgtgataatcatgcataattttacactgccaaggccgagatgtgtagttcaggtgtcacacaggatgctataaaacaaaaatgagatggcataggcatgttgtattcagatagttcagttcgcgtagttgtaaaccggtgcaatagtagttgtaaaccggtgcagtagcaaaatactaccttctgtggacatgagtttgagtttgtctttttagatttgcttttaagttaatcactattgactttgatctgttatacctgatattttataagattttacaatacaaa

SEQ ID NO: 18672 - DNA, 3179 bp, Zea Mays
tcgggtcccctcaaatcaatcgatcacacgcgtcccgccccattcggccattcccagccttcgagaggtcgccgccgccggtcgctgctccgccgactcggggatgccaccggcggtagcgcccgcctcgccgcgccaagaccctagcggctccagtctttccgccgcagccgccgcggcttccatggcgaacccggtcctagggcttggcctcgcgccaccgggcgctgagccctccgccggaacgccaccgtcttcacgccgcgcgccgcgcttggccaagcggcgccacgcgcccgcctcctcccgtttccgcgcggcgcaggcctcagtcggaacatggaacccgtttggcggcggcggcggtacggatggacagactcgaggttttgtgtttggtgctgcttccccagtgagccagcagccttcggagccagcagtggagatatcttcatccagtgaggcgcccttcgtgtttcagagtgtgagggagaaccttcctcggtttgaggagggattgtctggttcatcaatgctccctgataagatggggaagctgaacctgcgcacatcaggtgaggttggcgatggtctcggtcaggggagggatcgaaaggatggaagttcagcatttggtgttgatatatctggtttgttttctaacaaggaagataatgggctccaggagaagcttacacagttgaatttaggccacagagaacccttgcaaagtgagaagagggatagtgctaatggtgtgccacaagcatttgtgtttggatgtaatggagctgggagttttgctgattgtaagaacacagttgcctctggtgcacagtcagatgatcctagttcagtttgtggcactgatgcaaaagctatggctgggaagtcgacgcaattcaatataggcagtcaagcaccttcctggggtggagggattgagggtactaatggagcaccagaagctttcacgtttcaaagtaccgcagtaagtggtcatgtggataatataaacaatgttgtctccggtgccaataccagtgccaatacaagttcgtccactgttgctaaaggtgtgggtgatgtagatttgcttccagaaaagttaacacggttgaatataggaagtgacatgcccttgcatgagtcgaaaagtggttatcagcccaaagtgtttagagcagtccaagggacaatttttggaaatgaaacaagcagcacatcagataggagcagtgaattcctctctgcaaatagcaatacttctagttcaagcagtgatttgttctctacagcaaatagcaacacttctaattcagctaatggcacttactgttttcctccagagaagacaccagatttgaatgcaggagagggagtcatgtcggagagcttggaaagtgatagttctaactgtccaccacaaacctttttatttgaaagaaatgaaacccgaagctctgtttcacactctgcaagcatagccatggatgacggtggcaattttgtcaatcacaaaaatactgacacctgtagttcagctcgtggtacatttgattatgcaggtgctctcccagagaagatgacgaaattaaatataggatgcagaaattcataccatagcaggaaagatgaaactgctactgaaccaccagaagtatttgtatttgggtgtaatgtttctagcttttcttctacccatactgcaagtaaatcacatgatcccacgactcctgaattttgttttcaaagtaaagcagaggcaacttcaggatatggggctgttccccaaaccaaagttcaggagtcatacttgtttacgactttgaataattcttgtagtccctctacttttgagaatgcagttcctgctttcagttttgggacaatggatgcagaaatagaaactgctccagatgatcatttttctgtcaaacaggatttgcctgggttttccagggagaccttatttggtttagacagtataaaatctgcatacaaggacaaaagggaagcacacaaaggcaaaatgaaaaataaaaggccaactaggctaaagcaacatgctcagctccatcaggttatttctaaggaagcctgtaacgatggaaaatcatcagatttagcaggtgactattcaccaatggattgttcgccatatcctgcagaagctgaacatgtgccaacagaggcatatgtggcttctggtcagcccgttcacattggtgatagtgttatctcaaactggaacaccagctgtgctgaagatgatgtagtttctgcaaccgagcacttgattattgatgtaaacctaccaatgtttggagatgaaggtagaggaccgaaactagatgcatctgagagcaattttggtagcagcttttctagttttcaaggagatcaaagtaatggaccacagcattctttcactaatattgggcaagactgtaacgataatacctacagaactccccatgattttgttgagcctcctgcttttcaatcaagctcatcaaatttcagtgggctgaactttagattcggtgtgtcatcctctccacaaatctctgcagcagcacaaagacgtaacacaagaaggaagttaagaacaaagggcagtctggcatcgaaaccttcaactatcggctcttttgaacagtcaaaatcttcacaagatactaagggcatgcggtttttctgtgaaacaagcaaaaatgaagacccagtgaaagagcaaccgtcaagaaagtcttctacttctgcggccttggaggcttgtgaaacctggcgtactagtggaaataaagcctatgaaaatgggcactttgctactgcagaggattattatacccgtggaataaactctgttacccactatggtgtttctggacattgttctcgcgcattgatgctgtgttacagcaaccgtgcagctacaagaatgtcgcttggcatgatgtgggaagcacttcaagattgtttgactgctacatcaattgaccccacctttcttaaagctaaagttagagctgccaattgccatcttgcattgggcgatcttgaagatgcattaaaggagttacatggcctgtttgaacagtaacactgggagttcttctgaccctaaaaatattagccgaggcttctgatggcctggaaagagtcaaggaccttcg

SEQ ID NO: 18673 - DNA, 1493 bp, Zea Mays
ccgtgctgtcgcacggctgggcacaatgagaggagtacatgacttttgagctaagtgtttttcgtgagttctcataaatcattgtcctcataacttgtaatgggtggaagccagtatgatgatgactgggtgttgcccagtgccgatatcactcttgttctggttgggaaacttggctatggcaagagtgcaactggaaatagcatccttggacgggaagcatttgtatcagaatattcacatgccagtgttactaatacttgtcagttgggaagcactaccctgaaggacggccgcaccatcaatgttattgatacaccagggttatttgatatgagcattacatcggacgaggctggtaaagagattgttaaatgcatgaacatggctaaagatgggatacatgcagttctgatggttttttctgccacatctcggttttctcgagaggacgcaagtacagttgagaccattaaagtcttctttggtgaaaggattgtcgaccacatgattttagtcttcacttatggagatttagttggtgaatctaagttgaagaaaatgttaaataatgcgccagagtatttgcagaatgttgttgagctatgccaaaacagagtggttgtcttcgataacgtgactgaagaccgaaggctccaagcgcagcaacttgacaaattgctcgatgtagtggattcagtttgtgcaaaaaatggaggaaaaccattttcagatcaaatgttcactagcatcaaggaggtgcatgatagagaaaaagaggtgcatacctcgggatattcagatgagcagatatctgaattgaaaaaggagattcatagaactagggatgaacagcttgcgcacataaccaacatggtcgaggaaaagttaaactgcactgtggagaagttgcaacagcagctcatggaagaacagaacgcaaggctggaagctgagaaggtggcgtacgaagctaggctgaaatcagaagcggagatccagaagctcaaggagagcctcaagaaagctcaaatggaaaatgatgagttccggaggatggcgcagagccagggcagtaaatgtgctatcctataggcattagtacttgctagaaattggtggagctatcgtgctgacgcgtctcttgtacgtagtactttctctgttccaaaaatatatagttcaatacaccttagtagagatgactacgagagtatccaaacaagacctcgtcggacatgttagcctgaagcttgcttatggacatattggatatagtttttgggtgagaacttttgaacaacttccttgtttttttctctcatgttctaatgcatcttttctctagctgtatgcgcacaacattggagttgttccccaccaaatagaagcattagggatcatccgacaaagaaaacgagtatcctctttctcactagaattatcatgacgaacagcaaaaggatgaataacaccgtcttcgtcttcattgc

SEQ ID NO: 18674 - DNA, 880 bp, Zea Mays
agcgcacatgcctctgcatcctgcatggcctggagaacgaggtgtcggtgctgtcccctcgcgtggcgtttctggaccagcagcggaccatactgagcgtcggcaacagccacctcaagcagcggatcgcagctcttgcccaggacaagattttcaaggacgctcatcaagaggagctcaagaaggagatccagaggctgcgccgggtctacgaccagcagaacctcaggatgtcagccggcggcgccgccgcttctgaccatgggccgccaccaccggtggtgcgcgctgagaaggagctcatgagctagcgagccagtccatgcgtgcccgatgtgcagtccgacttaccattaacatggagggaacattgcatcatgattttttatttccagattctgtggatgttttcttccttctttttttttggtcttcttattcttccattaacatgtgcgttgattctttgtatgttgatctggatttggtgtattaattgtgcaagttgtggtgaaatcaccaggataatttatctgtcatgtaaattatttttgatgcattacatctcttctctggaaatctggatggctcttgatttttgtagggtctttctttttttttttctttttccttcggtgtgaccagatctcttactattgccaggttcagtgtaatagaattagcaaggtggcccaagtaaatagtgagggcagctaccgtttttgttctttgtaacgtagtaacatttgtatcggagtttttttaattgaaattctttttgcaattttattacctgtttggtaataaacttatactctctctatctccctcggaacgataaacatattttgtacagaaaaaggttctttgcaaattccca

SEQ ID NO: 18675 - DNA, 6106 bp, Zea Mays
gggcatctctctcggctgctctcgaaagctccgcgcttggcgtggcggagccgagccgagggctgatctcgtccacacggcactaggatttctccttcccctcccgctgccgttcacgtcctcaataaataccccaccctactccatcttctcgtgttgttcggcgcacgcggagacagcccgcgatcccgatcccgatccttcttcacgcgaatctcgacgatcccccccttccttccttcaagaaggagagcaccctccacctggtgctccgcctgaggggtggcaatggtaatgcagatctttgtgaagaccttgactgccatgtatgataccgtctttgaagtatttgtattgtctgtcgtgactaagtttgtttcgtggaccggttgtcttctaccctacccaaaactacagtgtggcagcaaatgatgaataaatgtgatgtttgaatttaaaaatatgtgctgaataatgttgtttttttgttatgtcagttaatgttactaaattggctagcttttaaattttgtttactagtgttcgtcgcacctacatctttgtactgaatgtttgctttaggttctgacaaactcattttgagactagttaaatacttaggacctaaaatgaatgcagtaaatatttatcatattttctatgaatttggtcagacttaatttggctgaatccaaacctaatgtttttttactaatcatattgatatacatgtttgattgtctgattatctggtttgttactattttacttggttcgggtctctatttcttggtgaatctacatagacttgtgcagaacctggttgtgatcataattctacttcctctggagataaagtggcttgcttttctgtatgtctaattttttgtttgaccattgaaaaacaaacaaccaacttacggatcaaatcagtattactgccagaagtatatttgacccttaacactatttataaattacataaagtttcacgattaaaactgacggacggatgttattggcctagaaatagctcgaaagctctaggcttaacaacccttgcactaaattattgtgattaacgttgtactttatagtgacaaaaattaattggaattatatagtttcttttgttttgtagaagcaaactaagttaggctataataatatagatagatgattaggtttatatatggtttcttttgtgaattttattaaggatcaactagtgtcatgaagttgatagacataaaatagcgacacatttcttttgccgtactataaaaagcgctggaataattaagatagtcaagagggtgaatttggtgtctctaacttttcttggacaaatttaaattttgaacacaagcttaactatctccgtgtgttcaataacgtgtctaataatatgataaaaagtttatatcctgattttctattttatactacgatggtaattttaaggatgctaattttaaaattgaattgcttaaatataaatgtataaaataagtaaaagatcaatggactcctcgatgttttgtattatagatgttgttaattgattaacttgtactgagttatttaagagcaaggtagtaagctgttgccaacaactgattcggttgtcacggattagtggccttaaataatttctagccggattacttctctaatcttaacgatttctgatctatttcttaaaaaacgaataaggtctgaatcaagatcagagctggagatgtgcatgggtgcatctcatatggcacaccgcagacaaaagattgcatagttggctccgatcctatttggcaagtgattagagatggcaatggcccaatggttacccgcgatccgatactcgatgagtatttactctattagggtatatatatggtctaaatgttctacctatggatttcttgttaggtaaaaaccttcaaccaattggtaaacgggtataagaaaattctgtccctacccatacttgttaacccgtgggtataaacttagcctaaaaacatgaacttgggctttacttatatatttcttttgacttagcctaaaaacatgaacttgggctttacttatatatctcttttgactatttaacaaccttttcggcgataataccatagaaggcttaacaactatttgatgatcatgtaatagaacatgtaatgtgttatgtgttactatcctagtgttgctactatatccaattatctatggtgttcttgaatagatgattgaatgatgttagaaattttgtaatggatatattgacatttgtataatgtagatgtttaatctttgtgagtacggatctgacgggtaactcatacctatatgggtaatataagtgacccgatgggactattttttttatcttaggtatggatatgagatagataagagatcataatgctcatgtacgccatcaatgccatttttttaaatgaacaacatttgaagccttttccatgagaaagagaaaggggaactaagatatttatagaagttccttagagcaacttcaataggaaccctaatcacataaacaaattaaaatatagagctttaataagaaaagacagctacccaagagccttattttaatgaaattcgtgtaaacttgaagggtagcatatttggatctgagatccgcagccctatatggttcgcgctcgtcccaaccacctcggatattttcgctttcttcttcgccgccaccggctcccattccaccgccaaggtcagcttcgtttccatcgccgcatcgcgttcgcgtgtgccaaccccgctcccatctcaactgtcaccgtccgaagaactgatccgttctgcacaaccgctcgtcactctccaaatttgctgcacctgccctctccaaagttcttgcactcgtccctctccaaagttcctgcagattcacttctctccaaagttcaggaggatgtgtggtgtgacagcgctacaacaaatctgtcaacggggactctcatcctcttgctcatagaaagaactgcagtgttacaggtaggtaattactagagtactactactaagtaaatctgtcaaaggcagtcatggcatccatatccttcacatcagtactgggagtggcacacgcaccgcacacatactactacatctactagtatgtagtggagtgcttgaaaggcataagcgaattttcttcttgtttggtctacgtccatttgcttgtccactaaccggctagtttactctgctttttgggttttccacgtctctacaattgtgactgttagagcaactccagtagttctctaaaaaatagcttgctaaaatcatgtttagcaagttgctaaatagctattggaagtaaaaaataacttagtttccaatagttgctcatatttaggaagtagttcgattttgaatctagctttagcggccctgtccctatgagatctgcctgataataaggttgagagcagaggatatgagggcggaagaaaaaaggtcggtcgatatgaattatggatgagtggtggtccggtgacgcaacttatgagaaagttaggttcgacggtgaaggagaaacttgcgtcatacgtgtttgacctagctacctcattatgctagaaaataaaaaagagtgtgttataactggctatctcactgtataggaaaggtaaaaataatcacgctagtgtgaagaaattgacgtcaactgtatttagggagttcctaccgagttgctaaatgtggagagtaaatagagttgaatagcaactaactaaatttagcaagtctatttagagaaccattggagaagtatttttctgttcacttcttaaatttaagatttagagagttatttagagaactattgaagttgctcttagaccacctataattgtgactgttgaccacctatagatgcggttcaactagccctccgaccccctctcgagagttccgctccaccgcggcgaaggaagtggcggaggaggaggatccgcgcctgcgctgggccttcgtgcggaaggtgtacgcggccccccgctgccgtctggcccacgtacatcgccatcctcctatccctgtccccgctcggactcttcctcgctaccgccgtgtctgcggatctggccaagtagcccggtaggaagcgccgtgggaggagacaggcgaggcgttcgaccgccgccggcagcttaggacgtaccacgtctctgttctatgggttcacgagtttcggggccctacatggattctccgcctccgcctccgcctcgtccgccatcgccgccgcgacaccctcctcaccctcagggcgagcgtcacgtcggcggggagatgctgtaccaggacacagaccataggctccgcgcgctggtcgggagcgccgagggcttcggccgccacgccatcgggggcctctacggggccatccaccgcgtcacgtcgctccaagacgacgggcccgggagtctgagggaggcgtgccgggcggaggagcccctgtggatcgtcttcgaggtgtccggcaccatccacctccactcctacctccgcgtctcctcgtacaagaccatcgacgggcgcggccagcgcgtggtgctcaccggcaaggggctccggctcaagtcatgccatcacgtcatcatctgcaacctggtgttagaaggaggccgtgggcacgacgtggatggcatccaggtcaagcccgactccaccaacatctggatcgaccgctgcaccctcgccgactacgatgacggcctcatcgacatcacgcgccagagcacagacatcacagtctcaagatgccattttatgcggcacgacaagacgatgctcatcggtgccgaccccacgcacgtcggcgaccgctgcatcagggtcaccatccaccactgcttcttcgacggcacgcgacagaggcacccccgcctccgcttcggaaaggttcacctctacaacaactacacgcgcagctggggcatctacgccgtctgcgcaggcgtagaggcccagatcgtgtcccagtgcaacatctacgaggcaggtggagggcccccaaagaagacaactgtattcaagtacatgccggagaaggccggcgaccgagaggacgtggtggcagggtcgatcagctcggaaggggacgccttcctcaatggcgcgctgccctgcctgatcgataaccctgggtctgtcttcaggccagaggagtactaccagcagtggaccatggagccagcgtcgccggcgctcaaggacataatacagctctgcgcaggatggcagccggtgccccgccccccggatgatcgctgactttcatcattctgatatgctgcagctcgcttctgtaagaatattcgtttcacggaagcactgcatttgtatgcatctcatcctaggtaattcaacatttgtttcatggtagagtggcatttgtatgccactcctcttcatctgccccctctctgaaatgtagtagaaaagttgttatggttttctatttgtgtctttatttatggtacatacaattcccaatgtaaagatatttctctcgtccatagcagtacaatagcttttagttgtgaatgctactcgtatgtcttatactagaaagctgcaagacacgtcaatctgctttgtagacattcacagaggatgaggatctccattcataaggaatgcaggaattttaactgaacttgcagagcttgatggtttagctgtggcatggtggttatgacaaaggatcctccaaaagctaataaataaaaaggaggtggagacgggagcttgactgggacgcggcggcctacacgaactcggtggcgtcggaggcggcgaggtcggcgataagcaacagggggcgagagcggtgacaaggacaggcgtgtgagagtgggattctcttgcttctctggcttctagtttctcgaggtcaagttgcatgtgtactcacgggtcacggtaaaggagctatgtgccaattaatttaagttccatgtgtactctattaccggtacaagatgaatcaattgttgatttgtgataagtttaaactattggggaattgattattagggaattgctg

SEQ ID NO: 18676 - DNA, 73 bp, Zea Mays
ggcggagcgcacgaggagagaggacgcacggccgacagtttcgacgtcgcattcgctggagatcccaggtcct

SEQ ID NO: 18677 - DNA, 2564 bp, Zea Mays
atcctatcttcagtctcctcaccgcgcgctctctaccgcttgtccgtttcttcctcttccgaggtagcaacgtgcttcttcattcacctgttccagaataaggccgggcttgcggatgccggggtgcggagtagcggggagaggtgatgtgggggtatcgtcggccgcgcgccgcactccgccacaagggaagagccgcccctgcctctggatgactatcgctcgcggttacgggaggcaacatgagctcaaatattgcacatcgccacaaagcaaatctctgttactagaagcaagatttggtcgacatgttactaggagcactgcttatctgctccaaaattcccggagcactgcaatgacaagactacagaagtctgggaagtttctgcaacctgtcttggactcctcaagaaattatttgactagtacattctacaatgcaagcttgaagaggagagttctgtcgagggttgagtgctttgtgtcttcagatccaataaacaatggttggttgaaaccaaggaggtcagagaacttcactagtttggagagcgcatgtgttcagccagaatacaaactaccagtcaggacacgtgctgactgtaaagcagagcagtatgaaataacaggctcacctttgagcccttctgatgttcctgctgatgccgttatgattggagatacaaacgagatttctccctggtggcaggagtttccaaagcgctggacggtcgttctcctctgcttctttgcgtttcttctttgcaatatggaccgtgtcaatatgagcattgcaatccttccaatgtcgtcagagttcagctggaatccagcaaccgttggtctaatccaatcatctttcttttggggttaccttctcacacagattcttggaggtatttgggctgacaggtttggtggtaaggtagtactaggatttggggttgtatggtggtcatttgctacagttcttacaccccttgctgccaagattggtcttccatgcttactcaccatgcgtgccttcatggggataggcgagggtgttgccatgcctgctatgaacaacatcctttccaaatggatcccagtctcagagagaagcagatctcttgccttggtgtacagtggaatgtaccttggatcagtcaccggcctgtctttgtcacctctgttgattagcagatttggctggccttctgtcttttatgcatttggatctcttggaaccgtttggtttgcactgtggcaaagcaaagcacacagctctccagatgatgatccggagctaagtaaagctgaaaagaggcatatactgggtggcagtgccttaaaggagcctgtcacttccataccatggaggctaattctatcaaaggctccagtgtgggctctcataatatcacatttttgccataactggggaacattcattcttctaacatggatgcccacatactacaatcaggttttgaagttcaatctaactgagtcggggcttctctgtgtcttgccatggctgacaatggctgtttttgcgaatattggtggatggattgctgatactctagttcagagaggggtctctgtaacaaacgttcgtaagatcatgcaatcgattggtttccttggaccagccttgttcttgacactgctgagcaaagttcggactccagccatggctgtgttatgtatggcatgcagtcagggtagcgatgctttttcacagtctggcctgtattcaaatcaccaagacataggaccacgttatgcgggggtacttctcggactgtcaaacactgctggcgttctggcaggagtttttggtactgctgccactggctacattcttcagaaaggttcttgggatagtgtgtttaaggtgtctgttgtgttgtacatagtaggaacggtggtttggaatgtcttttcaactggagagaaaattctcgaataagctgtggacattcctatatgccactatacggaactgtgtgattttgatgatgtcattttggcaaacaaaataaattttagaagagatacatctggaagaaaactccattttatgcaagaggtgtacctgaatctgatgtttgggctatcggaagaaccagatcaaattagggtactgtgtgaggtcaagaaggtacacttggaacttgggaaaattcttgtacacaaagcaaccgcaccaagggcacgtcagatttttgcagttgtttcttgagaagtccaggcttctgtcaagatcaccaatccacatctttttgttttaaaatgattgacagttaaatcgtgtatcaccttgcctttgcttaaggcgctacaggtactgccaaactaatgtatgtgcttttcttatcgaaaaacctaaatgtatgtgcttcagatatcttgaacatctctgctgtttgcgtcattgctactattgtttcgtgtaagctgcataatgatactaaatgatgatggtgtcatttttgttttacttctattgacagacaaaaatatcctcacatgaaaattagattgcatcattggtcacaaaaacaaaaagaata

SEQ ID NO: 18678 - DNA, 1110 bp, Zea Mays
caaaccaactcggaccaagcaaaaccacacacacacacgccacctccttgagtccttgtcggctcgccatcgccaccatcatttcgtgtcgagtctccgtttcaccctccccaaattcccctcaaatcgatctcccccgcaccccgaatccccgcgcccccgcgtctgaatccggcgccccccgccccgatccgtccgatccgcgccgaatcgccgttgctcggggcggaaccctagcccgatctccacctgtttcctcgcgatgggcgccggtcgtgtctgccgcggcggccctttctccgcctcccccgccgctggcgccgccgcggggcggccgttcccgccgctcaccgcgtcctcctcctcatctccttcatcggccccttccgagacagcgtccacgtcggtcaccaagacggtgaacggctcccaccacttcaagatcgcgggctactccctctccaaggggatcggcgtggggaagttcatcgcctccgagtccttcaacgtggggggattcgactgggcgatctacttctaccccgacgggaagagcggcgaggatggcgctgcctacgtctcgctcttcatagccctggccagcgaaggcaccgatgtgcgcgcgctgttcgagctcacgctcgtcgaccagagcggcaaggggcaagacaaggtgcatacccactttgggaggtctctcgagagcggcccatacaccctcaagtaccgcggcagcatgtggggctataagcgtttcttcaaacgagttgccctggaaacatcagactatcttaaagatgattgccttttagtgaactgcaccgttggtgttgttcaatcacatactgaaggaccaaagatatacacaattccagtaccacggtccaacatggctctacatattggtcagctattgacaagtgggaagaggacagacattgcatttgaagttgatggagagatgtttcctgcccacaaggtgattctttcagcccggtctcctgtttttagggcgcaactttttggtccaatgaaggataaggacatgaagtgtataaagattgaagacatggaggctccagtattcaaggacatttcagcggcccaatg

SEQ ID NO: 18679 - DNA, 1901 bp, Zea Mays
atgcgcgcgaaggggcgcgtaagatactagtatttctctctctacgggagttccctctccttcggtccttcgcgagtccaatggccgcctcgccctcttcacccttgacagcgccgccagagccggtgaccccgccgtccccatggaccatcacagacggagccatctctggcacgctcccagcagccgaggccttcgcagtgcactacccgggctacccctcctctcccgcccgcgccgcccgcaccctcggcggtctccccggcctcgccaaggtccggagttccgatcccggcgcccgcctcgagctccgcttccgccccgaggacccctactgccatccagcctttggccagtcccgcgcctccactggccttctgctgcgcctctccaagcgcaaaggagctgcggcaccttgtgcccatgtggtcgctcgtgtccggactgcttactacttcgaaggtatggcagattttcaacatgttgttccagtgcatgctgcacaaacaagaaaaagaaaacactcagattctcaaaatgataatgagaattttgataagacaggacatgatgaagcagatggagatgtcatgatgttggtaccccctctcttttcagtgaaggataggccaacaaagatagcgcttgtaccatcgtccaatgccatatctaaaaccatgcacaggggagttgtacaagaacggtgggagatgaatgttggaccaactctggcgcttccgttcaacactcaagttgtcccggagaagattaattgggaagaccacattagaaagaattctgtagaatggggttggcaaatggctgtttgcaaattgtttgatgagcgccctgtgtggccaaggcaatcactttatgagcggttccttgatgataatgtgcatgtctctcaaaaccaattcaaaaggcttctgtttagagctggatactacttctctactggaccctttggaaaattttggatcagaagaggatatgaccctcgtaaagactctgagtcacaaatatatcagagaattgattttcgcatgcctcccgagctacgatatcttctaaggctgaagaattctgagtctcgaaagtgggcagatatgtgcaagcttgaaacaatgccatcacagagtttcatctacctgcaattatatgaactgaaggatgattttattcaagcagaaattcgaaaaccttcttatcaatcagtttgttcacgttctacaggatggttttctaagccaatgatcaaaaccctgaggttgcaagtgagcataaggctcctctctttattgcataatgaagaggctaaaaacttgttgaggaatgcccatgagcttattgaaaggtccaagaagcaggaagccctttcgagatctgagctgtcaatagaatataatgatgctgatcaagtttctgccgcacatactggaactgaggatcaagtcggccctaacaactctgatagtgaagatgtggatgatgaagaagaggaagaggaattggagggttatgattctccacctatggcagatgatattcatgagttcaccttaggtgattcctatgcatttggtgaaggcttctcgaatggatacctcgaagaagtactgcgcagcttgccattgcaggaagacggccaaaagaaattatgtgatgctcctatcaacgctgatgcaagtgatggagagtttgaaatttacgaacagcccagtgatgatgaagattctgatggctagttgtatctttttttgagctgtgatcttccttagcttcagttttctaaacacataggattggttcacatgtatgtaagaactgcatagatggcttatttgttaaattattttgggtactgaggagcttagtagttcaaacccatcaaaaaacaa

SEQ ID NO: 18680 - DNA, 1487 bp, Zea Mays
ccgcccgccggatttcacaatcgatatgtcgaaggtgcagttgcagaggacggaagaaagcctagcatctgggacacattcacacatgaaggctactccctcgacaacgccacaggcgacgtaactgcggatcagtatcataagtacaaggacgacgtaaagcttctgcatgagatgggtgtcgatgcctaccggatgtcgattgcctggcctcgacttatcccagatggtcggggagccgtgaatccgaaggggctggagtactacaacaatctcatagatgagctccttagctacggaatacagcctcacgtgacgatataccatttcgatttcccacaggctcttcaggacgagtacagcgggctgatcagtcccagattcatagaggacttcacggcgtacgcagacgtgtgcttcagcaacttcggcgacagggtcaagtactggagcaccgtcaacgagcccaacgtcgagacgatcggcgggtacgaccagggaatcctgccgccgcggcggtgctccttccccttcggcttcggctgcgaggaaggcaactccaccacggagccatacgtagcggcgcaccacctcctgcttgcgcacgcgtctgcggtgtccctgtacagagacaggtaccaggctgcgcaaggaggacggatcggactcaccttgcttggttggtggtacgagcctgggacgcagactcccgacgatgtcgcggcagccgcacggatgaacgacttccacatcggatggttcatgcatcctatggtgttcggggactaccctccggtgatgaggaggaacgtcgggtccaggctgccgaccttcacggacgaggaggcggcgcgagtgagggggtctttcgacttcgtcggattcaaccactacatcgtcgtctacgtcaaggctgaccttggccgcctagacgaccaagtgcgagactacatgggcgatgcagccgtgaagtatgacatgccgtttctcaagtcacgcaaccagttcccgttcggcgccttgacgagcgacttcatgacgtccaccccctgggctctcaagaaaatgctgaggcatctccgggtgacatacaagaaccctgcagtcatgatccatgaaaacggtactaaataatgatacccctaaagtatgtttcgtacgttgctgctcgatcacgcctcaaatcacttcaggagctgccggacagcctgatccatccggcgtgaacagctacgacgacgagttcaggtcacagttcctgcaggactacatcgaggccacgcttcagtccatcaggaacggatcgaacgtgcaaggctacttcgtgtggtcgttcctggacgtgttcgagtacctgttcggctaccgcctccggttcggcgtctacggcgtcgagttcaactcgacggcaaggacaaggtaccagaggcactcggccaagtggttcttttaggggggacgtattggctcagactctaaagattatt

SEQ ID NO: 18681 - DNA, 1326 bp, Zea Mays
gaggctcggatttggtttctggtctcagttgcgttgtgggtgatccactcgttcttccctccacgcgccaaaaccccagccacggccatctcctcctccactcctcccgttcgtccacatccaaaagcttcccaggagaaaaaaagaacagttatttgcagcgggaaccctaacaaatcactcgctacaagcgagcgagggagagatgtctctccagtacgtggcgcccccggtccgagcactcgccgtgctaccggcgccaggcccccctcgccgccggacaagccatgtgtccctataccttccgagccggcggccagggctcgccgtcgccccggtccgtgcggcggagtcgtcctctccgcccaccgtgcccgcctccgcggccggcaaggctgtcgtcccggacgacgagttctccctcgccaaggtctctttcggtgtgatcgggctggggcttgggctctcgctcctgtcgtacggattcggatcgtatttcaacctgcttcctggttcggaatggtcagctttgctgctaacctacgggtttcctctcacaatcatcggcatggccttaaagtatgcagaactgaaaccagtaccctgcataacctacgctgatgcctttgctctaagagaaaagtgtgctacccctattctgaagcaggtcaggagtgatgttacacgttttagatatggtgatgaacaacacttggatgaagcactgcagagaatctttcaatatggtttgggtgggggcattcctagacgtaatgcacctatattacaaaagattcgagaggaagtaactgacgatgggaaatacagtttagtactcgtatttgaagccaaagcattggagctatctgattttgagaagagacaggctaaattcacctccttttttggtcctgggattaaagcagaaatcggaaaaggtggcggtgatctatatgaagttcgtctaatctcagacactgtttagaaacaatctttgtgaattttctctaatacaaaactaaacttttattttttttctttgatccgctgattttgcatatatgatgttaatagcatcagattttacccttgtttctgttgtgccttctgagcttccatgtatattggctgttgatccttggccatgacctgacaccttcatacactccatggacatgtgtgaaggaaaagttgttgtaatattagatgtaaatgaactttgattgggaacgctgtccatatagttgaaaggtatttagctgtttttttcatggagttgaataatgttggatttgacgcatccatctttctgatgctgaggattgg

SEQ ID NO: 18682 - DNA, 1956 bp, Zea Mays
atacgtctctacaggggtggacctaggatgatgtgtttctactcacatcaaatgccatgtcttacaattcagctgatacaatctacttccgacaggcacggtctattgaagctcttgccaaaaaggattttgagaacctgaggcaacccagtgatgaagaggaacccaaaccaccagctcgaaggggtaggccaccgaagaatcccaagacagagggtgatgtgtcaccagacctatctaatgtgaaagcaaataaacctgaagacaatgtcgatacattcagaaaaaggtcaactggagacagaactcgaaatacaaataccccaatgaaagatctgtccagttttcacgatacgtttggttcttttagtgcaaaaagaacagataaaattggtgattattctggttcatcgaagtggggaaagaaacctgttagtctagatgacgaccgcaggagtacatatgatcagcactattcacgtaatagctctctgtttgctgccctggatgatgagaggaaactactggtgccagtaggggttcagcagccacatgcatatgctaggagcttggcacgatttgcatcaaaattgggcccagttggctgggatgtggcagcaaatcgtatcagaagggcactcccccctgggacaagtttcggcccaggatgggttgtagatggtgaaccacctcaaaactctcagtgggctcctgcagcatcgactaatccctcctctgagcccactgctccacccaatatgccatccaagaatgatgtactcgatcacaagtctggaccgtcttctaatggggatgttactggtgaggagcatttaactagaactcaaacagtggcttctacatcaacaagctttgataagagctctgacatttccagtaaagtaaccaagcttgagaacggagttaccgagtcatgtggtggtacggacaatacgggatcagcagcgcctccaatgcagcaacacagccacagtcgagaaatccactctaacatcaatggctttactgctatgtcaaacgccatgagtcagtacgcggggcaagggttatttggatcaggcattcatatgacgcacgcccaagtgcttgggatgttttctggcatgaatggcaaagtcaatggctatatccataggcacccagtaactgctgatagtcttaaaacagcaggacagaacggagatgttggaaaggcaactgtgaaccccgtgcaaagcgcaggccaggatccaaagaccgcgaccgaaaatagctctgctcacccaggcttgaattccagagcccagtcatcaggttcctcgcctaggggaaagctgacaaatccgaagcaccctgatctggctttgcagctatgagcgcggtagtaggcattgacatagtttggtttagtactgtgatctgtgacagaggcatgagctcctcgagcactgctcctccgggcctaattctcaagcttccggcacgctgatagacatttgtagcttgccaagcggttgaagaggtaacagatggttggattgttgtcagagaataataacgcaaagcagctgttgcatgaggcggcggcggaacaccatgtaggccccccattttaatcatttgacccccagtgagttgttgtaaaagggtagggtagcttctgtacaggttctaatcttattggagatgacagtgtttcggatgaggcggccgcctgttgtccaatttgtaacatttataggaggaagtatacaggcgaaaaaggcagtgaataattgtgccttttgaaatgttcgaacggccgattggcgacatgttgctgttgttttgatttcttgtgccttttgggctcactctgtccactggatacgttggatgctggtgattggcatatatatgtaggtcatgctcttgagccttctactcgctgtgattcttcttcgcctcggaaattag

SEQ ID NO: 18683 - DNA, 1479 bp, Zea Mays
ttcccaactgcccactacctctcgttcccgtctccttcctctattcgtgttgtccgttcgctgccgccgtcgcctggttcgcatcgcatacagcgcctcagtccagatcgatcctccctcttcccagatcgggtctagttggacggcagcagccgccgccgcggcatctgtcatattcacgccgcgtgtgctctctctttctgtctccctctctatctgcgacgactgggtgtgataccgcagccgccgccctacgctgggttcccgagccttcgccgatctcttctccggcgaagagcgcccaccagatccgccgcgcatcgatgtctcctttggctcttctccaagctctcatcttcatcctgtgctgctcgcctctggcttctgcttcgtcgtcggagctaacccttgcaggagctgcttgtggagatgatcagcttgtcatcttcgatgcttctgatggcctccttaacctgtcggtcaatggggttctgatgcaagatcgcgtttttgcctgccagaagctcggcttctactttggcagtggatgcctccgctgcagcaacctttcagatgcgtggaggagtgccgtaaagcagtactgtggtgaagggagcgaaaagagccatgcaactttacatcaagatgtgccaaggaagctcttgaggtggtccacagaaaatagctcaaggaatgcatgtgaaaggtctgggttgaatgaaaataatcaggacattggtgattcttcagaaaagcaggagcatctcctggctgtgccaggtgtgattctcttatgctgtggccttatgttaccatgctttcatgctgaaaggaaagaagtcagcaggcatgacaatgcaaccattcagcgcaacgcacttgaatcagtttcatcctatgaaggaagcatgtcatctgagaaagtcccaccaactccacatcgaatacctccaagtccctctagatttgcgccgtctccacagatagctagagttggatctgtcaacttaagcatccagcagatcctcagggcaactcagaacttctcaccttcatttaagttaggtgaaggaggatttgggatggtctacagggctgtattgccagatggcaatgttgttgcggtcaagagagctaaaaaggatcagtttgcaggtcctagggatgagttcagcaatgaagtagacttgcttgctaagatagaccaccgaaatttggtgaggttactgggttttactgataaaggaaatgagcgcattatcatcactgagtatgttccaaatggtactcttagagaacatctagatggtcaacatggaagagtcctagattttaatcagcgtctagaaattgcaattgacgtggctcatgcacttacttatcttcatctgtatgcagaagctttaatctgtaaagcaagcaatgaaccaagaaaaaagtatatggcataaggctgtataagcttcggatatgaaaggg

SEQ ID NO: 18684 - DNA, 1760 bp, Zea Mays
attcagatatttcgggtactcagttaataataacctactctctgatgtctgatgtcgcaactcgcaactctagctcccagcctcccagtcttcccaggcggccggcggcgtcctaccagtccaagcctgaagcctcccaggccaatcctcccaggcggcgtcctcactcctctcccagtcccaggcggcaggcgcagccggccaggcggctgcaggcacacgcgcactggcgcaccgcggcaccgcgcactcgcgcaccagcaggcagcagccggccagtcccactgctccacaccgccccgaccaaccttcacacctagccggcccaaccccacgcacggacgttgaatcaggctagtcctcccagtctcccactcccaggcagcagggcggcaggcgcaggcgcgcagccaccagccggccaagcgctaccgcctttcccctctcctcctctcttttcccctcccttttccagcacggggagcgacctgcgctgccgccacgatgccgaagcactaccgccctgcgggtaagaagaaggaagggaatgcggcaaagtacatcacgaggaccaaggcggtcaactacctgcaagttagcctcgcaatctttaggtcaaagtggtctgcataaatcatcgagcaaagacagactgactaatggctcaaaggtggatgccctcaaagatcaggagtatgtccttacatatgaggataaggatgcagactggatgcttgtcggtgatcttccctgggagatcgagcttggcgcaagggcacccgacgctggtcctgctacagccggagatcggcctggacatcgacaagctccagatgttgccatcctttgaggcccagggcgcgtggctggtggaggcgtcgctggaggaccacgcaggcctcctcgccgccgtggcacaggccgacgtggtggtctcggccatgtccggggcgcacatccgcagccacaatcactccctgcagcataagctcctcaaggctatcaaggaggctgggaacatcaagggtttgtttggttagaaggggattgaagaaagcttcctttttaatccattttgttgattgagtcgcattcccgaatccatacttgaacatcaggatctcatatgcgaggtatcatctcgggacactggaaagactatggttgatgcttcattaggagagataatgaccacatgttagaagattacctagcaaaatgaagactggtacttaattattgttgtcacatgatgtttttactcgggagatctggaggttggcgaacgcccggggagaaactattcaaggaactattatttagtcaatttgtttcttttggagaaactttgcacagttgagggatataacttagtttttcaagcctgtccatctccagcagatggtttagttgggaaagaatcttatgctcaggtacaaattggtaggcaaattctaggcaaaggagttgggttaacatgggaagaggccaagctctagttatacatggttgttcagatgtgacagcaatgactaatgggacaaatgtcgagataggtccaaaaggccaagaaccaccatcaattagctctggcaatattagttttgttgttcgtgtattggctaagttattgcagatggcgcttgccttttgcttcagctgatcaagatctagaattcgaattgggccatgtgaagcatttcacatttcacgatctgcaaagtgcaacggacaattttaattccaagaatatattaggt

SEQ ID NO: 18685 - DNA, 1581 bp, Zea Mays
atacgcatggctacacaagagatgggtgggtcttgtgtccagtcggggtgggagttgggctcgtgcagtgcagtgcagtgcactgcaggtgcagtcttgctcgcctgtcttcctcggcaccgggacagcggacctccaccgcaactgggccatctgttctccttcctcctcttcctccgccaccgcgcttctgaggaggctagggcgatgcaaccgcttccgctttgttattagcaaagggtaataacagggcccgttatcatcatgcaaatccaaatccaattccctcccaacatctcttgcgttgattttgcaggaaccgtccgagaacgggcagccaattctccgatgccgtccgctatggccaaatccctcctcctccctcaccctttcttctccgtctcaccccgcccacaccctcatccgcgcgccggattccctgttctcaagccccgccgcgccgcgctgctcgcggccacgcccgcgccggacgccaacaccagctccaacaacaaccccctcgccgcgctctggcgccgcaccctgcagcccctcggcgactacggcttcggcaagcgcagcgtctgggagggcggcgtcggcctcttcatggtctccggggccgccctcctcgccctcgccctcgcatggctcaggggattccagctccgctcccgctttcgcaagtacaacaccgtcttcgagttcacgcaggcgtgcggcatctgcgtcggcacgcccgtccggatacgaggggtcaccgtcggatccgtcgtccgcgtcgactcctcccttaggagcatcgatgcaactgtcgaggttgaagatgataaaatcatcataccacgaaattcaatggtcgaggtgaatcagtccggtcttctaatggagacactcattgatatcacaccaaaggatccactgcctgcaccttcagtaggaccacttgacccagactgcaccaaagaaggcttgattctctgtgacaaagagaggatgaaaggacagcaaggtgtaagcttagatgcattggtgggaatatttacccgtctgggtagagacatggaggagattggtgttagcaaaagctataagttagctgaaaaagttgcatctataatggaagaagcacaacctcttcttacacggattgaggctttagctgaagaaatgcaacctttgctctctgaggttaatgatagtgatctgctgaaggatgtggagactatagctaaaggcctggccgacgcgtctggtgacctaagaaggctgaagtcgtccatgcttaccccagagaacacagatcttattaagcagtctattttcacccttatatttaccctaaagaacattgagagtatcagctccgacatctctggtttcacgggcgatgagacgacaaggcggaacatcaaacttctgatcaagtctctcagcaggctattgtgattggtgtgcataatgatggattgctttgcatgggacggggaatggggaaatggttgctggtggggggtctctcggtctcggtggcacagaggttaagcgaggcgaactttacgggacgtggttctgtacttg

SEQ ID NO: 18686 - DNA, 4867 bp, Zea Mays
accccaccatccttcccgagtcgtcctctccattttcccctcccgattcgccccgtcttcccaagccctacgccagcgacaaaaccctaaccggtgggatggcgacgcagccgccctctaccgccactgccgcggttgacctctatgagacggcctcgcagccggacgcccccgccgccggcgacgcctacacttttctcgagttcaacacgcagggggacgacttcgactaccccgacttcccggagctctctcaaccacctccccgatccacgccgctgacgtcctccatccccggcgccggcacgtcgtcctcgtcgtggcctgccccaccgcctccgccgtccgacgcggcctccccggaacccgatctcacgtctcaagacgtccacaccccgccggcctcctcctcctcgccgtcgccgcgttccgcctccaaggcgcgtccgtcggctgcggcggatgggctcgcctccggggttgtcgcacttaacttcgaggatcctgtaggaaccggcgccgtggaggacgggtacgactacagcaagggagacttcgtggaacacgcatgccggtactgcgggatccacaaccctgcgtgcgtggcgaggtgcaacgtaccctcctgccgcaagtggttctgtaactcgcgggggaacacttcaggctcccacattgtcaaccacctggttagggcaaagcataaggaagtatgccttcacaaggatagccctttaggagaaacaattctcgaatgctacaactgtggttgtcggaatgtatttcttcttgggtttatctcagcaaaggcggagaatgttgtcgttcttttatgcagagaaccatgtttaagtgttaatgcactgaaggatatgaattgggatctcagtcagtggtgccctcttatcgacgacaggtgttttttgtcgtggcttgtaaaggtaccttcagagcaggagcagctaagagctcgccaaattagtgctcaacaaatcaacaaagtggaagagctctggaagacaaatcctgatgcatctcttgaagatcttgaaaagcccggtgtagatgatgaacctcagccagttgttttgaagtatgaagatgcttaccagtaccaaaatgtttttgcaccactgataaagcttgaggctgattatgacaagatgatgaaagagtcacagagcaaggataatgtaactgtccggtgggatattgggttgaacaagaagcgtgtagcttactttgtctttccaaaggaagacaatgagttgaggcttgtgcctggagatgaactacgcctgagatatcctggtgatagctcacatcccacatggcaatctgtcggacatgtgattaagctcactgcacaagaggaggtggcacttgagcttcgcgctagtcagggggtgcctactgagctaaatgttggattcagtgtggattttgtttggaagagtaccagttttgataggatgcaaggagcgatgaaaacttttgctgtggacgagacaagtgtcagtggatacatataccatcaccttttgggacatgaagttgagcatcaaataatacgtaataccctaccaagacgctttggtgcacctggacttccagaactaaatgcttcccaggttttagcagttaaaagtgtcctgcagaagccagttagtttgattcaaggtccacctggcactggaaaaactgtcacatctgctgcaattgtgtatcacatggcaaaacaaggtcaaggacaggttcttgtatgtgccccaagtaatgttgctgttgatcagctggcagagaagataagctcaactggtctgaaggttgttagactgtgtgcaaaatctagagaagctgtttcgtctcctgttgagcatctcacacttcattatcaggttaggcaccttgatacttctgagaagagtgaattgcacaagctacaacaactgaaagatgaacaaggtgaattgtccagcagtgatgagaagaaatacaaggcactaaagcgtgccactgaaagagagatactgcagagtgccgatgtcatttgttgcacctgtgttggtgctggagatcctcgtctttcaaacttccgtttccgacaagttcttattgatgagtccacacaggctacagagccggaatgtcttattcctttagtgcttggtgtcaagcaggttgtccttgtcggtgatcattgtcaactgggtccagtcatcatgtgcaaaaaagcagcccgtgcagggttagcacaatctctctttgaacgccttgttatccttggagtgaagccattcaggctacaggtccagtatagaatgcatccttgcctctcggagttcccatccaactgcttctatgaaggcacactgcaaaatggagtgactgttaatgagaggcaatcgtctggaattgattttccttggcctgttccaaatcggcctatgttcttctatgtgcagatgggacaagaagagatcagtgctagtgggacatcctatctcaatagaactgaagctgcaaatgttgaaaaaattgtaacaacatttttaagaagtggtgttgtaccaagccagattggagttatcacaccttatgaaggacagagggcttacatcgtaaattacatggcaaggaatggctctcttcgccaacaactttacaaagaaatcgaggttgctagtgtagactcatttcagggtagagagaaagactacattattctatcttgtgttagaagcaatgagcaccagggaatcgggtttctcaatgatccgcgcaggttaaatgttgcgctaactcgtgcacgttatggcatagttattcttggtaatccaaaagtactaagcaagcagccactttggaatagcttgttgacacattacaaggagcatgagtgcttggtagaaggacctctgaacaacttaaagcagagtatggtgcaatttcagaagccaaaaaagatatataatgaccggagattgttcctgggcggtggtcaaggtgttatgcatggaactaactttggggctggggcctcaagccaagcagcagataagagaagtggcagagggaaagaaggacaatcgtttgctccttatggccctccaaatggggtgcataagcctggtgtgcacccggttggctatgctgtaccacgtatgccttttcctccatttcctggggctccacattctcaaccatacgcaattccaacccggggtttgcatgggccccttggagctgttccaccggtgcatcaacctggaagtagaaactttgggtcagctcgttcaaatactggtgggcctattggtggccaccttgctcatcaacagaactcccagcaagctatggggagcattgggtcaaattttaactacactggaatggagaatccaagtagtcagccttctggtggagcacaaatgtcccaaactggattaatgacccaggtgcctgtccaaggactaagtcaaacattccgtgatggtttttctattggtgggatgtcacaggacttctttgtagacgattttaagagccaagggtcacatgtgccatacaatattgctgaattttctacccaggcttctcaaggtggttatggtgttgagtttactcaagcgccccaatctggatactctgggaattatatgaaccaaaattcacatcctggatactcccatattggtacaacaaatgacattgtatctcaggatcacatggcccatggatctcatgggatgtttacacaagcgggatataatgatccctcacaagatgagtcgtctcagattcattatggaatggctgccgctggccctctacagtcgcagggcatgatgaaccccttgtactctcaatcctatgctcactacaacacccaaccacagtctcttcaacctccgccccagtgataatgaaagcttgtgataggatgaagccaaattttggaagtttggtgggttgcatcttttggcccacatgtgcacttctccgctgtttcagactcgatggtgcatagacatcagatgcaagcaatgaaggcacactatgtattggctatttatcggggcaggcttgactgaggggcacaaggattgcaacgtatcattgatcgttgtagttcactgcccactttggccacaggagaggtcatatcatcgagaggttgacggcactaccctcatccctcacctgtatagaaaggcaatcggggccaatagtggtacgatgtgaatattccaggatttgctgccattcagaaagtcaagttgcagcaactgcatgcctccatggtaccatgaagacacgcccgtagagtggctttgtatagaggtgctataggcgaggtggacaaccctttcggatatcgcacatggcaagatatttacattgacattttgtatgcacctgatatggttttgatatttatgccacaaatcatttaggtggtgatgcaagtagtttgttgtgattggaaatttgggagtgttcgtgaaagcaagtttgatcctgaaatcttatgggggaatggttgagtgggggttattttgttgtgaaacaggtgtctttgaaaagaaacctttccaggagtgatttcatcaagattgattgttagaatagacattagtaactgttataaatggttaacatggtcaccaaagcggtacgtctagttaacatggccacaaagacattaatcaactttgagacgaatgacaggacctaaaggggcatgttctttggcaaagtagaagtggtcgtctcgcagttttatagcaagacggccattgacttatggttccaccactcccaccccttcccatctttggtagattttctatcatatctcatattt

SEQ ID NO: 18687 - DNA, 2840 bp, Zea Mays
ccaccatcggccatcgcgccctccccaaatcgcctcgtccgcccaattatgctcctcaaaccgcacgcgcgcgcgcgactcaccgccgttgtcgtcgtcgtgttcgcggagatccgcggggctcgcccatccccctcctccctgctctcctccccagcacccacggcccgctgctgcccctccgcgcgccccctcgccaaaccctagcttggccatctccccccactgccccggcgccaccacctgccctgccctgcgcgtggccggcggcgccgaccgccgccattgtcttacggaggcgtccgagtcccgacgcgttggaatgcgctggaggcgaaccctagtaaacgaagagcaagtgtgttaaagtactttagggaacttccttcccaagacgatgatggtcaagttctccctattagtggtctctggaacacagcaatggctcacccaaatgatcccgagttcatcaacttgggcatatttgaatgcatggcatctcttatatggaaagggttgaaaaacaggcgttggcttgcacatgatcagaatatttacatcccatattatgcagctcacataattggatcatacacaatgaatatggaggagtttgcagagcgtgctgttcgtgctggtgtaatacctccattagttgaattattaagaggtaggttgacatgggtcgagcaaagagttgctgttagagctttgggtcatttggctacatatcctagtacatttcctgcagttgccgatcatggggaagtacttgaacttgccattcaacttgcttcgagctcgctagaaattgtgtactctcacttttaccagtttgtggatcgaagacttggctaccattgcgaccttcttactcgtggcatgggtggtgtggaaatggagtcccgcaaagctgaggaatgggcaagtcaactgcagtgctggtctttgcaactcattaactgctttgcatttaagcctgaattcctccatgatatttgcaagcctgattttctagtcaagttacctggaatgtggggtggacttgtaaatgagaactcacctgctggtgttggtttgctaagaacaatctgccagagcaaggttggccgaggtcatgttgctaacattcctgctactattgatgctttatgcaacattgctcgttcttcagatgactggcaatacatggcagttgattgtctgatctggttaatgcaggatgcaagtacttgtcataaggttaaagatatagttgcgccaacactgatagatttatcagatatttcggcactgggtgattataaaaagcttggtgacacaattgtcacagtcctccaagaatgtatgcaacagagtgggaactcacgtggtgcaattggtgttcagaccaaatcagaaattgatgagcttttgagatccaagcaaagtctgaaattggaaaagagtatgccaaaggaggatcttcatataaaacaagctgcggcattggttgtcaagttggaaggcaattcactgttctcctcagggaacatcgcaggagctgcagagaaatactctgaagcgcttgcgttatgtccgatgaaatccaagaaagagcgggtggttctctacagcaatcgagctcagtgttaccttctcttgcagcagccattggctgccataagcgatgctactcgagcattgtgccttcacagccccgtgaaccgtcatgccaagagtttgtggcgaagagctcaagcgtatgatatgcttggtcttgcaaaagagagcttgttggacgcaatccttttcataaacgagtgctctcagtcgaacgatcccgacttatccctgaagcaaaacaaagtccctgactatgccgagcggttggtgaagaagcagatgcgctccgcttggctattcagggaagcagctctgaagcacgggggcgtacactgtgaaggagatgctagcgacgcgtttggccaggatgctgacgactctgagtgggaaacggctagcgaaagcgacgccgagaatgatgacacgggagaagcggatgatggaactgaatggaagaacgatggacaccgggaagatatctgtgagaaaagctgaggagcagggcaagctgaacctattcagagggagtcaaactgagcagtgacagaagcagctgctgggccttatgaagtctgctgcgctatcagcctatcaagcatcagatctttctaatgcagcgatctggtaacatttctactgtcctcgtcaaagcaaagccccagttaaactaattccccacgtcttgttgtttggtcagttgagttattgcgcctgcgaccattcaatgtttccccttagatgttggttctggtttggtgtttgtagcatgctctttctttcaccagtttctcaactctttgaatgaacaaaactgtgcattatttgttcttttttttactattatttctgtagtctggcgaagaggccataatactggcacccttccctttccactggacttatctggaacgagaagagcacgtttccgtctacctgctttttttggctataccatgtcaactagcaagtaggggttgttaggttgggtcatgctcttacaatgaaactggcgtgctgggcacttgctctgctagtctgcttgcctgaagcttcttgagagcgttgctgggggcaaaaatgccgacagacgtgttagtgtgtgccagtgcgtgcgtgttacttcttgtgcttgcacagatgctttcagtaagcacatcaatgtttgtgtgtacaaatgtagcatgaatgagtaattggagcgtgaatgatttgtaccgcgactgtacctcctttgc

SEQ ID NO: 18688 - DNA, 2131 bp, Zea Mays
cagggctcctcctcccacgaggagaaaccaaccaaaaaccccgagcccattaaaaccgcgccaccccgcctcgcctcgcgagcgagtgccactgctgccacgaccccgacgcggctccggccatggcccgcctcctccgggccctcgctgccctcctcgtcctcctcctcgcggccgcctccgtcgccgtcgccgacgacggagaaacactgctggagatcaagaaatccttccgcgacggcggcaacgcgctgtacgattggtccggcgacggcgcgtcgccgggctactgctcgtggcgcggcgtgctatgcgacaacgtcaccttcgctgtcgcggcgctcaacctctctgggctcaatctcgagggtgaaatctcagcggccatcgggagtctgcaacgtcttgtctcaattcgaatggactctctggacagatccccgatgagattggtgattgttctttgctcgaaactttggatttgtcatctaacaatctagaaggagacataccattctccatgtccaagctgaagcaccttgagaacttgattttgaagaacaacaaactggtgggagtgatcccatcgacactctctcaacttccaaatttgaagatattggacttggctcaaaacaagttaagtggtgaaattccgaatctaatatattggaatgaggttcttcaatacttgggattgcgaagcaatagtttagaaggaagcctctctcccgatatgtgccagttaactggtctgtggtactttgatgtgaagaacaatagcttgacgggtgcaataccagaaaccatagggaactgtacgagctttcaggtcttagatttgtcaaacaatcatcttactggagaaatcccgttcaatattggtttcctgcaagtggctacgttatctttgcaagggaacaagttctctggtcctataccatcagtgattggccttatgcaggcgcttgcagtgctagatctgagtttcaatgagctatctggcccaataccctctatactgggcaacttgacatacactgagaaattatacctgcaaggcaataggttaactggattgataccgccagagcttggtaatatgtcgacactgcattacctggaactgaacgacaatctgttgactgggttcattcctcctgatcttggaaaacttacagaattgtttgaattgaaccttgcaaacaacaaccttataggacctatccctgagaatttaagttcatgtgcaaatctcattagtttcaatgcttatggcaataaattgaatggaaccattccacgttcatttcacaagcttgagagtctgacttatctgaatctgtcatcaaatcatctcagtggagcacttccaattgaggttgcaagaatgagaaatttggacactctggacttatcctgtaacatgatcactggttcaattccctcggctattgggaaactagagcatcttttgaggctgtaagtcttataacctatcatttcaatgcaaatgtttgaattatgtcatgatatgatatcactctaattcctgcagcaacttaagcaaaaataatgtggctggacacattcctgctgaatttgggaacttaaggagcatcatggagattgatttgtcttacaaccacctcagtggcctgattcctcaagaggttgggatgctacaaaatttgatactgttaaaattagaaagcaataatattactggagatgtctcttcacttatttactgcttgagtctcaatatcttaaatgtatcatacaaccatctttatggtactgtacctacagacaacaacttctcacgattttcacccgacagcttcttgggtaaccctggactttgtggctattggcttcactctgcttcatgcacacaattatccaatgcagagcaaatgaagagatcctctagcgcaaaggcctcaatgtttgcagctattggtgttggtgccgtattgcttgttattatgctcgttatcctagtagttatttgctggccacataactctccagtgctcaaagatgtctctgtaaacaaaccagtctgacactcccccgcagtctaatcgggagcatcgctaacggtcaggctggaccggaactcctg

SEQ ID NO: 18689 - DNA, 801 bp, Zea Mays
ttatcgatgactggtttgaacagtacagagagagtgtaatacaagcggagcaaatgatacttacaacacttgattttgaactcgaagtagcccacccatatgcttccctatcctctgctttgggcaaactaggactcacacatactgttctgtttaatgtggcttggaatctgatcaatgaagggctacgaagttcactttggcttcagttcaagccccatcatattgctgctggagctgcattccttgctgcaaagttcctccactatgacatcacattccatccaaatttctggcatgaattcaagacaagtccatatattgttcaagatgttgtccagcagttgaaggagctactttaggatacaacattcaatgtatttacataatactcagagatcctcttggtttatacgctgtagtgagtagtgatcactgccaaaagtacgtacacattagcatgtggtcactttcatcaattactgaacatctttcatgtaggtttttacaaccacagtgctatgtacaaaaggggaagatgttattcaaaagttgcccttttagttttggggaggtaaaagcaaacaatctttagaagagatgtgacgaacaacaagagataaaaaaggcaaaaaggtgtaagagatgtaaaaagttgatgaaatgttggatcccttaattggttgtccggttgtgattatctgatatatatagaggatggtttatcccaacaataaacgagtcgaaatcgtaaccttcacattatctttagtccaaaattgatttaaaaaccgatctaga

SEQ ID NO: 18690 - DNA, 1407 bp, Zea Mays
tttgaaaaaaagaggtttatgtcggcccgaaggtacatgtgagagcctgcacacgcctttcctgagcccatacctcaaggcgctgggcgcggatttcagcaacggcgtgaacttcgccatcggcggctcgacggcgacgccggggggctctccattctcgctggacgtgcagctccatcagtggctctacttcagggccaggtccatggagatgatcaacctaggacagaggcctcccatcgatcgcgaaggattccgaaaggccatctacaccatcgacatcgggcagaacgacgtgtctgcttacatgcacctgccctacgaccaagtgcttgccaagatccctggatttgttgctcagatcaagtacaccatcgagacgctgtactcgcacggggcccgcaagttctggatccacggcacgggcgcgctgggctgcctgccgcagaagctggccatcccgcgggacgccgacgacggcgaccagctggacgcccacggctgcctcaagacctacaacaacgccgccaagcgcttcaacgcgctgctcggcgacgcctgcgcccagctccggcgccggatggtggacgcggcgctcgtcttcgtcgacatgtacgccgtcaagtacgacctggtggccaaccacacgacgcacgggatcgagaaacctctcatggcgtgctgcggctacggcgggccgccgtacaactacaaccacttcaaggcgtgcatgtcggcggagatgcagctgtgcgacgtgggcacgcgcttcatcagctgggacggcgtgcacttcacggaggccgccaacgccatcgtcgccgccaaggtgctcaccggcgactactccacgcccagggtcaccatcgccaaactcgtcaactccacgctgcccaacgacgactagctggctggccgatcgatcgatcgatcgtcgtcgtcgtcattctgataaacatactgcaggctgcaggcttcatcgatccatatccaattgtccgtagaaatctacgactagctcattgtagatctgtaatgtgggctaagagatgcatgacgatcgactatagctgcccaactcgtcaagagctggttcaccgccctcgtcatgatcgagctagtttggacgagcaaattccatggcaccgagtgacacaattgatatcctcattgactaatactagtagtcgtactagcaaaaggaagagagggttggaacttggaacaactgagtggttctgtgggggtcgttagtgttagaatttatactgatcgattcctaagtccttagaaaaccaatccgtaactggaagtaaaatcttgatgacgagtagatctgatctactaagaggaataggaaaacatacctttgttgttattattgttggagagttgcagttgccgtct

SEQ ID NO: 18691 - DNA, 4220 bp, Zea Mays
gctagtacgtgacgggatctggcagcgcagggaacggagggacagacggcaagagcatgcaccacatcgacgtgaacatggagtgagcgagccaacggagaaatggcgatgggaatggaggtgcagctggtgggagcagttggcacgccgatgaccggacgaagcaagtgaggcaagggatggacgtcgcacttcaatacgtgcctggcggcaccgacattccgatgcagcggctacccccggagccactcgtcgtccatgaaaagggcgacgaactggcctggcaagatctggcggcgcggggatcgaatggacggacgacaagagcgagcgaagaagtcctggcggcttggtgagaaaatggtggcgctgggggcgatgggaacggaggtgcggatggtggcagcagtggagaatgaagcgacggcgacgtcgagactgattgtcgtcgtccgcggccatggggcggagcaccttccggagaagtcgagacttatacgattaaaaaagggaaccgcctcaccgattctgatgtcgaaggtaacctggtgccgatccgcaggggtgaagaagaaagccaacatgccacaggggaagagtaagaagaacgtggtgaaggagaaagccaaaaagattaagaagaacgcggaatcgaggtattcactaggatcagtaacaaagttaatccaactccttccacctgctgcccgttagaaaattgtagaccttgatttccaaaacttactcaatctgaagttaggaaacaccaatagagtttttacccactttctcatggatagagccaaagttcatgaaaatacagatcaaattgagatcaacattagagaaggtgtttcaatttggataacaaaggctgcagtgcaaaaatgttttgagtttccccctggtacagataagaagctgccaatagatccaactacaaaaacatttgattcactctacagagtattgagtgtttcagaaaaaaaaatcaatgtaaagaagaagaagatgaaggagaatatgaaggagaagcaggttgaggaggagaagattgagatgaacatggaggagaagaagcagaatctggttgaggatgaaggtagtcaacaggaggaaagtgaagaggaggacggtgaagatggggaaattggagaggaggaaggtgaagatggggcaattggagatgctaaagtggggggagatggagacaaggaaagtgctaaaaggggggggataaaggttgctgtcagaagaaatgttttgactcctttgaacatcaatttgatgttacagaacatcaacaacgatgagattctcaaacttcttgttaaaagaaatgaagacactgatggtacagaaccgaatcttgacattgacctgattgtcagatgtttctttgcggtgagcagtgttgctgagtttggcaaggataagaagaaactgatatcagggtgtacaactgtgctaatggttgttttcttggaccatctcgtggaaaaccctttggatcctttgaccatccctaggatcaacttgtatacttcagattttatcgcagacctgataatggtacccaaggatagccctggccctgaaaaaaagcgtcgtaagactcaagatgaaaaagaagactagtaatgttataaagaatctcgctactctcaattttaagaattcggaggatacatgctatcatgaagattcagaaatggtgccaagtccagggagagcatcgccggttgttgcttctgtacaatctcataagaactttgttgatcatgcagatttagaaattgtgccatctcatgagaactctgttgatctacatagtgtttacatggcacatgtattggaaagaagcagacaaagcatagtagtggacatattggactacaatatacctgaatctacttttgcagattgtttgctacctacaggtcatatgcacacagatgtattttatttacaatgccaactgttgtcaaaggattggaaggataaagtaattcttagctggaaagctactcaagaactgattcatcaagatattggagttaaggagctggacaaggaacttactgcagaggttatgaacaaagtggatctggtttgtgctttgttttatattacagtagagttttttcagattgacagtagagtttgtgctttttttagatatttattcctatcattcatgccggtcactggtcccttgttattctttccactgccaaacaagagacatatatccttgactcctacccaaggcacagtggggtggccaaggatgttttaactcaactgcagaagtatttggataataaacacaactttgacatgtctaactacactgaccatgtgccacctgttcagcatcaaaaaaacaattacgattgtggctttcatgttttattgtatattgaagaattcatgaaggagaagatgtataaaatcaacaaaaaaatggtgttgaaattcagaaagcagctttgcatgaatctcttgtaccatcctttgaacagaataaatcttgtggaattcagaaagaagctgggtattacattgaaaagaaaacttcctggtatacttgatcttactattgaaggtgagaggagtgaatctgaggctgcagtgataattgaaatagagaacagagatgataagactctagaggatgaacatatttcagttgagaaagagaagttgcgaaaacacaagtttacgtctgataagatcaacgatgagatctgcaaacatatcttgaactacaatgaacgggagttgttaagtgtggggcagactaccatgactgggggtcagctggaaaagtacgtaaatgaaggtgacaatggtgataaaatactcagagcattcatcacatgcttcacttgtgatgaaaagttcaatcaagggaacatcacaaccgtcatcccgccacatgaagtatccgaagagggtgaactctccaaagttgatgctgcacaacttgtagaagaaatcaaagctgtactcaaaggcaccaatgttgcacgtgtacgcaaagacaccgaatccaccaaagatcccaaagtgaaagtctttcgaaacatgaggaggacatttatattttttcctttctacaagaatgaagaattgtttgtatttcatgtcgatacgaaaagactacccatcattgatgctctgttttgcaagatgtcatcattgtcgtttgaagatagatcctgactaggaaagtctatcatgggctgtctactcaaagccatgaaggattccggcttcatggtgaaaaaatatggtgattgtaggttcacagttactgtaactgaactcgaattcaaagatagtgcctcagcgctcataagttttattgagaacttcacttctaagttggacgacaatgccaagaaactgaaaaagggtgacaaggactggctggaaccttacaagaagtcgacagtggcataccttgtttgtcacactgaaaataaggtggtgttgcctgacgatattgtgaagtacaagcaaaacaagtgaggtggttgagtcgttaatgggtccagtggctgtgttttaagacttgtatcacactacttgtatggctttattctctgaagctgttccattgttgccgttagtaacaggtgttgcttttgtctctgctcagtgggtgattcatttcatccagagttgctgcaactttaatcagtctatagtgttgggttcctagctcagtgttgagttctaaatgatcgtgttgtgttcctaccaagtgttgagctgcacgacggcgtgcgcagccgcagccgcaccggcgaggagcgtttagaactctgttgatctacatagtgtttacaccggctcaacagagttctcatgttgatttttgaaggacccacgtgttgggttcctgctcagtgttgagttctgaacgatagtgttatgttccatgggcccttgttgatttcgagaggacccacgggccgaacggcgtgtcactttcatgcgtctatagtgttgggttcctgtctagtgttgagttctcaactatggtgttgtgttcctccaagaagttgagtttcaggggcctattatattgtctcagttaatgggtaactcagttaatcctatatattgtgtcagttaatgggaactcagttaatggtatatgttgtctcagttaatgggtaactcagttaatccagcatatcattgatgag

SEQ ID NO: 18692 - DNA, 1858 bp, Zea Mays
tatattgttgtgtaataagtgaggtttctgccgatgaatttataaccttgtgaagctttgtttcagcattgaactgtggatacactatattagaatctatactattggagttctcgtgcatctttgtgcattgggtgatcctctcggtgggtgctgcattacaccaaatggatatgcactgctactaacaaagttgttaggatttgctcaaggaaggatagtgatggcccttgaaggaggttataaccttaggtccatagcgaactcagtttgtgcttgtgcaaaagttctcttgggagacaaattcacattcaacactccagagatgcaaccatttgaatctacatggagagtaatacaagcggtacgcaatgaattgaagacatgctggcctgttctgagtagcaagttgccagaaaatgtatcattgaggattaagcctgcaccaagcgagctctacgcttctgattctgaatctgatagtgaagatgttgatgagctccttggcactgttgcatctgtcagtgttattgaagctactggtgttgctataagtgaacacctctcaaagatgaaacttgatgatgacagccttgcagtgaagactaactcaagttgctcagcagcagaacagcatccagttgattcagtaaaagtacataacaatgcatctgttgtgctgaccaaaaaaatatctgatttatctcttgagtggcgatcagatttatcgaaaactgatgtctggtatgccagttttggatcaaacatgtggagaccaagatttctatgttatattcaaggagggaaggctgagggtatgaatataccatgctgcggatcacgtgacacaagctcaccaaaaggaaccgtgtggaagactgtacctcacaggttgcttttcggtagatcgtctaccccttgttggggaactggtggtgtggcttttctcaaccctgagataaactacaatgagaagtcgtatgtctgcatgtacaaaataacgttggagcagttcaatgacatcttgtttcaggagaatcgtttagtgctggaggatggcaaagacggaaacactgtgtatcctgactctcctttgattggttcatctgaaatcaagtttatatctacaaacagagctgttcatcttgaacctattaaggatagctggtactccaatgtactttatcttgggaatgaggatgaagttccaattctaactatgacgtgccccgcatcagatattgagaggtataaatctggtgagctgcgtttagcacctccatcagagacgtatgcggccactctgataaagggactagtggaaggcaagcaaatggatgcggacggagctgccagctacatcaacgctgctgctgcaagagccttgtgaaggcggcttcagcgtgtgcttttgtacagccagtaaggagtagcaaggatacactatctgttagcgtggcgacaccaggaaaccttcattgtccgcaaatggagaacttggatccaatttgaattgggaagcatgattcgagcttgccctagcttgattactggtgaacggtgatctcccctggctggttgattctgggagaaacactagctgtgtcggggtggagcaacactagttggcggttgcaacaggtgctctcactgcactggtatcgtgcttgtctgacataccgtagtatttgcatggcatgctggtgatggtatttgtgcaattactgcattatgttctgttgcctggagttattgttgtttggccgccaccgctgctgctgctgggcagcgtaatatccactcgtcgaagcggattggcactccgccttcttggccggccgcgcctggtgcccaagcg

SEQ ID NO: 18693 - DNA, 1329 bp, Zea Mays
atgaaacacctttcaaacaatcctgatgatttgaactcaatgtctttgaagcctgaactttttgaaggattgagcgtttttatgggctccttagaagttccagcccaggggtctgaaactattaaagttccaactgctcattatgaatttggtgccaattttttagatccaaagttaatgctcattggaagggtgatgacagatggaaggcttaatgctcgcgtgaaatgtgatttgacagacaatctgatgctgaaagtaaatgcacagcttacccaagaggcacattactcacaaggaatgtttaactttgactacaagggaagtgactatcgagcacaattccaaatagggaacaatgcattctatggtgcaaattatattcagagtgttactccgaacctatcaatgggaactgaaatgttctggcttggtcaccaaaggaagtctggaattggttttgcctgtcgctataacacggacaaaatggtgggcactctacaggtcgcaagcactggaatagttgccttaagttatgtccagaagatttctgagaaggtttcccttgcgtctgatttcatgtataaccatatgtcaagagacgtaacttccagctttggttacgattacttgcttaggcagtgccgtctaagaggcaaaattgactcgaatggtgttgttgcggcatatctggaggagaggttgaacatgggtgtcaactttcttctatctgctgagattgaccattgtaagaagaactacaagtttggtttcggaatgaccgtaggagagtaattctgctaaaacaattgctgagaagagcacatgaggactttcgcagtctgctttgcattgtatgttaagatacttcaggtctcagttttgattgatcaggttctgccccgtcgaaaaaaatactagctgttgctgctttacagggttttgtctcagtgtattggtggttgtttattttcagctacttgagcatgggggccatgattctttgttcatcttggatgtaactagctgattggtgttccaatgatgttgtatttgcagaacgattttttccttttaaatcaccaacaaccaccacactaggctttttctgtaccatcatggacgggccacaagattttacagttcaaagctttggcacttgccatatttgatgtcgtcttgtgcttttgctcatccatgtaagtcagaaatctcagttcatatcagtgcttttgctcatccatgtaagtcagaaatctctgttcatatcagtttttttattaaaaaaagtttccgctgcataaaaagagaatgtggaatcattgtacc

SEQ ID NO: 18694 - DNA, 1245 bp, Zea Mays
acctttttttgactgtgccatgtagaagttgcggtatttcaaggttctgaggcggctgaagaaggtacgtcctggagtacagcaggtcagtaagcgtccagaagaatctggtaatggttcagttcgctctacccatatgagcccgagctcaaatcatgcctcttcggatgatgaaatagacatggctcccctattcttgaggataaagcggcggcagttggaaaaccaagatgttacaagtcgtggcgcgagatcacagtcatacccatcttccagtggttctcgagaagagtttgtggaaagaagtagagatgctgcagcagagctccgtccaaaacgagtgaaaatccggctaccttctagtgccagtaggcagattgagcagcagcgcagttcggggcagcgatttgcaagggaggacaagttgccgcttgcattttagggaatcacaggtactaacctctactgggcagacgaattctttgtttaagtgcattgttaactacaaaacgaggtggcagaagagagtgggagggatcaggttgtgattgtggcagagctgatttggttagcacaggtgcagactgactttagaattggcagcaaagggaagtggctggctaatcgattcttttgtgcagcagggcctccaatttgaggcctctgggggcacgcttaggagacacacacgtgacaatattctcgttgctcgaggttctgtgtcactgccggtggctctttgatgcctggttatcagtgacagaaattgaggagaacctcgctacttcgatttctctgcaagtgtttagagcatgtagctagcttagctgtatatctctcactgtacctacggtctttcctattttttttgtaatttcctgtaaacaggcatagctgctacagtatggctaactctctattcttttgttggtttagcctggcgctgcttagcattttcaattaaatcgagattcgtttccttttcggatggttggtatatgttctggtgttgctgctctcaattgtgtggaatgttctgttatgttggcatggttagagatgacaatggggaccttatccccaaatccctgcggggaattcttccattagggttagtttgggagataaaattctagaggagattggaggggctaaattctttttaatcaaaattgaataagaaggagatttttagcccattcaatcccctcctattgaggtcttctggctatcggaggcgatgga

SEQ ID NO: 18695 - DNA, 2206 bp, Zea Mays
accgtactctccacgaaccgaactccctcccaatgacgtgtggagccacgggcggcgcctaagtgggacccacctgtctgctttccctaactaccttctcacggggtaaaattggaagcgattaaaaaaagtcaccgccgccgcccgtacgcagaagcaaagcaactgcttaaattgaaaaagaaaggaaggaaaaaaaacagagagctcaccaattcaactgaacagcaagcgcacctaccctacctgcaagcgcaccgcccgccgtcgaaggcgaagacctagttcccggtccgtcgcgatggctgccgtggcccgccgcggccccggggcgcgcctcctcgcggcgctcctcctgctggcgctggtcgtctccgggcactgcctggacgcgcaccaccgcgggctgaagcgccggcggcggaagcacgagatccattccccggtcaagacggtggtggtggtggtgatggagaaccgcagcttcgaccacatcctcggctggctccgccgcacccgccccgacatcgacggcctcacgggccgcgagtcgaaccgcctcaacgcctccgaccccgcatccccggagatcttcgtcaccgacgaggccggctacgtagactccgaccccggccacggcttcgaggacatccgggagcagatcttcggctccgccgacacctccgcggtgccgcccccaatgtccggattcgcccagaacgcgcgcggcatgggcctcggcatgccgcagaacgtcatgagcggcttcaagcccgacgccgtccccatctacgcctccctcgccgacgacttcgccgtgttcgaccgctgaagaccatctttgacagcctcgaggagaatggcctgtcttttggcatctactaccagaacatcccggccacgctcttctaccagagcctccgccgcctaaagcacctcattaagttccaccagtacagcctcaagttcaagttgcacgccaagttggggaagctgccaaattatgtggtgattgaacaaaggtactttgattgcgagatgttcccagcaaacgatgatcatccctcgcatgatgtggcaaggggacagaggttcgtcaaagaggtgtatgaaacactgagagccagtccgcagtggaacgagacggccctgattatcacatatgatgagcatggtggattctatgaccatgtacctacgccggtcgttggagtgccccagcctgatggaatagttgggcctgatccatactacttcaagttcgaacggcttggggtgcgtgttcccacctttctcatctcaccttggatagagaagggcactgtgatccatgaaccaaatggtccacaggatacctcgcaatatgagcattcgtccatccctgcaacagtaaagaagctattcaatttacattctaactttctgacaaagagagatgcatgggctgggacctttgagagctacttcaaaatccggaaaacaccaagaactgactgtccagagaagctcccagaggtgacgaagtcattgcgaccatttggtcccaaggaagattcgtctctctcggaatttcaagtggagttgattcaacttgcttcacagctcaacggtgatcacgtactgaacacgtacccagatattggcaggaccatgactgtcggggaagcaaaccgctacgcagaggatgctgtcgccaggttcctggaagctggtcggattgctttgagagctggtgcaaatgaatctgctttggtgacgatgaggcctgctctcaccagcagggcctcaatgtcctctggtttatcatcagagctctagtagattgctccggtctacccataaactacacattggcattcgctctgattcagctgtggctgaatcagagctcttgtgtaacgtggtaagagagcctaccacttggcggtgtagtgcaaatatgatactatagcatcatgtaacagacagcatggttttgtaaatagacgtcatgatattggacatctggattctgatacagtatatgtcgaagtcccctcctggatagtgtgtagtggggatttctaaagcattgtggaattgtacctattctgtattcagtctgtattttactgtactgtacctgcttgtcaagcagctgaactgcactttggagtgatgtatcatatgctacttaaacaaatatgtttatgtgccttaaaatctc

SEQ ID NO: 18696 - DNA, 554 bp, Zea Mays
ctcgcagccttgcgtacatgcccccaaaccattctatctagctcattcttggactttcctgcggtaaaacgctgaggacgaagacggcgaagctgaggatgacgagcttgacgcagacgcagaagacaaggagaacatcgaaagcaaggcaggatcttccctgccaaataagaggaaaaggaataacgaggatgatgccaatggatacaagtaaaacggtgagggaaagtagtattttcctgaacttcggaaacgttcctgtgcactgattattatttgtatgcttttcgagtcttttttttcccgcacttgtaatagactagagcatagttttttttaggcggttccacttctgaagtatcgtttggattctggaagttgtctgactctgaaaccatgagtaggatgtgtccccagcacgtatatacgctttgtttggtgtgctttgtttggtgtgacttcctgatgctactaatcgagatcccagtttatattatgctgatgtaaacatggaatttgtgaaacaaattcaagggtaggaaaatttcaatgaa

SEQ ID NO: 18697 - DNA, 2503 bp, Zea Mays
gcgtaaacgtattaaaatcttgaaaacaccaaagcaccgaacccccgagaggaagacacaacagcgcctcaccagccagccaccaccgcgctccatttcctttctctctctctctcggctcctccgctctcttgcccgagtcgctagcttccctgccccgcctcctcccgtccccgtggacagacagctccccccacctccgcttccatagcatccgagctaaggtcaactcctccgtcggcggagcgagagcggggaagagacgggagggtcccggatccgagccgagctgcgctccccgcgcgaccgacacccaggtctcgtcgtcccatgcagatctgctcctcctcctgagatctaaaccgaagcttgagctccggttgttggtggttggtcggcggcggcaggggaggctgcgaagatgtcgtcgagcacgatccgcaaggccctgggcgcggtgaaggaccagaccagcatcggcctcgccaaggtcaccagcaacatcgcgcccgagctggacgtgctcatcgtcaaggccacgagccacgacgacgagccggccgaggagcgccacatccgcgagatcctccacctcacatccggatcccgcgcccacgtcgctgctgccgtggcaggctgctcccgcaggctctcccgcacccgcgactacgtggtcgcgctcaagtcgctcatgctcgtgcaccgcctcctggccgatggcgacccgtccttccaccgcgagctcctccacgccacacgccggggcacccgcctgctcaacctctccgattttcgggacgaggcgcactctggatcctgggatcactctgcctttgtgcgcacctacgcgctctaccttgaccagcgcctcgagttcttcctccatgagcgcaagcaggggtcaaatgctggcagcagcagcagcaccaatggtccatcaccgcgggaccgtgaccgctggggttcacctgatccctatggccgccgctctccctcctactcgtcaccccctggggtatggcggatatgatgattaccgcgagagaaatggtggaaacaatgatgacaagagaccgcccaccccagtgagagatatgaagccagagcaggtccttgctcgtatgcaccacctacagcagctgcttgacaggttccttgcttgccgtcccaccggtggggcgaagcacagcaggatggtgctggttgcgctgtatcagattgtgagggagagcttccagctctacgccgatatctgcgaggtgctggcggtgctgctggacaggttctttgacatggagtatgctgaatgcgtgaaggcttttgaggcttatgctagtgctgcaaagcagatcgatgagctctgtgcattctatgcatggtgtaaagataccggagttgcaaggtcatctgagtacccagaggtgcagcgggtcaccgataagttgctggagacgctggaagaatttatgagggaccgggcaaagaggcccaagagcccatcaccggagcctgaacctgagcctgtcaaggaagaacctgagccagatatgaacagcatcaaggcgcttccagcaccagaagattataaggagcctgaacctgagaaggtggaggaagaggtgaagccagagccacccctgcagccacagggtgacttggtggatctcagagaagatactgttagtgcagatgagcaaggtaacaggcttgctctagctctcttccaggggccaccagctgctggtggaagcaacggttcatgggaggctttcccttcaaatggtggcaacgaggtgacttcggcctggcagaaccctgcagctgaacctgggaaggctgattgggagcttgcccttgtagagacagcaagcaacttgtccaatcagaagccagcaatgtcaggtggcatggacccgctgctgctgaatggtatgtatgaccagggtgttgtgcgccagcatgtcggtgcacaggtgaccaccgggagtgccagcagtgtcgcgctgcctgctcctggacagaagactcagatgcttgctctgcccgcaccggatggttcgatgcagactgttggtggtgatcccttcgcggcgtcccttgccgtgccaccgccgtcctatgtgcagatggcagatttggagaagaagcaacagctcttgacgcaggagcaaattatgtggcagcagtaccagagagacggcatgcaagggcaatcgagcctgaacaggctcgaccgcgcccccaacccggccatgccctacgggatgcccatggcatacaacacgaaccccatgccaatggcttacaccgggaacactgggtattactaccctacttactgaggaggcctgttctttaatcatccttacagttgctgtgaatttttgttctgtgttgtgatcttccccgccctgcggttgtgtccagcatcagctgttgttcccctgtccctggatcaaaccttttggtctgatatatgtaatgtaattttctttaaaaaaaa

SEQ ID NO: 18698 - DNA, 1814 bp, Zea Mays
aggctctaggttctttgaacattttaagttgttcactccaagtgtgaaaccaggtccctatttggacctgaagtgaagcattttaaagttgaaggacccagattctcacttcgagagtttatgaacctagatgagaatctaaggctctggaagttatggaacttgaccagaaaatagatctagttcatgagcttgatggtcatattatgcgatgtgtccgtgatcaaaatggaaatcacgttatacagaagtgcattgagtgtgtccccacagaacatattggttttgtagtgtctgcttttcagggacaagttactagcctttcaatgcatccatatggctgccgtgtaattcagagaatcttggagcactgcggtggtaactcacaaggccagtgcataatagacgagatattacagtgggtgtgcatccttgcgcaggatcagtatggcaactatgttacacagcatgttctagaaagaggaaaagctcatgagaggagccaaattattactaaattggccgggcaggttgttaccatgagccaaaataaatatgcatcaaatgtgatagagaagtgttttcaacatggtgatattgcggagcgggatcttctgatcagacggattgtggagcagacagagggcaacaacaatttattggtctgtttggtagtgtagtaaaagtgttccctccattatcccttcctctctttgccaaacgggtcggggttctggaaggtagggctaggacatggggacctgatctcagttcggtacagccaatcagataacaccatgagtatctcagttctgctattccagctttctgggagctgcgaatcctatggattaccaagacatgggatctctgtaaacttatttcttcctgtgttgatgttagtttatatttcctaatcaccttttatattcaatcaggcaatgatgaaggaccagtatgctaattacgtggtccagaagatacttgaaacttgcaacgaggatcagcgggagcttctgctcagccgcgtaaaggatcatatgcaagcattgaggaagtacacatacggcaagcacatcgtaagccgagtcgagcagctctgtggcgacgttgtcaccctttcaggaactgccgagtcaggttcttgaaacgaaccgccgcctaattcttcataggctggagggtgtcctgctcttttgctcattccgtcagtgacgaagaaagcaaaacggatcaagtctaactctggcgcttcagaacagactaacaaagctgtcgtcgaagattgtataggtgtgactctgttcagggatagtcttcaggttctagaacagaagggtagtggtgtgcatcagtgtatctgtttactggataatagtggttggttaggtgtgtgcagaaaaagtttagtgctatgctttgtatgtgatacatattaactatgccttggaatgttcatatgttgtcctgattacgtgtgatatctctcgttcagttcaagttgcgttttctacatggccatgggaccatctgccgatttgatgaaaaaggaaaggttgtgcacctttgtaagcgggcatggagatgagctgcgctattttttttttttacaaaatgtctgctgggattgaactgtctattttataaaaatatcatattttcttttaatgtcaacagaaaaattacggactgtgtatggatcccatgtagctaaggccagtgagtgttacgatgctttgtcagttgatgttatgtcagtcttttcattgttaattctgaaagtagattttatgccgatgaacctttataaaaag

SEQ ID NO: 18699 - DNA, 2583 bp, Zea Mays
  misc_feature (1)..(2): n is a, c, g, or t
nngatctattttacctgaacttttgaatactggggatgctttggagagataccaacaggttgcccaaaagctggaagccttgattgctaatgatggcaaagatgtggaaattcagtctgttattatggaagttcctgatatcttgcgtaggtgtgttagccgtgatgaggctgcattagcagtagcacaaaaggttttcaagagtttgtacgataacacatcaaataccacttatgtctcctggcttctagcaaccttagttgcaatacgagatgtctgcaagcttgttgtcaaagagttaacaagttgggtaatatattcagatgaagagaagaagtttaacattgatatcatttttggccttattcgttcggagttgctgaatattggggagtacaatgttcatttggcaaagttaattgatgggggaagaaataaggttgcaacggagtttgcaatgtcccttgtccaagcattgtttgctcatgatcctgttggcttcacagagtttcagaatgttcttgatgcactatcgaagcatacaaagagaccaggttcacctgaatcgttgcaacaattgattgaaatcgcaaggaataatgtgagcaccactactggttttgttgctgtgaaggatgaaaaggtcaaactgccgaaggataaaaaggttttagctacccgggcaaacaaggaggaaaacactgctaatgaaattacactagttgatccaaatcaggtggcagtcctgttttctgaatggtgtcagatgtgtaatcatgtaagtgctagtgatgcggcatacactcgttttgtcacacagttgcagcaagatggtctgctgaagggggatgatatctctgaacgcttcttccgtattctcacggaacttgctgttacacactctctagtctccgagcagatcgttgctcctggtggatcatctcagcaatcaccacagcaacctcacatttcatatttctccattgattcatatgcaaagcttgtggttatggttctcaagtactcagtggagataacaccaaataaagccagtatactttccaagatcctatctgttacagtgaggtccattcagaaagatgctgaggaaaagaaagcttcatttaatcctcgaccatacttccgattgtttataaattggctctatgatcttactactaccgatggtcaccatgatagttctaattttcaggttttgactgcatttgcaaatgcattccacatgctacaacccttgagagttcctgcctggagctttgcttggcttgagctgaaaggttggccattttttcagcgactgcttgttgctcttctcaagttcatggaaccatatctgagaaatgctgaactcccagaggcgatggaccttttatacaagggaactatgcgagttctgcttgtactactgcatgactttcctgaatttctttgtgattatcacttcagtttctgcgatgtgattccttcaagttgcattcaaatgcgcaatgtcattcttagtgcttttccacgtaacatgagactgccagacccttctacccctaatctaaagattgatttgttggctgaaatttcaatagcaccacgaatcatgtcggatgttgatggtgcccttaaatcaaagcagttgaagactgaggttgatgaatatctcaagaggccggaaggctcttcctttttaagtgacctgaaccaaaaattgctgctgcctcagaatgaagcaagtgttgctgggacacgctacaacgtgcctctgatcaattcacttgttttttatgttggcatccaagctgtgcaacaactgcaactgaacaaggctaatccgtctgcatcagtacagcagattaaccatatatctccgatggacattttccagattggaacagctaccgatatattcaggagtcttataacaagtttggatacagagggccgctaccttctgttgaatgcaatcgctaaccaactgcgctatccaaatagccatacacactactactccttcatcactctgtatctattttccgaggctacccaggaaattacccaggagcaaatcacaagggttcttctggagcgtctcatagtgaaccgcccccatccttgggggttacttattactttcattgaattgataaagaatccgcgttacaacttttggagccggtcttttacacactgtgcacctgagatagagaaactgttcgagtcggtggcaaggtcatgtggcgcaaaagttgtggacgaaggaatcagcgtgcaggatggcagccactaaagccatctgctttgttcaagtgttgtttttgtgctatttcttctctggcactggaaattttctgtgcttgtacagatcgtctgtatagtaaagctgttagtcacacgtgtcggtgcactgccaaaccttagcaggtgcctgggagaatgcttttgtttgtatgaattttagtcagcaatatggatggtttgcaatatcgctcgctgctacttcgcgccagtacaacagatccaggtttcattgaagaaaatgcctcatccataactgtaacctaactctctctc

SEQ ID NO: 18700 - DNA, 1865 bp, Zea Mays
tcaatatctaatcatattttatattattatatagctaatactaatcaaatatcggataaaaatatgaaaacaaattatcgtatccgattcttttgcttcactacaagcagctcagcctcagctgtcaagcgagcccccgtcccgctcccttcctgctacctgctggccgctgccctttccttcccggaatggtatcgtgcgacctgtagtcgtcgccagccacctcgctccctcctagacgacacccagctagtgctcccttccacacccaggaaccagccacctaaccccgcccgccatgccgggcctcgccgcctccgacaactcgcccccggcgccggcgccgccgccgcgccggctctcgtcgccgctaccccgtcgcgcgccgtcgtccccgtcgccgtccgcctcctcgcgcgccaagcctcggaagccctcgccctctcccgcggccttccccaccgacgccgacgactcgctcgtcctggacgccaagggtgactacgacggcgcccttgagcacctcgtgcttgcctccatgaccatggttgccaatggccgtgacattgaggttgccaccattgacgtcgccataggcaacacgtacctcgccctcgcccgcttcgacgaggccgtcttctcctaccagaaggcactgactgttctcaaatcggcccgtggcgacgaccatccgacggttgcgtcggtctacgtccgccttgctgacctttaccaccggacaggcaggctccgtgagtctaaatcctactgcgagaacgccctgcgtgtctatgccaagcccgcgccaggtgctgcccctgatgagatcgctggaggcttaatggagattgctgccatctatgaggcgcttggcgatctcgatgaggccctgaagcttcttcagagggcactcaggttgctcgagggctcaccggggcagtggagcactgttgccggtattgaggcacagatgggtgttctgtactacatggttgggaggtatgcagattcgaggaactcgttcgagagtgcggttgcaaagttgagggccattggtgagaggaagtcggcatttttcggcgttctgttgaaccagatggggctagcttgcgtgcagctgttcaagatagacgaggctgcacagttgtttgaagaggcaagggcggttctggagcaggagtgtggcgcttctcatcctgatactcttggtgtgtacagcaaccttgctgcaatctatgatgctatgggaagagtggaggatgcaatcgagatcctggagcatgtgctgaaggtgagggaagagaagcttggcacggcgaacccagacgtggatgacgagaagaagcggctggcggagctcctgaaagaggcggggcggtctcggaaccggaagcagaagtcgctgcagaacctgttcgggaccaactcgcagcgggcgaagaaggaagccgggaggaggtggtccaactttgggttcagaagctgaggaagctgcactgttggtcgtcgtcgtcgtcgggcggttgtggcctttgtaacataaaggagggatgggaaaggaaaaaaaagcacgtgtaaagatgttgctgtaggttattattattaggaatgtgatggtggtgttggtttgctgtttgtgtatgtgtggcactgcattactgtgttacttgtcttgggttatattttcagtagcgattattgttaactgggtgctgttataccttgagaagagaacattggttttgtcgtggaggaatggtgttgactggtgggtgatgagaattacatgtgattgtttgttagtacattgcttccttccattgatcgagttgatgaggatccctgtgtgaccctgtcagggtttg

SEQ ID NO: 18701 - DNA, 856 bp, Zea Mays
tgcaggagcatgatataacaacacttggtttgttacttggtttggcagcatctcataggggaacaatggatcctgcaatatcaaagatgctctactttcatgttccttctcgacatccatcttctactccagagctggagttaccaactcttctacagtcagcagcagtaatgggaattggacttctatatgaaggctcagctcatgcactcaccatgaagatacttcttggtgagattggccgaagaagtggtggtgacaacgtgctagaaagggaagggtatgctgttgctgcaggttctgcattaggatttgttgccttgggtcatggcaatcgtgcatttggattcatggatactttcctagatcgactttttgaatatattggcaccaaagaagtctaccatgaaaagtacctaaatgcaacatctgccgatgatcaaagttgcaaccctggacagatgatggatggagcacaaataaatgttgatgttactgcacctggagcaatacttgctctagccttgatatttttgaaggccgagtctgaggagattgcagctagactcaatatccccaacacttacttcgatttgcagtatgtgaggcctgattttgttatgcttcgcattatagccaggaatttaatattgtggagcagaatacaacctaccaaaggatgggttgattctcaaattcctgaaacagtcaggtgtggtatttccaacatgagtgaagggactattgacagtgatgaattggatgctgaagctctttttcaagcttatgttaacatagtgactggcgcatgtattgcacttgtcacatccacgttctggttgaggtctcatgtttc

SEQ ID NO: 18702 - DNA, 613 bp, Zea Mays
gttcatccacactgttcaggaaatattgtatcatttaattcaaggaagtaatggtggtggttcatctagaactcattcgattccaagttctagctatggccatgatcggacatcaaatgcacaaaaattgtcaggagatgtaaactgtgagtgtgagttgcaactagcagttgatgaagctttagctagagagttgcatgaaatggagagcaaactagccaacacttcacttaatgacaataatggaagaaagacaacatcatcttcagcatttgatagaggcaataattctgcaagtagacctcctcaggtattggaggaggatgtgattgatccagataatatgacgtatgaggaactgcaacagctaggggaagccattggtacccaaagcaaagggctgcctgaaagtgtcatagcactcttgccaacttcaacttacaaaactgggatattctccagaaaggaaaaacatgatgaatgtgtgatctgttgtatggcatacaagaaccgagataggctgactaaattgccatgtggacatcactaccatcaagcttgtgttgctaaatggttacagatcaataagcctttagtggcatgcatgacgctg

SEQ ID NO: 18703 - DNA, 1400 bp, Zea Mays
gcttgggactaaagggctggtcactgtctattcatggtactgaaaggggggagacttctgccatgctactttcaccaagttcccgatcttccgctgcgggattcagtggcgattctactcggcacagtggtagccaatttactatgttcctcacatctccattgcaagctttctgccttctgcttggcaacaatgggacagatattgacagggtactcatgtttttaatgaatttcttcagacattagagtatatttaaagccttgacatgagttttgtaggatgcatataacaaagctgaggagttattattattgtccctaaatgaatgggctgcgactttagttgcatcatcttcacttcattctatttgggttgaagttttaggcgacccgctcctaagaaggttacttctcaggttcatcttctgccgagcaactcattccctgttcaaaccaacaaaccataagacagagttccttccgacctgcatgcctcctttgcctgagtctgttgatgcagagagcatgctctcccaaagctgtgtgctgcgagtcgcatcattctttggcgctgccagtcagttctcatttgctgaggttaccacatggcctgatgttgactctgaggaggctgttgtcaccagttcatctggcagtgccaacaaaggtgtgcctgagacagccagagattcagacatttcaaactcatcatcatctttttgatgcgaccatggcgctaccttcgtccgcttgtgttatttacttatctgcatatgcggatccatttgtaattactggtgctcctttatgcttgatttacacatcatgcagaactgccttgcctttttgtttcctggttacttactgaattaatagtcactagaacatttttttatcccttagtttggaggtgtggaggagctgtgtgagaaagtgtggttgaagagtgttgtttcgttactgtccatggctcggtagaatgtattccctcggtcatttcggtttttctatgtatgttttctatacaccttggtatacattagattagatacataataaaagttatatatgtaaaaaagacaaaatggcatctaatttagaacggaaggaatattatgcaatatttttgttagattaccgtgtttattcttaatataatgggccttggtttagcccatgttatagatatagtcctttagtccagcatggtccaagcacaaaaaggtccgacacatttaaattaaatttcgggctgataatggtccataattgttataggctatgtcggcctagtccatgggtttagttctcgacccacgacatattatgtgttagaccttttttttttgcaacccgaaattataaatagcctaaaattcacattagatctcgaaatcc

SEQ ID NO: 18704 - DNA, 1411 bp, Zea Mays
ggtcgttgttcccaaccaaaatttccaccccttcgtcagccccttgaccaccgttccaaccctctcccatcgcgtcgcctcgaaggaagcgcggctgatcctgctccaagcctccaaccctagcttccccgctccccaccttcctccgtccggggctcatggcggagatcgaggtggtatccgaaggcggcaggcgggacgaggacgaggagcggcggcggcagcagcagcaaggcgcgggggagccggaccccgtggtggacgtgtactctgcggcggcgtatggggacctggagcggctccgcggtttcgtggagcaggggggagccgccaccgcgctcagggagcccgacggcaacggctaccacgcgctccagtgggccgcgctcaacaactacccccacgtcgcgctctacatcgtcgagcacggtggcgacgttaatgcgacggaccacgcgcggcagacggcgctgcactgggcggccgtgcgtgggtccacttccgtggctgacgtgctgatggagcacggagcgagggtcgaggccgccgacgtcaatggcttccgggcagtccacgttgcatctcagtatggccaaacagcattcttgcatcacatcatctcaaagtacggtgcagattttgatgctttggacattgatgggaggagcgctttgcactgggctgcctacaaaggaaatgcagatacaatcagattactgctatttatggatgctaatcaagtaaggcaagacaaaaatggttgtacccctttacattgggctgccataagaggaaatttggaggtttgcacagttcttgtacatactggtactaaggaagagctcacactaaaggatagtggtgggttaactcctgtgcaactggcagcagaaaaaggtcatcgacatctttccaatgtcctttctaatgctacaaaagtaagctttgaagataagtttttccctggaaaatcaaggaaaattggatatgcccctttcttgtttgcttatcttgtcatctgcctcatcctgttcctaaactcaattgtatttgcacctaatttttctaggatcactgctactgctggtctttggtcttgggctgctgtatcacttttctttgcatcacaagtaatgttctacagagttagcagaaaaaatcctggctacatcaaggcaaattccaagcgaattgacccaaaggagccacttatggaaattgatcttaccaattcctctacttggacaggcaattggtctcagctatgccctacttgcaagataattcgacctatgcgctccaaacattgtccaacttgtaagcattgtgttgagcagttcgaccatcactgcccatggatatcaaactgtgttggaaaggtctcctaatttgagcattcatatatctcaca

SEQ ID NO: 18705 - DNA, 2599 bp, Zea Mays
ctaagtccttactttgaaaccaaaaaaaatcatcttaaaaagtagaacctcattttcttggctaaacaatcagtagagcctaagcacgcaagagacaaagaaaatgttgggcaatcagatacaagggggcttgggcacatctggggcactgtctcatgcttatgttcagcatcctccgctgcgatgtgacataccagacactcagggtctgttctatgatgatgcaaataagttccttatagctccaactgctgatcggatattgtactggaaaacaattctacctactccatctggacctccaaactctgatccagttaatgaaggacctgtcttgtcagttcgatattcgctggatcataaagttattgggattcaacgatccagacatgaaattgagtttagaaatagggaaacaggggagacttgtagcaaaaagtgcagagctgattcagaaactgtacttggctttttctggacagattgcccaacatgtgatgttatacttgtaaaaacaagtggtcttgatcttcttgcctacgagcctcagccccatgcttttcacttggtggaatcgaagaagttcaatgtgagctggtatctttacacacatgaaagtaggctgattctacttgcttctggaatgcaatgcacgatgtttactggctatcagttttctgctggtgggattgtcaaaataccgaagtttgagatgatgatgtctaaaagtgaagcaaacaacaagcctgttctagctgcagatgatgtttacattgtaacagtctatggtaggatttattgcttgcagcttgacagagttagtatgtcattgaatctatatcgcttttaccgtgatgctgttgtacaacagtgtactctgccaacatactcaagcagaattgcagttagtgccgttgacaacataattatggttcaccaaatagatgcaaaagtagtcatgctttacgatgtgtccctggattcttatgccccagtttctgcaccacttccactgctattgagaggactgcccatcaatagtagacaagtatctcagactgcggatagccagtctagtgcatacggtggaaccatctatggagaaggttggaacttcctcattccagacctcatctgtgatgctgagaatgggctcttatggaagctccatttagatctggcggctattgctgctagtagttctgatgctccttcaattttggaattccttcagagacgaaagtctgacccaagcatggttaagactctatgcctagctatagttcggacaatcatcctggaaaggaggtcagtgcccacagttgctaaggcgatggatgttgtccttgattcctacacgcgtttgatgaaaatgggaggggcttttcctggggttaggcgaatacatgagcaaaatcagcagtcaggtagtcagcctattgatggctcccatgtggtttctcaggaatccagtcctggaacaacagttagtcctgctgtgaacccagaccacggaagtgaggctgtggatatatatgtgcagtcaaatccaggagttgagcatacaatagacaggggattactaaatataaacatatcttctgattctgtggacaatacatctgatgctgtcgacaaacgacagcaagctgtaggcgaagctagccgaccattgtcttcaggcacaatgacgcaacatggacaacatgctggaaccgtggcaatttctccaattgagatgttccagtctgtctttacacttgttgaagatgaaatgatgggtgatcctgcatatcttattgctgtcatcatagagtttctacggagtgtctcaaaggctgggcttaaggctcctcacaacctttatgtgatgacggcgacactactagctcgtagcaaccgttacgctgaaatagcattgtttgtgtcaaacaagattcttgagccgtgtaaagaactggcaatgcaacttatggagctgggtctgcagcacccgccaacgaggaagctgggcatggacatgctgagggagcgaggcctgcatcacgactacgtgactgcgatgctgcaagatgggtactacttggaggccctgcgctatgccagaaaatacaaggtgatcaccgtgcagcctgccctatttctggagaaagccctggcgaagaacagcgcccacaacctggctgcagtgctgagcttcttctgcgagttcactccgagcttcaaggccacatcggactttgtcagataccggcatattctgtctgaaatggtttgaacagctttccgttgtgcaaacttgttgtcccgaaatgacttggcacgtcctctgtaacaagcaacgtcacctcggagggtacttttatttaattcttttggtccctcttgcagaaaataatattttattgttgtgaataaaaaaacgttgcaattaccgatgaaaaacaagtctggcttgaggctaagatgatcgcttcccgctcgccgaccatgcagctagccatctcgtcacttatgctactcctagctatggatggccaaataggtgttaaatgggcatacactaaatacggtatttctagtagtgcttcggtatagc

SEQ ID NO: 18706 - DNA, 3946 bp, Zea Mays
ctcagatcggaggggagaaactaggctagttggtctggtgcccctggcactcgctgcacctgcagtttccttctccgggatctcaattctcatctgggagagggcgggcgagatccattccagtcgcccccattcactccccttcctcgtccgtcctcttcctccctccgatccaccgctccccctacccgccgggccgccgctacctcgagcgagcggagatctctctcctcgaacggggggggaggaagatgctcaccaagttcgagaccaagagcaaccgggtcaagggcctcgccttccacccgcgccgcccatggatcctgtccagcctccatagcggagtcgttcagatgtgggactaccgcatgggcaccctcctcaaccgcttcgacgagcacgacgggcccgtcaggggcgtccactttcacgccacgcagccgctcttcgtgtccggaggtgacgattacaagattaaggtctggaattacaagactcaacgctgcctattcacacttcatgggcacctcgactacattcgcactgtgcaattccaccatgagtgcccatggatcgtaagtgctagcgacgatcagacaatccggatctggaattggcagtcacgcacatgtgtggccgtgctaactgggcataaccactatgtcatgtgtgcctccttccatcccaaagaggatctggttgtatcggcatcacttgatcagaccgtgcgtgtctgggatattggggctctgagaaagaagtcagcatcacctgccgatgacatcctccgcctcactcagatgaacacagatctatttggaggtattgatgctgtagtcaaatatgtcttggaaggccatgaccgcggggtcaactgggcctcatttcatcccactttgcctctcattgtttccggggcagatgaccggcaggtgaagatatggagaatgaacgataccaaggcttgggaagttgatacgttgaggggccacatgaataatgtgtcttgtgtgatgtttcatgcgaagcaagacatcatcgtgtctaactcagaagacaaaagcattcgtgtttgggatgccacaaagagaactggcattcaaacatttaggcgggaacatgaccgtttctggattcttgctgctcaccctgaaatgaaccttcttgctgctggtcatgacagtggcatgattgttttcaaattagagagggaacgcccggccttctgtgtcagtggtgacacagttttttatgtgaaggaccggtttctaaagttctttgaatactccacacagaaggaagttcagttggctccaataagaagacctgggtcagtcagcttgaaccagtcacccaggacactatcgtatagtccaactgaaaatgctgtcttgatttgctttgatgctgatgggggttcatatgaactctacattgctcccaaggattctgctggcaaggctgattacttgcaagaggcaaagaagggagctggtggttctgctgtatttgtggcacgcaacaggtttgcagtccttgagaggagtagcaatcaagttttggtgaagaatctgaagaatgaaatcatgaagaaaagcccccttcctattgcgacagatgcaatatattatgctgggacaggtaacttgctgtgcaaggctgaagaccgggtggccatctttgatcttcagcaaaggctagttcttggtgagctacagacacctgctgtcaaatatattgtttggtccagtgatatggaatctgttgcattcctgagcaagcatgttgtggttatagccagcaagaagcttgtccatcaatgcacactgcatgaaaccacccgtgtgaaaagtggtgcttgggatgagaatggcgtgttcatctacaccacactgaaccatatgaagtactgccttcccaatggcgacagtgggatcataaaaacccttgatgttcctatttacataacaagggttatcgggaataacattttctgcctagaccgtgatggaaagaacaagctgattgcagttgatgcaacagagtacattttcaagctcgctcttctcagaaaacgctatgatcatgttatgagtatgatcaagaactcccagttgtgtgggcaggctgtgatttcttatttacaacagaaaggttttccagaagttgctcttcactttgtgaaggatgagaagaccagatttaacttggcccttgagagtggtaacattcaaattgcagttgcttctgcaaaggagattgatgacaaggatcactggtacaggttgggaattgaggccctgaggcaaggaaatgttggtatcgtggaatatgcataccaacgaacaaaaagttttgagaggcttgcttttctgtatctcattactggttacttggacaaggtgggcttcatgtacaaaattgctggacagaataataatttgatgggacaatttcacaatgcattgtatcttgggcatgttaataagagagttgagatcttggaaaatgctgggcagctgcctcttgcttatgttcttgctgtcacacatgggctcactgaaattgctgagaggattgctgctgaattaggcgagcatgttcctttgctgcctgaaggaaaatcacactcgttactgatcccccctgcacctctcacagcctgtggtgattggccattgctgagggtagtgcgtggtatttttgaaggtggactggattctactggaagggcagagcttgaggaagatgatgaagcttctggtgctgactggggtgatgaggacttggatattgttgatgcaagtgaggtggtggcaaatggtggcgattattttgatgcagagggtgaaccaaacgaggaggagggtgaggaaggtggctgggacctggaagatctggaacttccacctgatacagagactccaaaatctgctggcaatgctcgctctcctgtatttgtcactccaacagcaggcatccctgtcagccaaatttggactcaaaaatcttctctggctggggagcatgcggctgcagggaactttgatacagcaatgaggttgcttagccgacaattgggcatcaagaactttgctccgctgaagcccttgtttcttgatctgcatatgggcagtcattcatatctgcgtgcccttgctgctgctccagttatatcagttgctgtagagaaaggttggaatgagtccgcaagtcctaatgtaagaggccctcctgcacttattttcagcttctcacaaatggaagacagactcaaggctgcctacaaagccacaactgagggcaggttcccagaagcactgaggcagttccttagcatcttacatacgattcctgtaatcgttgtagactcacggagagaagttgatgaagtgaaggaattaattgagatagtgagggagtatattcttggtctgaagatggaactcaagagaaaggaattgagggatgatgtgacccgccaacaggagttggccgcttacttcacaaattgcaagcttcagagaattcatatgaggcttgtgctttctagcgccatggctctttgcttcaagcagaaaaactatgctactgcagcacactttgcaaggatgcttcttgagaacagccctcaagaggctcaagcaaggaaggctcgacaggtgctgcaagcttgtcaggataaggatgattctcaccaactgaactatgactttagaaatccatttattgtttgcggtgctacatatgttccaatctaccgtggccaaaaggatatttcttgcccatactgtggatcccggtttgctccttccatcgaagggcagctttgtaccatatgtgagcttgccatagttggggcagacgcctcaggcctggtctgctcccctacgcagatgaagtagacgtctgctgttatcacttgctatatgctccaggagtcagg

SEQ ID NO: 18707 - DNA, 4646 bp, Zea Mays
gccagtcttacctgcattgtcaatggaagacattatcagagcttcaaagtgttagtggattcaagaaggtaataaattacacgaaaagagttgctgaggaacagaggtacaagagggcactatcacgtgaagaggttgaggtgcatgatgtgggcaaggagatggagctggatcttattaaacaatatagtcaggttgaacggatatttgctgatagggtcagcaaagctgatggagatgatctggttcctgaatatttagtcaaatggcaaggacttccttatgcagaatctacctgggaaaaagatacagatatcgattttgctcaagatgcaattgatgaatataaggctcgtgaagctgccacatctatacttgggaaaacagtagatttccaacgaaagaaaagcaaagctagtttgaggaggcttgatgatcagccagaatggctaaaagctggtaagcttcgtgattatcagctggaaggactaaactttctcgtgaatgggtggagaaatgatactaatgttatacttgctgatgaaatgggtctggggaaaactatccaatctgtttccatgcttggcttccttcataatgctcaagaaatcaatggtccatttcttgtagttgtgccactgtcaacattgtcgaactgggcaaaagaatttcggaagtggctgcccaacatgaatgttgtcatttatgttggcaaccgtgccagcagagagatgtgccagaagcatgagtttttttcagacaagaagggtgggcgtcatgtaaaattccatacgttgataactacatatgaggtgattctcaaggacaaagcggttctttccaagatcaaatggaactatcttatggttgatgaagcccaccggttgaaaaattgtgaagcatcactatatactacccttttggaattcagcactaagaataagctgcttatcactggaacacctttgcagaacagtgtggaagagctttgggcattacttcatttccttgatccagttaaattcaacagcaaggatagttttgttgaaagatacaaaaatttgagttccttcaatgaaaccgagcttgcgaatctgcataaggaattgaggcctcatattctaaggcgggttataaaagatgtcgagaagtctttacctcctaaaattgaacggattctacgtgtcgagatgtcaccccttcagaaacaatactacaagtggattttagagcggaatttccagaatctaaataaaggagtccgtgggaatcaggtatcacttttgaacattgttgttgaattgaagaaatgctgcaaccatccatttttgtttgaaagtgccgatcacggttatggtggagatagcattggcgatcggaataaagttgaacggattgttatgagtagtggtaaacttgtcttgttggacaaactattgatggttaagatgttggacatccttgcagaatatctctcccttcggggatttcagtttcagaggcttgatggtagtacaagagcagatcttcgtcatcaagccatggaacattttaatgctcctggaagtgatgacttctgttttcttttatccacacgtgccggaggacttggtattaatcttgcaactgcagatacagtgataatttttgattcagattggaatccacaaaatgatctgcaggccatgagtagggcacataggattggccaacaggaaactgttaatatctaccgcttcgtcacatgcaaaagtgttgaagaggatattttggaacgcgcaaagaaaaagatggttcttgatcacttggttattcagaagctaaatgctgagggcaggcttgagaagaaagaatccaaaaagggtggctccatatttgacaagaatgaactttcggctatcttgaggtttggagcagaggaattgttcaaagaagacaagactgatgaagaggccaagagaaaccttgaaagtttggacattgatgaaattcttgagagagcagagaaagtcgagacaaagggtggtgaaggggaggaaggaaatgagcttcttagtgctttcaaggtcgcaaacttttccagtggcgaggatgatgcaacattctggagtaggctaatacagccagatcctgcagatattattcaggaaactttggcgcctcgtgctgcacgtaataaaaagagttatgttgaagatccccagtttgacaaaaataataacaggaaaagacgtgcagttgaagcacaagaaaagccaaggaggcgttctggcagaacagtggaaacagttaattcagtaccattggttgatggagcagtagctcaagtacgagagtggtcttttggtaatattccaaagaaggatgcttctcgttttgtacgagcggttaaaaaatttgggaatgcaacccagattgacttaattgtggatgatgttggtggtgtactagagaaggcaccacatgaagcacaaatagagctatttgatttgttgattgatggttgtcagaaaagctgttaaagagaatacagatatcaagggcacagttttggattttttcggtgtagctgtgaaggcctatgaattgctagctcgtgttgaagagcttcagttgttgtcaaagcgcattgcacgatacaaagatccaatcaagcaataccgcatccaactaccttataaaaagcctcagtggtcagcaagctgtggatggactgaaactgatgatgctagattgatggttggaattcattggtatggctacgggaattgggagaaaatacgtttggatccaaagcttggcctgacaacaaaaattgcaccagcaacacttggtgagagagagacatttttaccacgtgctccaaacttggataaccgtgctagcgctctcctgcaaaaggaatatgctaagtttagcggtaatagctcaaaagtcaaaggaaatgcccgccagacagtcaataacgacagtaatagtggagctcgatcaatgagaggccgacaaaaggatgcaccagataaagaggataataagccgaacaaagatgacattcagaagcgcaaggtaatgatggaagctgaagcaagagaagaaggtgaaatttctgaatcagaggcagagacaaagtatcgtctggacaaagaggagaagtggctcgaatggtgctctgaagttttaaatgaggaacaggaaactttgaagcgcctggacaggctgcagaatacaagtgtaaacctcccaaaggaaaaggttctttcaagaatccgcaagtatctcctgataattggggacaaaattggtgaagttgtccggcaacacagtgaatcttataggcaatcccgtaagtgtagccgcacctcccgcatgaccatgaggttatggaattatgttgccaccttttcaaacatgtctggggagcaattgcatgatctctatttgaaacttagtcaagaccaactggaaggtggagttggcccatctcatggtgccaatttcacatccattccttccagcaagggaggtaactcaaatcaacttcatcctacaagaaaccataggccaaccaggtctctccagtacaattctgagtctttgcacaataatgagagctctggaagttctgaagcctggaagcgtcgacggagagcagaccctgataatcagtttgacacccagcctttgtatcaacctccaattatgacaaatggaaataggttgcaggaatctagtagttctgcaggaattcttggttggggtccagttgaaatgagacggtatggtaatgaaaggccaaagcgtggtgttcatcctagtcattttcctactgggcatggacctttgttgtagctgaaggaattagatgactcgaacaaccttgtccactttggcataactgttcccagtgaatttcagcttccatatagttacaaatggtggaactctgtcggaattgaaattcttttttccataacaagaaggaataaaaagcaagacctgacctggagcgcagtttgaatactgtccctcaaaggtaatgccaggactccagaggcgacgcagggatttgttaacagctacactgaatatccttctgacaacatcacagtaaaacgaatacatggtggcttgtcaactgccaagaggattaatcgaggaaattttgtcgattcagttttgtgatccaatagaaaagttgggggtcattaggaaaaagttcatctcaacaatgatctatagttcactctatacatgtattatgttttacattgcaatataatgaaatatggttcagttattcccactcagtgtgttttgtgcccttctgtattgatgtaatagatcaaagaaatgcatgttctcgttttttttttttttttttagaaaaccgcaggagaactgcgcatcttatatattagagaggaaaaaagacattacaaaagaggagaagttgcagagcaactctcccacctaataaagaagttgcagctgggggggcatagtatgtgttagtttcaatttctctaaatagaggaaatatatattttgttcacgcgatggaatcggtagatacttgaattgattccatagtatttttttcctgaggtgatgtgagaatgaggtgtgtggttatatgtatttcaaat

SEQ ID NO: 18708 - DNA, 1472 bp, Zea Mays
acctgaataatggccattgctcattggtgtcaaagtttcagagtataaaagcaaatatggtatgtggttcgcatcaagagttgcaccggtcgtcttcatttgaaaggaattgggaagaaagcgctgcagaaagtgttgcaagtaatgatgtggtatcactcctgaattcttcaattgtttcttcaaaagtagatgctagcaattctgtcttagagaaccctgttgtgggaagtgagatgtggagaagtaaaacgaaagattctaagcctgccaagtctggacgtctatctcacgaagaaaagaagcttgggaagtctaatgatgaaaagaagacaaaacctcggaagtcaatggaatttcataacatcaagattggcaaggttgaacttcttgttacatacgagggatcaaggcttgctattaatgacctaaggttgcttatggatactttccacaaggcagaatttactggtacatggaggcgactattctctagagtcaaaaaagggaagaagtttagcaaccatagggaaacacttgagggttctattcctgaaaatgatcttaacttgagtgacagtgatgttggtcaacctggaagacatgatcaattaacagcttcatggttgaagaggccaggcgatggtgcaggtgatggatttgtcacgtcaattagggggcttttcaatacacagcgccgtaaagcgaaggcctttgtgattcggacaatgcgcggtgaagggcataatgacgaatatcaagacgaatggagcgagagcgatggtgaatacccttttgcgaggcagcttacaattacaaaggccaagaagctcatacgaaggaagttccgtccaagggtgcaaaagaacccaggtctgtcgatgcaagattcactcccatctagtccgcgggaaacaactccatatcaaagtgactcctccaggtcatcttacgaggacttccatgagcagtaaaacaatctggtgatgctgctttcagcttctacatttggtcgataagatgcagccatttatattggttatagtagggtgtatgtatatagtaggatgtaccatcaaaatccaatgtatcatgtatagtggttaggcaatactccgtaattatgtgcttgtaagttaataagaggccagctcgtactcctagaaaacaaaacccgtgatctatggcatggggcattctcattcccttgtacttcaggactagtatggattgtaaattcaacggtgaaggtgttgcaacatttattcagtaaagtatccttgttgaagaatttgtaaaaactatggcagaaacaatagggaaggagcaagtgactaggtgcctaggtgtattatgattcttttgctgactagttggaagttagaaatgcattgctccacgtcaaaaagaaatgcgtggcagacaaggttgttgcttaacagatcggtgagctatgaaatgctatctgttca

SEQ ID NO: 18709 - DNA, 5578 bp, Zea Mays
cagccaacgacagcttgctctcgcccctgccttctcctctcctctgggtgttcccggcggtttcttcgccgctcaagccgcctccactctccctgccgcgctagcaactacgtttcggacttccccgctcgactttcgacctcccctgccgccaacaccgcccaaccgccgtcctccaccaccctcggccggcggcgccccgccttgccggaggcggagcagacgacgcgtggcagccgattccgcgatggatgcatccactgccggcgatggagacacgaatactttgaagaggccatgcaaaacatcgcctccagaaggcgaaacagacaagtataaacggcagaagagggaatgccaggatttctctcccagaaggtaccagcttgatgtctatgaggttgctacgaggcacaacacaattgcgatgcttgacacgggagctgggaagacaatgattgctgtcatgctcatcaagcattttgggaagatcaacaaagcaaacaatgatcgaaagctcatcatattccttgcaccaactgttcaactcgtcacacagcaatgcgaggttattaagagctacactgattttgaggtggagcattatcatggtgcaaagggtgttgatcaatggaaggctcatagctggcaacagcaactcttaaagtatcaggttatggtcatgacaccacaggtgttgctagacgctttacgccaagctttcttgatcttggacatggttagtctcatgatatttgatgaatgccatcacgcaactggtaaccacccatatactaggataatgaaggagttctatcatggatcagagcataagccaaatgtgttcggtatgacagcctctcctatcataagaaaaggggtctcctctgatttggattgcaaaaatcagctatctgagctggaaaatattttagattccaagatacactctgtggtggatagagaagagatagaactttgtgttccttctgcaaaagaagtgaatagatactatgagccaagaactgtttcttttgacgatttaagtgaagaactggaaattttgtgttccaagtatgatgggctgatcatacaattgcataacagatcgaccaatcagtacaaagatgctgatgaaataacaaaagaatcacggaaacgtctctcaaattctttagcaaagatttgctattgcctagaagatgctggtcttctttgtgctagtgaggctactaaaatctgcattgaaaggggccagagaaaaggttggctgaaggggggcagtgacaccactgatcagcaaagtggtcaaaatggacctatcctgtttgcagaaatttcaatgcttcatatggagttttttcaggaagtgttggatataatcggcaaacgcgtccaacagcaacaaggaattgatgcccttctgaactcagagcgtggatgtgtggaagcaaaaaatatgggctatatttcaccaaagctctatgagctcatgcaagtatttctctctttcagtgaccctgataacgttagatgccttgtttttgtggatcgaaagattagtgctagagtcattgagcggacgatgaagaaaataggccaactctcctgtttcagagtctcttttctaactggagggagttcttcagtggatgcactcacccctaaaatgcaaaaggatacactggattcgttccgctctggaaaggtcaacttactgtttactacagatgttgcagaagagggtatacatattccagactgctcgtgtgtaataagatttgatttgccgagaactacccgcagctatgtccaatcacgtggacgagcccgacagagggactctcagtacatactaatgattgaacagggaaatgtgaaacaagatgatttgatatctgggattatgagaagtaaggcctcgatgactgggattgcttcaaaccgagagcctgaggattcacaccccagtttcttacccactgaagaaataaatgaataccatataagcaaaacaggagccaaaataactactgattctagcatcagtgttctcaaccagtactgtgataagctcccgaaggacaagtactacaccccaaggcccaagtttcagttcactcattacggtgatggttatgagtgtactgtaacactaccatccagtgccatgtttcaacttttggtaggtcaaaaagcaagaaacatgcagaaagcaaagcagcttgtttgccttgatgcatgtaagaggctgcatcagctcggagcacttgatgaccatctttctccatcagttgaagagccgcctccggaaatttcaagcaagtctagtatctcgacacctggtgcaggtttaggtacaaccaaacggaaagaactgcatggtacaaccaaagttctttccatgtctggctcttggggttcagatagaagtgtgactaaacttcaaggctacaagttgaattttgtttgtgatcaagttggtcaaaaatactctgcctttgtccttttaattgatgctagtatagcaaaagaagctgctactttagatattgatctatatttgcatgacaagatggtaaaagcttcagtttccccttgtggacctcttgagttggatgcttggcagatggaacaaacaaaactatttcaagcacttctctttaatagtttgtttggaaaactgttcattggatcaaaagcatcaaaaaccccaagggagttcattctcaagaaagatgatgtgttcctttggaacaaagaaaatatgtatttgcttttacctgtggattctactctggattctcataaaagtgtttgcatcaactggagtgtaattgatgtagtggctacagctgttggattcatgagaagcatttattcagatggcaaatgtaacctaactgataaacttaattatgaaaaaaatggtgaagatcttattcatttggccaacaagtcatgcaagggtaatgatcttaaaaatatggtggttctagcaattcacactggaaagatctatactattgttgttgtatctgatttatgtgccaatagtaaatttgatggtacaactgacaagaaagaagcaaaattccggacatttgcagaatattttgagaagaagtatagtatatttctttgtcatcctttacaaccattgctagtgttgaaacccacccataatcctcacaatcttctttcctcaaagaatagagatgaagacaatgttgtggaaaataaaaatagggcgaacagccttgttcacatgcctccagagttgctgattccccttgatttacctattgatgttttgagagtattctacttgtttccatctctgatgcatcgtcttgagtcactaatgctagccagccaactaagaagtgaaattgcatacagagattctgatatatcaagcttcgtgattttggaagctatgacaacacttagatgctgtgaggacttctctatggagcgattagagttattgggggactctgttcttaagtatgcagtgagtgcccatcttttcatgacatttcttaataagcatgagggacagttatcgtccagaaggcaagaaacaatatgtaatgccacactttataggcttggtattgaacgcaggatacagggttacatacgtgatgctgcatttgatcctcgtcgatggcttgctcctggacagctgtccagacgtccttgtccttgtgaatgcccagtaaattctgaggttgtaactgaggatattcataggattgatgacaagtctataattataggcaaggcgtgtgacaagggacacagatggatatgttcgaaaaccatctctgattgtgttgaggctctaattggggcctattatgtcgaagggggattaaaagcagcttttgctgttctcaaatggttccagattgagactgaaatcgaggaagagttaattatggaagctctgtcgagtgcttcagtgcgaaactatcttccaaaagttgatgtagttgaattgcttgaagcaaaactaggctacacttttcaaatgaaaggtttgttaatagaggctctcacccactcatcacagcaagaatctggagcaacatactgctaccaacgcttggagttccttggtgatgcagtcttggatattttaataactcgccatctgttccttagtcataaagacacagatgagggggagctgacagatttacggtctgcatcagtaaataatgagaattttgcacaagttgcggtaaagcacaatctccatcagtttctacaacattcttcggggttcttacaagaccaaattactgaatatgtgaatagtcttgaaagttcgtccatggacagagccagccttttatccagtggaccatgtagggggccaaaagttttaggtgatattgtagaaagtatagcaggtgctattcttattgacagcaaacttgatttggatttagtttggcgggtttttaaacctcttctttcaccaattgtcacacctgagaatttggagttgccccgattcagagaacttaatgagtggtctgacaagaatgggtactttattggaattaagtgtgaaaatcgaggagacagcacaatggctatccttaacttacaactcaaggatttgcttcttgtgaggcaaggttgtgggaagaataaagtagatgcgaaagcacatgcagcttccttattgcttagggatctagaggaaaaaggacttataattccaaggaatgcaagcagagtggaacaacttgaaaagaattctggtactgtaaaacattgcaacaacgtgcttgatgttatggacacacaaaacgtagcaccacctaggcaaaaggaagtagctgtgttaagtaccaccactcctggctctgttcttgataagccattggttgtgaaggttaagttgagcaaaggaggacctcgtatatcattgtacgagtcgtgtaaaaagcttcagtggccaatgccgacctttgaattcgtgaaggtcgaaccaagcgtgtgctcctcttcctgtggttcgtcacaaaaggttgcgccccaaggattcgcatttgcttcgacaataacgttgcatataccgaacggcgatgtcatcagcctcacaggagatgggcgtgcggataagaagagctcacaggattctgctgcgttgctcatgctctatgagctgcagcggcaacgtagattccaagttcaagaagtatgaggaatcacctcgtggttccatcaccaaagatgcaatgttaccgccaccggcgattattgcttgggcatcttggagtaatgtcaccgccaaatcagtctttagtcgtcagccgcacgggggtgtaagaaaataatgtacttcattctgattctaaattataagacaccccgaattatgtaatctaattatcataatgtcctataatttgaaatggagcggtgttggttactctcgttcccgtctgatggattcagacatttcatctgtacacattaggttctggtgcatgttaaaagagcctggaagggcactgcttacgtccgccgtggtcgtgatgtgtgtacacgtgca

SEQ ID NO: 18710 - DNA, 1666 bp, Zea Mays
gtgctagggtttcccccgtcttatcgcttcctcgttcccgcagccgccgcccaaaccctagcaaacccgtcctccgccatggccgacgaccactactcgtccaagcggaagtacgacgacccctcgccgccgccgcggcgcacggggttctcttctggcccgccgcctgcctcgccgcccgctggcggcgccccgtcgtacaacagcgttgcgccgccccccgatgagatccagctcgcgaagcagcgtgcgcaggagatcgcggcgcggatctttaacgccgcagaggccaagcgccctcgcgtcgacaacggcgacgatgacgtcggcggcttcggtggaggaagttccctgggtggcagcggtggtggtggtggtggccgcatcgggggcgcaggacttggcttctcgtcctctgccggtggtgggcatggggcttctatcccaccgttatcttctcagagcagtgcaccacagtactcatatggtggacatcagggtacaagcaaaaagattgaaattccaaatggaagggttggtgttattattggaaaagctggggaaactattaggtatatccaacttcaatcaggagcaaagattcaagttacgagagaccatgaagctgaacctggtgcactgacaaggcaagttgagctttctggcaatcctgagcagataagcaaagctgaacagttgatcaaagaagttatagcagaggctgatgctgggtcatccggtgctgtatctggtggccggaaatacaatgcaccacagccaggcgctgagacattccagatgaaaattgctaataataaggtgggattgattattgggaagggtggtgagaccataaagtctatgcaggccaaatctggagcccgcattcaggttattcctttgcatctgcctgctggtgatacttcaactgaaagaactgtgcatattgatggcactcaagaacaaattgaacatgcaaagcagctggtggctgaggttaccagtgaggtctgctttctttctcttgttgtgtctgatatctgtgattgctttgctctcttgtgctttaacctgtcatttaggttgcttctggttcgttctgtttattatattgttttatgattttcccctgttctttttgaaaatcttgtttcttttgcttctttgccgccgtacattgattatactgctgtgctaaccaatgtctgaaacatattgttcgtgggtacagccacaacatgcaaggagattgttatacgacttattccctttttctgaacatagcttattaatagttttgggcaaggttttcatgacttaagtattatataataaagcgaagagttgtatttgtaaactaacttgttctttatcaattagccactaccgtaggcctgttaaatggtattccatagaatctgcagctaaagttttgacaagtcttgatttgaaattcatatgattgttcacgtcatatggaatatggatgatactcttgggcaaagaccaatgagtccttgttgctcagtggttattgtttattcatttctccacaaagagccaattagtgtcaatagcttgccaggaggactgcaaactatcctggagagcaggtttgttactgtttaatgtcaatgtcctactggatagaacaatgtgttttcac

SEQ ID NO: 18711 - DNA, 870 bp, Zea Mays
tggaaagatactgttgctctatttggaagcgtgatgctgaaatcatgtgggttttgctgggtgcggttggcaactctctgctttcgttggttctcaagaagatgctaaaccatgaaagacctgcaccagctttgcggtctgatcctgggatgccatcgtcccatgcacaatccatattctatgctgcgaccgtcctagctctttcattgtactactggcttgggacaaattatctgaccatgattcttgggcctgcaactctgtcgttggctgcctatctgtcttggctacgtgtgtctcggggccttcatacactaaaccaggtcatggtgggagctgttgtaggatctgccgtcggtgctctttggtttgtgctctggcattggcttgtgcaggaggcctttgcttcttctgtgcttgtcagagttgctgtcatccttggatcatcagcattttgtgttagctttgtcgtctacatgattcgtcactggctcaaggatgagtaatgtacttcggagctgcaatgggagatggacagataggcatggtgattttggaaaagtgaatccgttccgattcttatcagaatcgcttgaaaaaatggtgacaaatgggttttggcggagcgattcacgagtggaacaattctcttttccttcagaaactctcggattggggaaaatgaagtttcacaccgattcctaatagtcacatacgcctcgtgtcacactagtaattgtattttttcccagttaatcatttttaagtacaaggaactaaatatgttgtatctagagcaagctcaggagatttatgtcaggaatacaatttttgatgaaaaaatatccttcaacaactcgtttagataga

SEQ ID NO: 18712 - DNA, 1320 bp, Zea Mays
ctttcccgtctccgcaccgcacacgcatcgagcggctcggcggctccgtctcatgagagccgtcgctgctgccgcctcgcccccgctccgcgccctcctcctcctctcccgccacccacgccgcgcaggcttcaccaactggccgtcgctgcctaggggccagaacgcaggacccacagccccgccggccgccaccgcccccaagcctgctgcgccgtccaggaggcaaggccgcggcctcactgccagcctgcctcgccaagtcgcccggatctcgacgccccacctgcggccgccggcgaccccgccaaggtgccctgacagacgccatcagagccacggagttcgtgcgctggctggttgtccgcggaagacggtccgccacctccctgctccaacctcgcacctccggttcaccatgaacccttcgtcgtcctcctcctcctctggcgggtaccactccagggccgctgccttcgcttccccgcagccacgcggcggtggcggcagacggcgtggtggcggccgcggccaagacgggagcgaccgcatcgacgcccttggccgcctgctgacgagggtgttgcgccacatggcggcggagctgcgcctagatatgaggaccgatggatacgtgcgcgtccgcgacctgctgaagctcaaccttcagaccttcgccaaggtccctctcaagtctcacactgttgacgagatcagggaggcagtcaggcgggataacaagcagagatttagtctgttggaggaagatggcgagctgttgatccgggcgaaccagggacacacagtaacaactgtcacatcagagagcctgctgaagcccattttgtcccctgatgaagtgtcagtttgtgtgcatggaacttacagaaaaaatcttgattcgattttgcaatctgggctaaagcggatggcaaggttacatgtacatttctcaagtggcttaccatcagacggagaagtaatcagtggtataaggcagaatgtaaacatcttgatacatctagatgttagtaaagcacttaaagatgggatgaagctttatatttcagacaacaaagtgatcttgacagaaggttttggttttgatggcgttgtccctgtgaaatactttgaaagaatcgaaacatggccaggacgagctccaataccgttccaaagataacaggccatgtttcagcattgctagttcgtacgtactgaaaaatgatttgtcatgatgtatcccggagaaccattttttttggtaattcacatacactattttggggggttggcttttttttttggaaaatatcccat

SEQ ID NO: 18713 - DNA, 2042 bp, Zea Mays
cccgaacaaagcggtcatcggaaaccgatcacatctcgcccagacaccacacagcagcaggactgcatgagcagcagagggcagagcacgggcacggccgtccgcaacgcaagggcttgcaggacgagaggatggtgcagacgttcgtggccgcctacgcgcagccgccgccgcatcaggacggcttctacccaaaggaagccgtgatggcggccgtggaggagtgcatgcggaagcaggccgacgcgctgctgcactcgctcgacggcatcgggggcaggctttcgcagctcgagctctactgctacaagctcgagaggtccatcggggaactgcgcagcgacgtcatggactaccacagcgagagcaccaccaacttcagatgcatcgacaagaacctcggacaggtccacaaatccttgcaggttcttcaggataggcaggacttggctgaaactccaaaagaactcagcaaacttcaaatagcacatgaggcaccctctcatcagaagggtgaggccaccggttttcccatgcttgcgccaagggaaaatgaccacatcacacaagctccaaaacatgaggttgcccttttgcgacttcaccaagttaatgggatgcagtcccctgccgtgcaggtccaaaccagcggtggctttgttctgcagcacctggtgcctgtctctttgagcacgcagcatgatcagcagcaattgaaccaggctcctgtgtactatgtgcaaagccaggatcatgctaaatccacagagagcaaggcgttggaacctttggttcaaggtgtgcagccacttgtccacaaccctgaagtcatggctcaagttgagctacctcagaaacctaatcaagcaactgaattgtaccctcaacctcagaatcacagactacagatgcctacccagcaggttgattcgcatacatggcatccccaacagcccatggtgcaacagcaccaatacattatccaacaagtttcacgacacatggctcaacagcagtcctcgtctcctcattctcagagtgctcaagccacacccttgtttcctccattcagctccccgaagcctgctagttctaacactgatccaattacaagaagtatggctgggcaacctccatactcttcatcgcagcagcagcatgaagtcgcccattcattttatggccaaggcaatacaatattggttcctgtagctgatcataatgctcagcatcagcaatcgcaatcagtgcagctacacagccagggcacctgtctacctcaaccaagcaagcccagtcactgcagtgttgcatcctatgctgttcaaggaaatggtcagacctacagctccacatacaagaacccttctaactgccctgcaactgtcgtagctcttctgcctcagcctccagctactgcttctatggcgtatcatcccttgggaccacaggtcgtgcacaatcatccatttggaaatatggttgaaacggctagtgtggtagggtattcacgggaccaaggtgagatactcccagtggtgactgcagtacaacccgtgatggttgataagcttaatgctggcagcaacgtaacatcccctcgtgaatggtcagcatagtggacgatgtgccatcgtacacttcactgcttccacaacttactactgcacatattgcagttggaagctcatcaggtctattttatctggctcctttttttccatcagccagcagattagaatagatccttctacctttttcagctgaaggtcagtatgaaataagaaaagtaggttagctgagtgatcactgttggcatatgtcctcacttttaatgggcatatcttcttgtaaccggttgcgaacttatatgccttatatgaatacatgatgggtttacatcagcttgccagatgtttgctaggtaacattagttttaagcggtagctgctgctttctcacagaatctgtcacgcatgatctagttggttatgttactgtgtatgtcatgaagacattagctatacttgaaaattttgttg

SEQ ID NO: 18714 - DNA, 1624 bp, Zea Mays
caagcagtgtgccctcccattcagatttcatcctcggcgtcgtctcctgtcctctccacgccaagcaacctccccaccccgccccaccctccatgctcgcctcgagatcttagcgggcagctccggagagcgccgacgagccccctgatccctcctcgccgccgccgccaaccgaccgggggaggagaggaggggaggggagcgatggagaccgccgactactccgggaagctcttcgtcggcggcatctcatgggagacggacgaggaccgcctccgcgagtacttcggccgcttcggtgaggtcactgaggccgtcatcatgcgggaccgcagcacgggccgcgctcgagggttcggtttcgtggtcttcgctgacgccacggtcgccgagcgcgtcaccatcgaaaaacacatgatcgacggccgaatggtggaggccaagaaggctgttcccagggatgaccacagtattgtgagcaagagcaacacaagcagcatagggtcacctgggccgggccgtaccagaaagatctttgttggaggtctgccctcaaatgttacagaggctgacttcagggggtattttgagcagttcggtgtcataactgatgtggttgtgatgtatgatcacaacacacagagaccgaggggctttggattcatcacctatgattcagaagatgctgtggacaaagccctgcacaagagctttcatgagctaaatggtaaaatggttgaggtcaagaaggctgttccaaaggagcagtctcctggacctgttgcacgctcacctgcaggagtggggcagaactatgctatgaacagggttcatagcttcttgaatgacttcaaccagggttacaatccgaaccctataggaggttatggcatgagggtggatggaaggtttggccagctttcaggtgcacgaaatgggctctcttcttttggcccaggttatgggatgggtatgaacgttgaaggtgggatgagtggaacttttggtgcaaactctggtttcatcagtaactccaatgggaggcaaatgggttcatacttcaatggaagttcgaatagattgagtagttctattgggtatcttggttatgactcaggatcgatgttgagttccatgtctaggaattttaatgcaggtgtaaactacccgatcaatcctacaaacatgagtgcttttgctgcccttggaaatgggggtggcgtcaattatatgggtctcccttctattgcccctgagttggcccagttgggcaacatttcaagccttgggtcagggaactttagccgtggagctggagttaataacttaagtttaccttctggctcctatgggaggagcaattcaactggtacaattggtgagcctttttctgcatcaggcaatgcatatgaagtgaacaacccagatacatatgggaacagctctatttatggtggcacatcctggaggttcccttcatctgaagttgacgtgccttctttcagtcatgatcttggaaatgttgatccgaatatgaaatcagacatatcagcaaattacatgggaaattattctgttagcaacaatcagccaagcagagtgacacgatgttttttttttgcag

SEQ ID NO: 18715 - DNA, 2804 bp, Zea Mays
ttgttgttgttgttgattggcgcaattccaaagcgggtaatcaactgtaggacagttcatgaagcaattgttagtgcctaatggatttctgatatcagaggagctttgtcagtgggggttttgacagattaccttcagctttggcctttgggatttgatatctggcatcgagctgcagccggaggttgacgacaagcatatcttcagtattgccccaaatggtgtgtactcagccaaatcagcatatgaaggtctgtttctgggatctgagacatttggacactataaaagaatatggaaatcttgggcattgccaaaatatcgtttcttcctttggttggttgcccataagagatgttggacaactgatagattggcaaagcgaggcctgaatcatccagagaaatgtcttctatgtgatcaagaggaagaaaatatggaccacctccttgtgcaatgttccttctcacgggaattctggtaccttttactcaggaaattcggtcttcactctcttgcaccatagctgactgtaaactctttcctgggatggtgggaagtggtgggaggagcagtccttggtctcacaaaaaaggccttaactcatcattttgggagcttggactttatggaatcatcgaaataaatgcatttttgatggctgcaatacaagtatgtccttatgtctcagagctgctgatgaggaaagaagatgggaagtagctggggcaaaaggcctcgctcatttggctgcacccttggtcaatatcctcacacatactgatgaaataaaactcaaagcaaaaaggattgccgcggtggaaaagaagaagcggtgtttaggaatgaagattctatctaccaaggaagcaagtggaggccttcaacggtgtgcagattattttggtatgccaacagctcccagtgaatctaacaaggagccaaggcctgaagagtgtgtaaatgaactgggcattaaacaaccagtacagcatgttgcttccgaggagcaggaaggagttcaagatgatgccaaggcagatgcaaatgttatgaatgtttcttttggtaagggaaaatcagaagattcttttggtacaattaatggtaccaacagtggagataaaatagaatctcctagtggtttagcagaaagaacattgactcagcctaccactaagggttgcagtaagcagcgtggccgtagttctaatggtagaggaaacaggactaaaaaaatagaagaggggaatgcgtctggactaattgctgtggctcccgagtcagaagatgatgatgatgatgccgcatttatagatggaaaccaagcagagggtggtgcactgtgggatatttttcgacgggaagatgtgagcaaactgcatgattatctaatgaagcatgcacatgagtttagacattgcaactttgagccagtgaagcaggttactcatcctatacatgatcagtgtttttatctaacaattgagcacaagagaaagcttaaggaagaatatggagtcgagccttggacatttgaacagaagctaggtgaggcagtatttatcccggcaggatgtccccaccaggttagaaatttgaagtcttgcataaaggttgcactagattttgtttctccggaaaatgtccgagagtgcatcaggttaacagaaggtttccgtctgctgccgaagtggcataaggtgaatgaagataaactggaggttaagaagatagctcttcatgcattcaatcaagctattaaagatatcactgatgaatcatctaatagcaatgaaagcaaatggatccggagataatgaggatcatgaaggccattgaatccatgcttgatgtcatggaagttagcaccacccgcattcgacatcttgctatcgagaacctgaatgaaaaccgtagtggcttatcggatgccgacaagataacaaaacctgattttagtgtactatgcatgatattagtaccttatataatacgtagcttggagaaaaggccattcaccgtttctcattgttgggaggttctaaagaatgaagccaaatggttacacttggagcagggctcacaaaatattgatgtgctggtgaacaaaggtgtagggttttctccaagatgtcggatttgacactgaagaagattgagtattggaagaggtccgattgaacatttggcactgacattcaccaacttgttcaaatagaggaaaagaatatggaaatggagaaagagcgcatgtatgcatgtgtaggtcagggagtggctcggatcagccttgagtcaatttccactgcgttttcttcggttatggatgagcacgaggagtaaaagaaacagaagaaggctgagtgtgattctcatatgcttattttcttgtcctgtgtaatggatgtgtgtatgtgaaccatatgcgaacttaaacgtctttgtttgtaccggtcaggccattctgagtgagggttccgtctcttctttttaggactccactgcgaggtgtcggtgtgtgagaaatggtgcaaacgtgtgtatgaaactctacgaggcatactcttatctagtattgtgtctagtgaagaatgggacacatccgatgctactgtaaactcacttgttgcactcactttttgagttggatttttctttcaaacttttttgtatgctctcttgagtttatctaacactagatttcataagtgtgcaccattgtccataactagactcacttaggtaaagctatccattccatgtcctctttataatgtgacataaataaggattttatcact

SEQ ID NO: 18716 - DNA, 1980 bp, Zea Mays
attttgagaaaggaagttggagtgtgctttgaagttgtgcgcaaggtttggcgtgtaaatgataaagacaaggttcaactctcaccctctgaccaatccaaattttacaccggcgattgctacatatttcagtatacttatcctggagatgataaggaggaatgtcttattggaacctggtttgggaaaaagagtattgaggaggatagggtaatagcagtttcacttgcaagtaagatggttgaatctgctaagtttcaggctgtccaggcgcgcttttatgaggggaaagaaccgatccagttctttgtgatatttcaaagcttccaagtgtttaagggtggtcttagttctggatacaagagatttatcgctgaaaatggcatcgatgatgaaagttattctgaagatgggcttgcactctttcgtattcaaggttcaggaccagaaaacatgcaggcgattcaagttgaacctgtggcctcatcattgaattcatcatattgttacattctacataatggaaacactgtgttcacttgggctggaaatctgaccactgcattggaccaagagttaatggaaaggcagcttgatgttattaaggtcaaagaaatacaccactttactcaagatgatctaatgacagaagatgttttcattctggactgtcacacgagcatatttgtttgggttggtcagcaggtggatgttaaaggcaggttacaagctctggatgctggggagaaatttattgtgcttgattttcttatggaaaaccttgcccgtgaaacaccagttttcaccgttatggaggggaatgagcctccctttttcactagattcttcacctgggactccgcaaaatcactgatgcatggcaattcataccagaggaagctcgccattgtaaaaggtggaggtgctccagcattggataaaccgaaacgacgaacaaccgtctattcaggaaggagtactacacaagataaatcccaacgctccagaagcatgtccttcagccctgaacgtgtgcgtgttaggggaagatctccagcattcactgcattggctgctaattttgaaagttcaagcaacagaaatctttccactcctccacctgtagttaagaaactttacccgaaatctgttacacctgatccgtcgaatactgcttctaagtcacctgcaattgctgctctggctggttctttggatcacccttctcaaactcctgctctagaattcatgaaaggtggctccgagtcagagaagccaaaacaggagggagatggtaaagaaggtgttgatactgtggccacaagagttgaatctctgactataaatgaagatgtaaaagaaaacgagccagaagatgacgagggccttccgatttacctgtatgaacgtctgaagaccacagctgctgatcctgttactgaaattgatgtcacgaggcgagagacctacttatcttcaactgagttcaaagagaagtttgggatgacaaaggaagcatttagcaagcttccgaagtggaagcagaacaggctaaaaattgctcttcaacttttttagcctgatcatcaacacttccaatgtaatcaccatctgcaatgccacatcaattttcacattgtcctggatcggtctcctttttcctagtttggatttgttttgctagctaagtagctctcttattcttccagttcataggtgtgctattccctttttcctttttttgtcaagtgctcttcattgattcaaggtcacacaggtttgattctgaggcttgatttttttgtgtatcaactctgcctgctgtgttctttttttgtttttgagatgagttgcggtttgagggagcgataagtatgtacagcagagtgccggcactgtaacatcacaataccgttatctttgatcaatataattattttttgtgtgtaacttaatattgtttttccagaggatttaagg

SEQ ID NO: 18717 - DNA, 597 bp, Zea Mays
tagagatgacttcagccagtgaagcatcttgtaaggtgaactgcatctgaataagctgcttatggtcttatgcctgttcgtgctggagttatctgatgggtcacttcacagcaaaggaggggtggcatttgttacttgaattgtagtattgctcggttgtgttgcgtcaggaaatgccaaatttgttggttgttgctgcgtctgaagatgtgcacggttgttgaggagagcttgaaaatattggtctggttgggctgataaagttaagagtattttttaagtacaccttgttagtgaatccggttggtgtcggtctactctgctgaagaccaagcggcttcattgccgcagcttgtatcttttggaatccgttgaaatgtgcgtgcggtttgactactttcagcttaaatgagcgtgcccaacatggatttttcggttacctgcaagaaaagccaacagaataatccgcccgtcgtttccccccgggtgatagaaaatttatttcatggttaaaagtttcaaagaacaatgttctattctgtgatgtggaatgaactacattctatcttaccggagctagaaacgaatcaaaacctt

SEQ ID NO: 18718 - DNA, 672 bp, Zea Mays
ccgtgggctggatccgacggcaaaggcaagcatcccccggccgccgccattccaaccatccgagcatcctgctcagctcagggcgaaacaaaaccctcctccctcactgccccctcgcagacgagacgcgtggtagctagggttttggcctcgccgcgcacgcctcctgaagcttctagacgttcgaggaggaggaggggaggctcccgccgccgccgccgcagccatggcgtccaccaaggtgcagcgtatcatgacccagcccatcaacctcatcttccgtttcctccagagcaaagcgcgcatccagatctggctcttcgagcagaaggacctccggattgagggtcgcatcatcggattcgatgagtacatgaacttggtcctcgaagatgctgaggaaatcaacgtcaagaaaaacactaggaagacactgggccggatactcctcaaaggtgacaacataactttgatgatgaacagtggcaagtgaaagttcttatggcaggaacgatgtttggtgctcgcgttgagtatttctgcttgacctgaagttttgctctgccctctactctccgcgctaacttggcgggatcaaatcaacatgagatgtgctgaattatcaatgccgcttggttcaaggcgagcgaccctgtcaatgcgttttggcat

SEQ ID NO: 18719 - DNA, 829 bp, Zea Mays
ctattggctcacttaaatgagattctaccaaaactctgcaaagcgaaatcaaacaagggtacctcgcccagaagcacgcgctgctagtggcgaagaacctgaagctactgaccaagggtctccctaacagcaaactggcgacttacagcaccggctatccgctggcgctcgtctctcttggaaggaaggaagggctggctcagtttccattgctgacgctcagcgggtgcttgccaggcatgatcaaatccggggatctattcgtcagcaagacgaggaagcagatgggcctgaatggttgactccagtccgaggaagcttgaaaaaatagctcgggtcctgggttatatacagacgatggattcctttacacacagcttgtgttttgctcgtatggccatatgtgttcgttctgtatctgtacgtgtgatggtgtcgtcgtgtggatgcttggaatggtgactagcagagtgtatgctacgtacatgtatacatggacctttttggtccaacaaaatgttgcttctgtagtatgtatgggcgcattttgtttgctggcaagtaaacaatgaaatcatctttgcttgctggcaacacgatgtcagcagtggcaatttgatgcctatgggccggcctatggatggagaagatatatgtgcatctggacatctggtcctatggggctatgggcgcctggagcagccgtgcaagtctgggactgcacgagtgtccagtgcccatccattgcaatctgttcccgtgcttgggcttgcactgttctccctgtacggagtagtattcacggttaatgtctgcaaaaaaaaaaaaa

SEQ ID NO: 18720 - DNA, 6359 bp, Zea Mays
ccttaacacgagaggtaggaggtaggtgcaagctaagacagccccgcctaaaacccatcaggccgcctgcccgtgcgctcactactcactagggttttgaatcccttccgtaccctcccttccgccgactcctagggttccgaccgccgaccgggtttgttctccggcgatggcaccgcttccgccgcgcgagctcctctctgtcatcgaggcggcgctgctgggctccacggcgccatcgccggcgcagcgcgtggagctcctccacgccgtccgcgatgctgcccccgcgttccgcacgttactctcctatccggtgccgaaggcgtcggatcggactcaggtggagagcaaggaagtgcggctaccgggcatgcctcccatcactcttgatgacacagacgtgcggaccgcgcttaagctgagtgatgaactcaatcttaatgagattgagtgtgttcgtttgctagttgatgctaacagagagtgggttctctatgggcgagagccattggaaatatatagactcgcagctggcctttggtacatggagagaagggatcttataaccgctctgtacattctgttgcgatctgttgcacttgaccaaggtcttgatgccgatctgatgtctgaaatcgaggatcaaatccaacctttattcaatgatggtctccgacaacggataattactcttgtaaaggagctgaacagggaagaaccagctggaattggcagtccaagctctgagcgttatgtgcttgatttcagaggggctcttgtggaaagaagggcaattgtctcgagagagagattaagtttgagccactgccttgccctttctgcacttattaaactaacgagccccaaagaggttaaggatgtattttcaatattgaaagactgtgcagctgaagcaaatcaaaatagcagtgtggagctccagatcacctatggacttctgttctttcttgtagcaacttttatttctgatgccctaagtacttctcttgagaaagcatcattgtcatcgtctgattcctcatttagacgtgaatttcatgaacttgtgatgaggacaggtaacaatatgactattgaagggtttgttggtgttgtgcggcttgcatggtctgttcatttgatgctaactcaagatcgaagtaattcaagagaaacgtcagatatttggtcatgcctggaaattatctgtcgtcaaaattcttttgagtttttgcgggagcaagttttgaaaacagctgcataccagaatgatgatgaggacattgtctacatgtacactggctacactcacaagctaatgatgtgctttatttcccacccaacttccagagataagataaaggaaatcaaggagaaagcaatgactgccctcagtccatatgagccaccacgaggtcaacgagaagatcttggtagaaatggggaacaagctgatcagcctactaaggagccttttgtatccctgctggaactggttagagaaatctatcagaaagtgcctgagctagggaatggaaatgaggaattgtggacttttgttatatatgcaggagaagaccacacaaacacacaaactcttgtggcctttcttggacttcttagtactttggcttccactgaagttggtgctgccaaagtctatgagctgctccagggaaaaacttaccgttcagttggttggagcactttgtttgattgcttatctatctatgaggagaagttcaaaaaatcaattcaatcttctgcaaacatactgcctgattttcctgagggggatgcacaagcgcttgttgcatatttagctgttcttcagaaggtggtggaaaatgggaatcttacggaacgcaggaagtggttccctgacattgaacctttattcaagcttctcagctatgaaaatgtgcctccatacttgaagggggctttgcgaaattcaataactgcatttataaaagtgtcacccatactaaaggatgcaatttggaattatcttgagcaatatgatcttccggtggttacagctccattaggtcaccatacagcaacacaggtctatgatatgaggtttgagttgaatgaagtagaagcgagaagggagagttacccctcgaccatatctttcctcaaattgatcaatgcacttattgtggaagaaagaaacataagtgacaaaggccggaggttcatgggtatctttaagtttgtttatgaggatgtctttggtccttttcctcaaagagcttatgctgaccccctggaaaaatgggagcttgctcttgcttgcttggagcattttcgcatggttttgagcatgtatgatataaaggatgatgatatttatgcttctgtgaacacattagctccttcctctcttgagagacaactccctctgctagaactactcaaagatttcatgagtgggaaagttgctttccggaatattatgaacatcatattagtgggtgttgactctattatcaatgagcgaactacccaaacatacggtatcattttggagagaactgtccttctatctcttgaaatatttattcttgtcatggagagagatcttgctcttgctgatgtttttcggccgctctaccagccattggatgttatattggctcaaagtcatagacagattgtagcattgctagagtttgtacgatatgattatcttccccaaattcaacagtgttctatcaaaattatgggcatcctaagttctagaatagttggtttggtacagttgcttttgaaagctgatgttggaaaaatggtaatagaagattatgctgcttgcttggagttccggtttgatgattttcaggtcatagaagacacgaaagatgatgttggggttctaacactgcagttgcttgttgacaatatttgtcgtccagctccaaacattacacatttgctcttgggattcgatgtcaatgggtccattgagcaaacagttctaaaaccaaaatctcaatacagttgtttgaagataatcttggacaatcttgaaaaagcgacaaagccggatataaattccttactgcacgaattcagttttcagcttctctatgagttatgtcttgatcctttaacttgcggacctgttatggatctcttgagtacaaagaagtaccagttcttttctaagcatgttggaaccattggagtgacaccgcttccaaaaaggaacagtaaccaatctcttcgaatcagcatgctccatgagagggcatggttgctaaagatgttagcactggcattacatatatccgatatatcatcatctgtatacagggaagcctgcatggctattctttatcatacttttggtcagtgtgctgagaacttccagagcacaagcttgatccattcacatgatgctttgactagcattagcgatgtaccagcaaagaggaacaaggttttggacttgcttgaggttctacagtttagatgtccggatacttcaacgaagtatccacagctgctttccagcttgggaatcgaatcgaagattgaagagatcctaaggaactctgccactttcgaaaatggtggtgtatattattattcagagagaggtgaccgactgattgatcttgatgctttccgtgaaaaacttctccagatttcacaagaattgaactcacaattaaccgagcctgagaaagctggactaaaagaatcagttcatcatttgctcaaatgggcgtggcgatataacaaaaatcttgaagagcaggctgcccaacttcacatgttgactggctggtcacagattgttgaggttgctgtatcaagaaggatgtcattattcgaggactgttctcagctattgtttgaactgcttgatgcttcgttgaatgccacaacatctccagattgttcagtgaaaatggcatatgttttaactaatgtatcgttgacctgtatggcgaaactgcgggatgaaagattcatatgcccagctggtacagattctgatgcggttacttgccttgacattatttcgtcaaagcagctaccaaatgcagcttgtaactcattgttattcaagcttgtgatggcaacattaagaaatgaatcatctgaaatcttgagaagacggcaatatgcattattactgagttattttcagtattgtagcagcattctggactctgatgtccctccatctgttcttcggttcttgctactggaggagcaagatggtgatgatgaggacatcactcttcaaaaggttctcaaggagcacaatgaattagcacatgccaacttttccatcataaggaaggaagctcaagctatcgttgatttggttactaaggatgctttccatggtagtgaagctgggaaagcactttccttttatgttcttgatgcattaattagtattgaccatgaaaagtattttctaaatcaacttcaaagtcgagggatccttagatcatgcctgagtgatgttgcaaactatttgtcaaaggtgaagaacaagattgtacgagagatagtggacttcgcaaagcagcatcagtcagtttttaatagcattttaagggagaacatgactggaactaatttgctcacgttggagcagcttagcatggcggtttctattctcagcaaggtttgggcgtatgaggaaaatgaggaatgcagctacattcaagatctattttccttgatgcattctctttttagcgttgactttgggattctaaattttatgcaatcaccaaacatgattgagaatcagaagtcagaattgatagcatttggtctttgcttcagccttgtctcttacctttatgttctcgctacaaggaaaaacatgcgatttcaagtttcatatggccgtaacagtgatcagcagcacccaacactacaaatggtttctgatcttctgaattcagcaacacttgccctagaaagagttggtgaagaaaaatatatgcttttaaacaagatccgtgacttaaatgagttgtccagaaaggaggttgatgagataataaaagtgtgcatgaagcaagattgcatatctcctaacgataacatccgtaaaaggaggtacattgcaatgatagatttgtgttgcatggctggcaaccgagaccaactcattacccttctactccaaataacggaatgtgccgttactattctcctcattcattttcaggacgatgcttctgcaaaaggtctttcttcattttctgatgaactccttcctgtgctggagagactagagcatttgaaagaggacaaagttggacgtagtctgaagttgttccacagatccattactacactaaaggagatgaccatcagaaccataaccatctgaaggccgcagcctgtacaatgtacatgtttattaggatagtacacctcgctagatttgcagatgtaaaacattgttgtgtaagctctcatatatatatatacacacttttgccctgaggcaatgagctgtatgtcatgttttaagagtaaaatgtgatttttgaggggtttccatctaggaacattaacatttaaactgtatttttttggcctataaactttcactggagatattactttttttgttttgcccttagatgtctataggacacaaagcagggagaaaaggatatctataggatggccaagattcgtgaaaggaagacaagggatgtcaaccaagtcaaatgcatcaaggacgaagcaaaccaactattagtgaagagtgaagagatcaagaacagatggaaggagtacttcaacaaattgttcaatggagggaatgagagtgctacaatagaattggacgaaccattcgatgacaacaacaggggttttgtacgaaggatacaagaatatgaagttaaggaggcgctaaaaaggatgaaggtaggaaaggcgatgggccctgatggtatccctatcgaggtatggagatgtcttggagacatagtgatagtatggctgactaagcttttcaacaccatctttcgggcaaacagaatgcccgacgagtggcggcggagtacattagtaccaatcttcaagaacaaaggagatgttcaaagttgtactaattaccgtggaattaagctcatgagccatacaatgaagctatgggagagagtcattgaacaccgcctgcgaaagatgacgagcgtgacccaaaatcagtttggtttcatgcccgggagatcaactatggaggccattttcttactaagacaacttatggagagattcagagaacaaaagaaagacctgcatatggtcttcatagacttggagaaggcttatgacaaagtacctaggagtgtaat

SEQ ID NO: 18721 - DNA, 2393 bp, Zea Mays
atctctctctctctctgtctcccaccacctatcttccctccccatgtgggcggcctcgagctctgcttaggtctcacagctgtgctctcgttggttgggtgatccgccccttgtcggctcctttcaactcgagagctccgggacagcgagatctgcgctgtcgccgccttacctttcttacgagctcgcgtgcaggcaggcactgagcagtgagctcccccccgtcttcctcagcctcgtttcccctctcgttgctggatctggctcgcaagatccaatctttcgtgccccctttttccaaagatcctcgcttgggtggttcttcctggagattgctgggaggatgcagcacgaccagaagaagaaggcaccttcagagatggattttttcacagagtatggcgaaggcagcaggtacaagatagaagaggtcataggcaaaggcagctacggcgtggtttgctctgccgtggacactcatactggcgaaaaggtcgctataaagaagataaacgacatcttcgagcatgtgtctgatgcgacgcggatactccgggagatcaagctgcttaggctcctgcggcatccggatattgtggaaataaagcatatcttgctccctccgtcgaggagggagttcagggatatatatgttgtctttgaactcatggagtctgatctgcaccaagttataaaggctaacgatgacttgaccccagagcattaccagtttttcttgtatcaattgcttcgaggattgaaatacatacatacagtatacaccggcgatagatatatggagtattggctgtatatttgcagaattgttaactggaaaacctcttttcccggggaaaaatgtggtacatcaacttgatataattacagatctccttggaacaccttctcccgaagcaatatcaaggattcgtaatgaaaaggccaggcgctacttgagcagtatgaggcgaaaaaagcctataccgtttacgcaaaagttcccaaatgcagatccacttgcactatgtttgttagagcgaatgctcgcttttgagccaaaagacaggccaagtgctgaagaggctcttgctgatccttatttcaagaatatagccagtgtggatagagagccttctgcacaggctgtcacaaagcttgaatttgaattcgagaggcggagagttacaaaggaagacataagggagcttatatatagggaaattcttgagtatcatccaaagatgctgagggagtttcttgagggaactgagtcaagtggtttcatgtacccaagtgcagtagatcattttaaaaagcagtttgcataccttgaagaacattatgccaagggatctacaggaactccacctgagaggcaacataattcattgccgcggccgtctgttgtctattccgacaaccgatcacaaaccacagccaacatcaccgaggatctttccaagtgtatgctcagagaaaatacacagaagacacatccatattctgcttctgttgcaagtaaatttccaccacatgttcctcaaggtgatgttgcaaggcctggtaaagcagttggttcggtgatgcagtacagcccatgtccagcgcctgctgccgagcgatatgagcaacgaagaatcgctaggcacccagcagttgccccaaacaatatcccttctggaagctcataccccagaagaagccagacctgcaagagtgagacaggtgatgccgaaagccatatggatgcgaaccaagctcggcagccaaagccatatgcagcgaacaaactacctgctaccgttgatagtcgtggtggtcactggtaggatttctgcggtgcaccagaaagccattccaaaccgtttcttaacatgttatcagtatcgattacttctgctgagtgctacattattctgacaaatccagaaatgtagttctgtacagatttgtgttctttttccggatacctgaataccgaaagactgtacaactgtagtttctgattcctactccttgtcgctattcaatcgctaaaggatctgtccctggtggagaagaaccggcagattcaatgcaatgttcttgactgacgtcatggattttgttcttcaacctggtagctctgaagacgaattgaatagctgctagtttctgctaatcatctacagtcaggtgcagagtgttctgggagctagttctgaatatcactgtcacgctgtaatctgcacgtttctgagctcctaacttctaagcatgccactaccgtatccctttgtaatttaatcagctgtaccatccagtactctgtttacatttgtagaaacgctctgcaaagaagctattatgtgggagtttctttgctattattataaatgttctgttgttataaa

SEQ ID NO: 18722 - DNA, 1498 bp, Zea Mays
ggtgcaagctttctagttacattttgcatcacgtgggacagttgctgtatagaactttagctggaagctttgctcgagtcattgttgctgataactttttcactggttcaaaagacaacctgaagaagtggattggccacccaagatttgagctcatccgtcatgatgtcaccgagccgcttcttgtggaagttgaccaaatctatcaccttgcttgccctgcttcaccaatcttctacaagcacaaccctgttaagaccatcaagacaaatgttattggtaccctgaacatgctaggacttgcaaagagagttggagctaggattttgttgacatcaacctctgaagtttatggtgatccacttgagcatcctcaaactgaggcctactggggcaatgttaacccgattggtgttaggagttgttatgatgagggtaagcgtgtagcagagacgctgatgttcgactatcacaggcagcatggcattgaaatccggattgccaggattttcaacacctatgggcctaggatgaacattgatgatggccgtgttgttagcaacttcattgctcaggctgtgcgcggtgagcccctgactgtccagaggccaggaacacagactaggagtttctgctatgttgccgatatggttgatggtcttattaagctgatgaatggaaacaagactggaccgattaacttggggaacccaggtgaattcaccatgctggaacttgctgagaatgtgaaggagttgatcaacccagatgtgacagtgacgatgaccgagaacactcctgatgatccccgccagaggaagccggacatcacaaaggcgaaggaagttctgggatgggagcccaagatcgtcctgcgggacggcttggtgctcatggaggatgatttccgggagcgcctgaccgtgcccaagaaaaccaaggcctaaattgccctgcagttggggaagaatatccacacggggaagcatactcatagtcgggctcgtcattatttgtggccacatttcattacggaatttgagttccaataaacttaatattcctttgtcgttcaccttgaaggattgtattattagaattttcatacagggctggccattcgagtctctgcctacgcagatcttgtggtacttgtgtttgtagccaatgtgtgagtaaaagtcgattatagcaatgttgatgccattttgggcttattgttcgctcctttttgctgcttgagctgagacaagtctcgatccaatgagagcggtactgactgtgtggaggcgccatttcccatttggtatcgatcggtctggtcctaataatggcctgtcgacctgctgaccgatcgggcgttggatggttggtaccagcatgaaccgttaccagtcagatttaaccacgtggattgttcatacatgtgtcacgttagctgtctgtttccaaaccatttgaagtctaaaagattcaaagaaaataaaaaaactaaaaa

SEQ ID NO: 18723 - DNA, 117 bp, Zea Mays
ccctaccctactaccttacctgttgccctatcatttttcactattattttaaatcaaacttatatgttttgtaaatggtgagattcgaactcgcgacctctgtctcgcgcataccct

SEQ ID NO: 18724 - DNA, 1801 bp, Zea Mays
tgaagctagaatattatgaggtttatttgctggtggagatctacccactgagaatatatctatctgaagcaatgtatagaatgatgtgggattacttcttccctgaagaagacgattcacaacgaagacagtttggagagtttcaacatcaaccgggcctagaagaacaagaaggctctcttctggtgtcgatgctgttacttctagcagctattctgtcagagatcatgaacttcctgggaaatcaagtacaactgtatctacatcaacaaatgtttcaagttggcaaggtatactcagcgataactcacaggtgtcaaagtttcagagtataaaagcaaatatggtatgtggttcgcatcaagagttgcaccggtcgtcttcatttgaaaggaattgggaagaaagcgctgcagaaagtgttgcaagtaatgatgtggtatcactcctgaattcttcaattgtttcttcaaaagtagatgctagcaattctgtcttagagaaccctgttgtgggaagtgagatgtggagaagtaaaacgaaagattctaagcctgccaagtctggacgtctatctcacgaagaaaagaagcttgggaagtctaatgatgaaaagaagacaaaacctcggaagtcaatggaatttcataacatcaagattggcaaggttgaacttcttgttacatacgagggatcaaggcttgctattaatgacctaaggttgcttatggatactttccacaaggcagaatttactggtacatggaggcgactattctctagagtcaaaaaacatatcatctggggagttttgaagtcggtaaccggaatgcaggggaagaagtttagcaaccatagggaaacacttgagggttctattcctgaaaatgatcttaacttgagtgacagtgatgttggtcaacctggaagacatgatcaattaacagcttcatggttgaagaggccaggcgatggtgcaggtgatggatttgtcacgtcaattagggggcttttcaatacacagcgccgtaaagcgaaggcctttgtgattcggacaatgcgcggtgaagggcataatgacgaatatcaagacgaatggagcgagagcgatggtgaatacccttttgcgaggcagcttacaattacaaaggccaagaagctcatacgaaggaagttccgtccaagggtgcaaaagaacccaggtctgtcgatgcaagattcactcccatctagtccgcgggaaacaactccatatcaaagtgactcctccaggtcatcttacgaggacttccatgagcagtaaaacaatctggtgatgctgctttcagcttctacatttggtcgataagatgcagccatttatattggttatagtagggtgtatgtatatagtaggatgtaccatcaaaatccaatgtatcatgtatagtggttaggcaatactccgtaattatgtgcttgtaagttaataagaggccagctcgtactcctagaaaacaaaacccgtgatctatggcatggggcattctcattcccttgtacttcaggactagtatggattgtaaattcaacggtgaaggtgttgcaacatttattcagtaaagtatccttgttgaagaatttgtaaaaactatggcagaaacaatagggaaggagcaagtgactaggtgcctaggtgtattatgattcttttgctgactagttggaagttagaaatgcattgctccacgtcaaaaagaaatgcgtggcagacaaggttgttgcttaacagatcggtgagctatgaaatgctatctgttca

SEQ ID NO: 18725 - DNA, 1480 bp, Zea Mays
gttaccccaggagaaaggttgcgtgagcggtttcttgtttcacattagtgaggtgctgcagagtgaattccttaatcagtcaaggaatagcctggaagaacgtgaagcggcacttaggttacgcgaagagatagaagaacaagaattattgctggattttcttcagcagttgcagaaaagaaagcaagatatggcagacagtttgcaggacactgttgctttttctctcttctgacatcaatgaggtactccaccagcagtctgcacttggccactgtgtgaacttctcaccagatttggataaagaggtgtgctctggaactgttgaagatcagagtgattgtggatccaggaagcgttttagacctgagctgcaaggcgttgatatggaggaaaataatcgtagtgtggaagaatgttcaagaacagtgccgtcctctgagttaatccaggaaaatgttctgtcaaaaagctccaggttgatgaagaacttaaaaaaacttgaaacagcttattttctaacaaggtccaagttggcgaagcaagttggcaaccagataaatagttgtaatcgagttgttaagaggactactggttcagctgttgggacagaagcaagttcaatagatgatttttctttggaaaggcaatatggtagaaggcaaagaggttgggtgaactcttttcttgagggattgtgcaagtacttgtcattcagtaagttgaaagttcgggcagaattgaagcattgtgattcactgaactcatcaaacttagtatgctccgtagggtttgaccgagatagagagttttttgcaactgctggtgtaaataagaagataaaagtgtttgagtataatatgattgtaaatgaacaccgtgatattcactatcctgtggtagagatgtctaatagatcaaaactgagttgtatttcctggaacagttatatgaagagccatatagcatctagtgattttgagggtatagtgcaggtttgggatgttactaggagtcaagtttttgttgagatgagggagcatgagcgacgtgtgtggtcggtggacttctcaattgtggacccaacaaaattggtcagtgggagtgatgatggatctgtgaagctgtgggatatgaatcaggctgggagtattggcactattaaaacaagggcaaatgtgtgttctgtgcaatttcaacctgatactgctcgctccattgccatcggctctgcagaccacaaaatttactgctatgatctacgtcacatacgagctccttattgtacactagttgggcacacaaagactgtaagctatgttaagtatctggatgcatcgacaatagtatctgcatctactgacaactcattgaagctttgggacttatcgatgagtccaggaaggataattgacagtccagttcaaacatttaaggggcatacaaatacaaagggtacggttggttacttcacttgctt

SEQ ID NO: 18726 - DNA, 1575 bp, Zea Mays
ctttcgcgggttttcattgccgcgcctagatttggttccgtgcgtgaggagcactggttcagcccatttcggccgcgccttcccctccgtcgcggtctcctctttggctgcgaggcacatcgagccgatgagagcgatagctacacaggcgccccctgccgtgccacaatatttgagtggcgagaagacaaagatcggcatcaacggctttgggcggattggcaggttggtcctgcgaattgcaactagcagagacgatattgaagttgtggctgtgaatgaccctttcgttgatgctaagtacatggcctatatgttcaagtatgactctactcatggcccgtttaaaggttctatttgtgttgtggatgattcaaccctggagatcaatgggaagaaggtcacaattacaagcaaaagagatcctgcagagattccatggggtaactttggggctgaatatgttgttgaatcttctggtgtctttacaacgactgataaagcatcagcacacttaaagggtggtgctaagaaagtggtgatatctgcaccatcagcagatgctcccatgtttgtagttggagttaatgagaatagctatgattcgaagatgaatgttgtttctaatgcaagttgcaccaccaactgccttgctccacttgccaaggttgtacatgaggaatttggcatcgtggagggccttatgacaactgttcatgccacaacagccacccagaagaccgttgatggtccttcaatgaaggattggagaggaggacgtggtgctggccaaaacataattcctagctccactggtgcagcaaaggctgttggaaaagttctgcctgagctgaatggaaagctcactggcatggccttccgagttccaacaccaaatgtctctgttgtggacttgacatgccggattgagaaaaacgcctcctatgatgatgtgaaagcagccatcaaggcggcatcagagggtgcactcaaaggtattcttggctacacagacgaggacgttgtttccaatgattttgttggtgattctaggtcaagcatctttgatgccaaggctggtatcggactgagctcttctttcatgaagcttgtgtcttggtatgacaacgagtggggctacagcaaccgggttctggatctgatcgcccacatggctctcgtcagtgccgccgccaagctctgatgtccgtactcgtttctccagtagtagcttagaaaaaaagactgcaattttgacggccattttctgttagctgttgtttggaataagatcaaatgctggaacacttcgaactcgcgcgagactggactcagatccatggcctgtattttagttgtagaagtgggcaaatttgcaccgtagtaccctggcatggttatatgcggaattgttgattgatgagtcgttgtacggtttgtcgacttgatgatatgttgatgtgggagcccctgaatgaggcggtattaatggaaatataggatggcaatggcaatccgtcgacttgcaccctatttttctttgtttgcacaaatctgtctgttgctcgaaagtcg

SEQ ID NO: 18727 - DNA, 3439 bp, Zea Mays
ctgcaccattcccctgcttgctgtttggtggatgcaggagccaagttgcagcttctatgcaaaaggatgttgacggacatgttccaagctacccaaatcttccgtcgaagttgatttgccttctgcacaatgtcactttacatgcggatccagaaacagatgaagtgtatgcacaaatgactcttttgccagttacttcatatggaaaggaggcgctgcaactatcggaactagcgctgaaacaaccaaggcctcaaacagagttcttctgtaagacactaactgcaagtgacacaagcactcatggaggcttctccgtgcctcgtcgagcagctgagaagatatttccaccccttgatttctccatgcaaccgcccgctcaagagatccaagccagagatttacatgataatgtgtggacattccgccacatatatcgaggtcagccaaaaagacatctgcttaccactggctggagtctttttgtgagcggaaagagattacttgctggtgattctgtcatttttgttagggatgaaaaacagcaacttctccttggaaccaggcgtgctaatagacagccaactaacatatcatcatctgtcctttcaagtgacagcatgcatataggaattcttgctgctgcagcccatgccgctgccaacaatagcccattcaccatattttataatcctagggccagtcctacagagtttgttgtcccgtttgctaagtatcagaaggcactctatggtaatcaaatatctttaggaatgcgcttccgcatgatgtttgaaactgaagaattaggcacaagaaggtacatgggtacaataactggtataagtgatctagatccagtaagatggaaaaactcacaatggcgcaacatacaggtcggctgggatgagtctgcagcaggcgaaaggcggaacagggtttcaatctgggaaatcgaaccggttgctgctccttttttcatatgccctccaccattttttggttcaaaacgtcccagacaattagatgacgagtcctcagaaatggagaatcttttaaagagggcaatgccatggcttggtgaggagatatgcataaaggatccacagacgcagaacaccataatgcctggtctgagcttggttcagtggatgaacatgaatatgcagcagaactcatttgcaaactcggctatgcagtccgagtacctacgatcgctaagcaaccccaacatgcaaaatcttggcgtggctgatctctcaaggcagttaaaccttcagaaccagattctgcaacagaacagcattcagtttagttctcctaaactgcctcaacaaatgcagctggccaatgagttgtcaaaggcatctcttccactgaatcagattggtgtgggcaccaaacctcaagaacagactcaagacccaaacaatctgcagaggcaacaacagtccatgaaccaactacttccattgagccaatctcaaaccaatcttgtccaggctcaggtccttatccagaatcaaatgcagcagcaaaagcaaccaacatccatggctcaaaatcagcagccagctgccagccagtcactgatcctgccccagcagcagcaacaacagcaacaacatcaacaacaaaagttggtacatcaacagcagcagattttactgcagcagcaacaattgcagcaacagcaacaattgcagcaacagcaacaaaatcagcaacagctaaataagatggctgcacaaatgccaaatctggcatcacatcagccgcaactgtctgatcagcagcttcaactgcaactgttacaaaaactgcaacagcagcagcagtcgttgctatcacaaccagctgttactcttgcacaattacccctaatccaagagcagcaaaagttgattattgatatgcagcagcagttgtcaaattctcaaccactttcccagcaacaaacaatgccccaacaaagtattcaagttccatcacgggcaacaccaccaccaacaacaaccgtgcaacaagagtcacagcaaaagcttccacaaaagcatgttgggttcactgacacatcacataccaccattcctccgactacatcagtcaacaccatttcagttgtaggaagtcctctgatggcaactggtgccacacattctgtagttactgatgaaattccttcctgctcaacatcaccttcaacagctaatggcaaccatattgtgcaaccagtcctcggaaggaaccaactatgcagcatgatcaactatgagaaggtgcctcagtctactcctatgtcgatcccaagctccctggaagctgtcacagcaacgccaagatcaatcaaggaattgcctaagttgaattctaatgtcaagcaaagtgtaatggcttcaaagctaccaaatgcagggcatgtagctcaaaatttgactaacaatgcacccccgacggactatccggaaacagcttcatcagcaacttcagtgtggctttcccaagcggacgggcttctacatcatagtttccccatgtctaactttaatcagcagcagcagatgttcaaagctgcggctcctgagactgatattcagggtgcagatcccagtaataacacactctttggaataaacggtgatggtcagctgggctttcccatgggagcagatgatttcttatcaaatggaattgatgcttccaagtatcagggtcatatttcaacagatattgatggtaactacaggatctcaaaggatggccagcaagaaatatcgtcatccatggtttcacagtcgtttggtgcatcagatatggcattcaattcaattgactctggtatgaatgatggtggtttcgtgaacagaacctcttggcctcctgctcctcccttaaagaggatgaggacatttaccaaggtgtacaaacgtggagctgtaggtcggtccattgacattagtcagttcagtggatacgatgagttgaagcatgctctggctcgcatgtttagtatggaggggcaacttgaggaacgacagagaattggctggaaacttgtctacaaggatcatgaggatgacatcctacttcttggtgatgacccttgggaggaatttgtcaactgtgtgaagtgcattaggatcctgtcgcctcaggaagtgcagcagattagcttggatggggatctggggaacaacattctccccaaccaggcctgcagcagctccgacggcggcaatgcctggagagctcgctgcgatcagaactccggaacacatatttagcgctgaggaagtttactcgacaagttcgttttcctgctgctactatggtaggcgcatttgtgggcctcgtatatcagcaccaacattgtcagaaggcaacgactcaacagataagataaagttttccttaaaaaccttcccaagttaaattattt

SEQ ID NO: 18728 - DNA, 2888 bp, Zea Mays
tctgaattgaaaatcacaccttttaaagtcaagtaaagtaatactggctgtctatatgaattgattaacacactcaataagtttatctatacattgtgttatagagatgaagatgctttattgaaaaccaaatgtccgaagcatgtggagctgagatggcagactgaagttagttccagcatttatgcaactcctttgatcgctgatatcaacagtgatggaaaattggaagtagtggtgccatcatttgttcattacttagaagttcttgaaggcactgatggagacaaactgccaggatggcctgcatttcatcagtcaaatgttcattcaagtcctcttctgtatgacattgacaaggatggtgtacgggaaatagctttggctacttacaacggtgttgtaaatttctttagggtgtcaggttatatgatgatggacaagcttgaggtacctcgtagaaaagtacgtaaagattggtatgttgggctaaatccagatccagttgaccgctcccatccagatgttaatgacagttcaattgccaaagtggctacttctaatgaaactcccctaatagatcagaataaatcaggaagtatgaagggaggtgaggccctgaaaaattcatccgagcaacactcagctgaaacaaaacttaattctacgcaagtgcaagagaatgtacagttgccaaacaatgtaaacgacactcattctgagagcatctctagtgtcactactaaagcagagaatacatcgcaaacacatactcagagacgcttgcttgaaacagccgacaagagtgatgatcaaacaggaagctcagaaactcatgaaagtgattcgggggcaaaagcagcagccactgttgaaaatagtgaacccctagacgaagatgcagatgcatcatttgacttgtttcgggacccagaagatcttcctgatgagtacaattatgattatgatgactatgttgatgatcgcttgtggggagatgaggattggaaagagcaagaacatgagaaagaggaagattatgtgagcatagatgcccacatcttgtccaccccagtaattgcagatattgacaaagatggtgtacaagaaatggtgattgctgtatcatacttctttgatcatgaatattatcgtgattcagatcatgcgaaagaactagaaggaattgacatgggaaaatatgtcgcgagcagtatagttgtttttaaccttgacacccggcaagttaaatgggctgcagatcttgatttgagcacggatgctgtaaatttccgtgctcatgtgttttcctctccaactgtggttgatttggatggtgatggatatttggacatccttattgggactgcttatggcttgttttatgttattgatcatcgtggtaaggttaggaacaaattcccccttgagatggctgagattcacgcaccagtcattgctgcggacatcaatgatgatggcaaaatcgagatggttaccactgattcccatggaaatgtagcagcatggactgcagagggagaagaaatctgggaagtgcatctaaagagtctgattccacagagacctactgttggtgatgtcaatggagatggccacactgatgttgtggtcccaactgtgtcaggaaacatctatgttcttagtggaaaggatgggtcaaaaatccaacctttcccatatagaacacatggaagaatcatgagtcctgttctacttctcgacatgagcaaacatggagacaatgcaaaagggctaactcttgcaacaacgtcctttgatggttatttatatttgattgagggatcgagtggctgtgcagatgttgttgacattggagagacctcgtacactatggttttggctgataacgtggatggtggagatgaccttgatcttattgttaccactatgaatggcaacgtcttctgcttctccactcaatcaccacaccatccgcttaaggaatggaggtcatcaaaccaaggaaggaataatgctgcatatcagtacaaccgtgaaggtatctatgttaagcatggttccaggaccttccgtgacgaagagggcaagaatttctggatagagtttgaaatcgttgacaagtacagggtgccctatgggaagcaagctccttataacgtgacggtaactttacttgttccggggaattatcaaggagataggcgcattgttgtcagtggtgtgtatcatcaaccagggaagcaacggatgatgcttcccactgttcctgttagaactactggaactgtggtcgtggagatgatcgataaaaatgggctgtacttctccgacgagttctcactcaccttccacatgcattactataagctgctgaaatggcttctgctactgccaatgcttggaatgtttggtgttctcgtcatcttgaggccccaagaaggtgcgccgctgccatcgttttcacggaatatcgactagtggtgaaatgccggtgacccattgaagctgacgaagtgactccccaacatctccatgacctaaatgtcttgttcagtgtagtatcccaacagttaaccatttcatggattatagttatattttttacaatgtacccatttagttctgcagaacaattttgtacacagccattttcaatattggctcacccaaagaacaagcatattgtcaccattgagagtttacagtaggccttggaaacggtaattgtcagattctaagagaagcgacactcggagaggagaagcaaaactctcggatactgtgtcaaaacgctcttcataactattagtagaaaacaaacctatattaagcctgttttcatgctagcctgtcattcctgggtctgtgcggatgttgttgac

SEQ ID NO: 18729 - DNA, 1217 bp, Zea Mays
ccttctcagcaaggatccgatcaccaacatcaaatgttgggaacattgacctggatgggatggacctcggctcagctagggatgatttatagagcagtggcacggtcacagcggcaaagacggtcttcgcatcatctgagcatgagctcacccaccttgagagccaaccggtcttccttcccacccctgcaccaacaggaagactagcaccactcttcttcaccattccagctgcaccagaggcaatgacccctcttccaatcccagctgaacctgaggcgatgctagcactatcaaccaatgcttgtatgccgaccttggaaggagcagcaacagcaggtgacggcactggacggggcgatggagcggctgcgcgtggtgcaggacgaggcgatggtgcagctgtacgcggtgtaggtgcagccgttgcacctgctgggcgtcctgagctgcgcgacgtcgttgcagcagcgactatgtcgctacaggggagccacttgctcgcctgcaggaacgggaggagcgacgcagggttgagcccggttgatattgacggcgacgcaacaagggaggatgcaccagcaatgccgccagtcgatcccatcccagacgcgaacaccgacagcagccccacggccagcgacgctggggggtcatccaccggcggcggcgccttcgcggaacacgatcgcggcagcaacagtgagtagccatctcctcttgctgcaacggcaggggacagagccttgggcccgggcttcgggtggttctgatcctcggcgtcatggtgggggtcgacgtggcgggaggaggcgaagaggcagaaagggcgggatagcgcgtcctggaggaagcggcaccctggaccgggcgcggcgccagcgcccgcagccgcggcggcggtgcagcgcaggccgaaggacgcggccaggttctgcgccaggtagcccgaataggatacggtgatgcggatggccatcgcggcggcgctccgcgcacgcgcgaaggcggaggggggtacccctgggtccttggaccttactgaagatggcggcccattccgatcgggtagccgtcggcgggaaggagcgcggggtatcggagatctagggttccgcgggtgcgcggccggaggaggctacagggatcctcggagtagggatataagatcgagcagcgggggtggtggtgaccggcgaggtgcgacctcgccggtg

SEQ ID NO: 18730 - DNA, 968 bp, Zea Mays
catgtgtgcgtggggcccaggcattattgcaggaatagaaaccctaccaccatctccgctcgtggcgtgctccactgattcttcttcttcttcttctacctcccggccggtctcctcccctttctttgtctgcctgtgcttattagtatctcgcctcaccacgcagctagctagcagacagccagacacgcgctgctttcagatatctcaccggaccgtcgtcgtcggcccctccgagaacataccaccgcgcccgccgccgcgcgcgccaccacgtccacgtacgccggccggccaccaagcaagcatggatacggtttcacagtccgagcacctgtgctacgtccgctgcacctactgcaacaccgtgctcgcggttggggttccatgcaagaggctcatggacacggtgactgtcaagtgcggccactgcaacaacctctcctacctcagtccacggccccccatggtgcagccgctctcgccgactgatcatcccttggggccattccagtgtcagggaccctgcagtgagtgcaggaggaaccaaccgctgccgctggcctcgccgacatcgactgacctcaccccgagaatgcccttcgttgtcaagcccccggagaagaaacatcgcctcccatctgcttacaatcgcttcatgagggaggagattcagcgcatcaaagctgcgaagccagatatccctcacagggaggccttcagcatggctgccaagaattgggcgaagtgtgacccgcgctgctcgacgactgcctctactgccacttctaacagcgctcctgagcctgctagagtcgtcgtgcccactcctcatgtaactgagccacgctttgatctggaggatagggccaaggagcatgtcattgagagcttcgacatcttcaagcagattgagcgcaacatctagatgtctccatttcgatttttcacggaaaattttgaataag

SEQ ID NO: 18731 - DNA, 1248 bp, Zea Mays
acataatctatttaaagatagtggacatcttcagtagcagctgccgtggccaccataagaatcctccttcagagccatatgtccttgaggttggggttttgcaagattatgttggaagtggaggctgtgtgcaaggcgtgacagcgtgtcgtggtcaaggaccctaagctctagcgccaaattcatatcacatttgttctagaatgagatcatgaatggtccctggggttggcctggttcacgctccattctcagtgcgttttccgacatcgttcttcaagcaagcatgcgagctggctcctattttcactgagcttgtggattgtgtgagcttagatggggagtccttgcaagctgctttgtctagaacaaagcaggttcatgaatttaccgcaaggctgctagatattcatgataagatgatgttgataaataataaagaggattaccaatgctagaatctgtatggattctatcagctgttcgcctactgatgcttatgtgccaatttagtgagactggagtcatacactccatacaaatctatacaaaatcaaagtggttggcaatgcagtgatgctcggtgaaatcataaactacgtgcagtccctacaatgacaagttgagtttatgtccatgaaactggccaccgtgaatccccaggtggacttaaatagcctgcctaacgtcctccctaaagatgtacatcagtcttgtggtccgccacatttctcgctggagacctcagacgcttcgttgtcgtacctcagccagcctcaccatggaagccctcttggctgcatggacaaccagagttgtatgcatccacttgacacgacgttttgcctggcgataaatccgcagtatcatttcctcaacggtgttagcgatgcatcgtctcagttgcagctaatttgatgcttgtgtttatggaaaccaagaggtggcgctgatccattggaaacctggttgtgtatgaatgggtttccagctacttctattcttggagatagaaaccaacatgtttggtttttgtttttattcgctttagaacaactcatttttgtacgaaaagaggcatttagctataattgtttgttgtagtatgtttaccgcaggatagccgttccatgaaatacataaaaacctgatactgttgttatatttggtttagtcatgctcttatggaacctttaatgaggatttttctatatcaagatatcatcgtcatcgtcattattattgcat

SEQ ID NO: 18732 - DNA, 1156 bp, Zea Mays
ttctattacaacaccgatgagaacccttgttctacctcccaaagtcgggttcccacccagcgtgcccgccgccgaccgcctgcacaagcctgcggcgagatccggcgtcgccggcgagcttcagcaccggcacgtgctccggaaggaaatagcttccggtgacgtacgctaccctctccgcggcgtcccggggagcggggacggggagcgctttttgctgtcacccgcacacgagcgacgagctccaccacctgcccagggttagttgtgtatggaacaatgacgaacatggcaccacggcagggacccgtcactcagtgctgttgattctggaacatcgcctcgctaccacccatggcagctaaccatcaggaggtctggaggatcacaagtgccttggagaaccacaagtatgaaattgctgactgggaccttggtgccggaatatacatagacttctacgttctgaagaactcaatgcaagaaagaaatgccatggatgattcggattcactcgaggagatgagtgaatcatgcagaagtttctttggtcgattaaacgaatcgttgttagtctggggaagcaaattacctgttgagtcaagggcatgctactcgaagatggcagaggagctatgcgcgcttctggtggacaccccaagcgagacgctgaacctacccatggggtgtcttctgacgatgctcaacgctccagttccagacgagagcaggtcgtcgtacctgcaggatgcactctccgtcttcaccgaaatcctttgcagcgatccgtaggtgaaggggagtgaagcctacaggcaacacgccgaagagtttgtacgtctcatgtttgatacttgtagaaaattaggaatgtataactatgacctgatgttgctccggtgaatttgtaacgccatctgaagacatgtgtcgggatcttcgttgtatgtgagtaccaggtcttatgaaacgttgacttgcgagctgtaccaatggggagtgatttcctgggcttcattttctctgtgtgtgtgtgtgtgtttattacagggaagggcagcgtcacggcgacccgtgcttcggtgtacattggagattactgaggccttcgtttcagccgtaaatcacatggatcgaagagtactttaacttggaa

SEQ ID NO: 18733 - DNA, 1809 bp, Zea Mays
gaagtccaaaaaggcccaaccagcccccctccctctcctttcttcacttggaaatccatggtgtaggcccagagagatctagctagagtttcctgcatccgcctccgccccccaccgcctccacctccgccccccaccgccccgccccacagcaggaaggatggaagccccgggctccccctacgcctcctcgccggaatccgcccccaagcgtgccccacgctcccctccgcagcagcagcagtctccctccgaggaaggagatgacaaggagaaaccaacacatttgagatttctagtgtctaatacggcagcagggtgcatcattggcaaggaatcatcatggtttctggactgtttgatgaagtaatgaaggccatggagctgattcttgagaaactgttggctgagggtgaagaattcaacgaagcagaagctagacctaaagttagacttgtagttcctaatagctcttgtggtggtataattggtaaaggtggagcaacaataaagtcgtttattgaagaatcacatgctggaatcaaaatctcgccacaggataacaactatgttggtttgcatgataggcttgttacaatcacagggacctttgataaccaaatgaatgcaatagatttgatactgaaaaagttatctgaggatgttcactatccacctaatttgagctccccatttccttatgcaggccttactttcccaagctaccctggtgttcctgttggttatatgattccacaggtgccatatagtaatgctgtgaactatggacctaataatggttacggaggaaggtatcaaaataacaagccaactacacctatgagatcacctgctagtaatgaagcccaagaatctttgaccattggtatagccgatgaacacattggtgctgttgtaggtcgagcaggaaggaacataacagagatcattcaggctagtggtgctcggatcaagatatcagataggggtgactatatatctgggacatctgacaggaaagtgacgattactggaacacccgaagctatccggaccgcggagtccatgatcatgcagagggtgtcagccagttcagagaggtgatgagccccttctgaaggaagggcgtaggccattgctgtgtccgagcacagcagcgtgtttgatgcaagttaggaggatgtgggaactgctttccttttattttccccccttttttcttttttcctagcaagctcgagcagaaaaaagaaacaagctgttattgtttgttgcattgcgtccaaccgatggttttatgttagtataaactgctagtcgaagataattaggtgcagcgtttgaattgatttgggtttacggttgagttatatcccgtgtatgccataacaaaggcagtcgccgctctgttgctagtggcaagcgctgcctgtcctgtgtctgtttgtacgttgacaatttgattccgttgctcaaggatagaagaatattgatacaggagacccgaggactggtttggtttttgcagtgcttttgagtcgtgtgtgtagatctgtgctactgaggtgctatcttttacgtgatcaggaagagtatcggtggaagctttcaggtgttccattcacccatctgcgtgttgcgggtctcggcggttggcgaccgagcgtgtttgcctgcagtattgggaaacctgtctgactgagacgtctggctggatcgagctgcctggccgcggctcctatcccaggtcaagacaacgactaaacagcaaaaaccattaaatggatgtactgtgcaaaaaaaaaaaac

SEQ ID NO: 18734 - DNA, 160 bp, Zea Mays
gatggacaagataaaatcacatttggagacaattcaaaagggaaagtgcgaggacttggaaaggtggcaatttcaaatgatttatcaatatcaaatgttcttttggttgcacctttgagcttcaatttattatcagtgggtcaactctgtgatcttggac

SEQ ID NO: 18735 - DNA, 2914 bp, Zea Mays
gaccggattcggttcggaccgcagctccccacagcccacactcgtccgtccgcccgtcgaatggcggctcccaaaccctaagccacagatcccttcccctgcctcagcttcgaacgccctcgcctcgccgccggtctttgtgtactgccgctgtgtccgtcggcgcggatcaagggtccgctccgctgcaccccgcggggagaaaggggcgggcctcggcgtcctccgctcgtcgcccgagcgagcgtcgaatgaccttctctatggatatggatttgaacgcatcaccggtgcctgacgatgatgagcagcagccttacaatgaaccagtggaggctgagtatgctcaggaggaacatgttgaatctgctgtcgcaacattgcgccgggaacgtgaagaaagacgcaagagactaaagagagagcagcaggatgatgggtcaaggctacattcccagcagattagggttgattatgctcctcaacccaaaaggcatagtcgcatcaaagaggcacctcagggctggttggactgtcctgcatttggggagccaatagataaaatcataccatctaaagttcctctcgatgaaacattcaatgagtcagtgcctcctgggaagcgatactcctcaaagcaactagttaacaaacaaagaaaagctggtcgtgaaataggtctggtgattgatttgacaaataccaccaggtattattcaccagctgaatggacgaagcaaggtactaagtatgcgaagattgcatgcaaggggagagatgcggtacctgacaatgaatctgttaataagtttgtctatgaggcaatgatattccttgatcgacaaaaacattcaaagaatcctaaatatattctggttcactgtacccatggtcataatcgtaccggtttcatgattattcattaccttatgcgcacacacgtatcttgtgttgctgaggcgataaatatgtttgctcaaaggcggccacctggcatatacaagagggactatattgaagcactatattcattttaccatgaggtccctgagaatatgatgatagcatgccctccaacaccagaatggaagagaccagatgatctcgatttaaatggcgaagctaagcaggatgatgacgacgacaatggtgatccagaaccaccgcgtaatgaatcagaggataaaatcatcaccaacgacgatgtgttaggggacgaagtgccatatgaccagcaagaagctttgcgtgtgctatgttataagttgcttgaaatgccccttataaggggacattcacaatttcctggatcacatccagtttctcttaacagtgaaaatctgcaactacttagacagcgatactactatgctacatggaaagctgacggaacacgatatatgatgcttataatgagagatggttgtttcttgattgatcgaaatttttgctttagaagggttcagatgcgctttccccataagagccttgaaggtctgcatgatatgaccttgattgatggagagatgattatagacacggtaccagattcaggcttgaagagaaggtacttggcatatgatcttatggcacttggtgcagtgtccaaaactaagttgccgttttctgaaaggtggaaaatgctggaagatgaaataatacgaccacgttattatgagaaaaataaatttgagagtggttctaagagcaatccgttgtacaaatatgacatggaattattttcggtatcagattctaggattcctcctgaactataatgttcaattcatgtcctgcaaagttaattttctctttttcgtttattatatgactttaccaggttagaagaaaagatttttggctgctctcaacagtaaaaaaggttcttaaggtgttcattccatccctttgccatgatgctgatggccttatatttcagggctgggacgatccatatgtaactcgtactcatgaaggtctcctgaagtggaaataccctgagatgaattctgtggactttctgttcgagcttacgaatgataatcgtcaactggttttcctttatgagagaggaaaaaagaaactcatggatggtgcccggatagcatttactgacgatgtagatccatcctctatcgccgggaggattgttgaatgctcctggaataaggaagaacagtgttggtcctgtatgcgtattagatctgataaatctactccaaacgacatcaacacataccggaaggtgatgaggagtatcacagataacattaccgaggaaaagcttctcgaagagattgatgagataagtcttctcccgatgtatgctgataggatgcagcaggctcatacaaagatggcacaacaacagcggcggagattgccaccacagtgctagccagtgctggggcgctctcctaccgccctagccagctgctggcttccgtagctgtgtaattagtagaggtttcagtagccccatatgatgatggctggctgggtctggcctgccaactaattctttgcacctcatttgtgtcttctccctgccctcccacccacctgtataggcgtcgccgcagagtagtttccctgtaaattgtgtactctatgttctcccatattctcccctatggttttatttttcatgggtgtagaatagcgtttaacaagagggtggtgttctaggtacattagtgtacgcgttactatctctcggtgttgcggttgccttgtgctagaataaatatggttaccatctgttgctgatgggtcatgtggttcccccggcggatatcatgtggttgcgtggtatgggttattttcgtcttctgttttgttcgcacctgatccgatccgatcttttgttcaatgaagaagaaaaaaattattggtaaaacctacgtgtttatgg

SEQ ID NO: 18736 - DNA, 937 bp, Zea Mays
ccggagagccccactccggttgcaggcaggggtggtccctacaccgtgggaccccaccacttgcaggtcccgcagttcgttcccagggcgccggcctctcctctccagatgatggtgccccagcagcagcagcagcacggtggtgccccagcagctgctatctacccgtctcctcagtttgggtactgctggtacccgccggactttcaataccaacaggccctagccagcccgcaagcgctgcagaactactacgcccagctgtacggtctgacgacctcgccttcggcggcggcggcgccctaccaccaccagtacctcggctacatggcgccgccgcctccaacgccaaggatgatactgccaccaccaccgccgctggcggcgcagcaggtcaccgccgtgcaaccgttggtgcagcatccgccgccgccggcgcagcaggtcacggtgcagcctctgctccagcatcccccgccacagattcatgcccctttcttcccggctccctcgctcccgcagcacaacttcaggctccatccgccgccgcaagctatggcagtattgcctcccaacacaacaggcggatcgctgccacctgctgatcaggccgctgcccctgcagctcgcgcgacaaacgcgagcagtactcggccgggtgcgtgatccagagaggcttcaaggagaactcaagataaaaagcatcggattcaccataccttgaaattataactgactttttttttgggaaaaagggggtggcgaagaaaatgaagtttcagtcgatctactatggacgaggttgaggtttaagttactgatgatctgtaactgtaacagtctctcatcatgttttgtctccagaaccaaacaaaagacatttcgtttttttcttccccctttgtccgtcctccgattttttaccagtttcggcgaa

SEQ ID NO: 18737 - DNA, 2371 bp, Zea Mays
caaaccctaaaccccaccgccgattctccctattgcttcgctgtcgcctgggagacgccggaggcggcgatggcgaagaagctagggaagaaggcgcgcaagttcgcgcgcaagaacctgcagtctgccgccaagcgcaaccgcaagatccgcaaccagttcaagcaccgccgaggaccccgcggaggtgggagcgccggccgggaggatggggacgagcacgtgctgcagcgggtcctcgatcccaccatggttaccgacgatgctgctgctactttgatccacggtttggagtttccagaggacgatgctgaactagatgctgatctgtctgacagtgatggttatctttctgaggatcctggatgtccatactattctgacagtgaggatgagaaagctgccaaagattgtatcatggaagaaggtttggacagacagaatgatgacatgaatcgagatatcaagaagcaaaagaaaaagttgaagaagttgctggataaggaccctgaatttgcaaattttctcgaaaaatggcagtcggagttggagagctccagaagtaaaggagattctgatgaagagggtatggattctatggatgatgacgatgactccaatgatgggaatttaccaaatgctaaggtccttacaagaaagacgataagtgaatggtgccagttagtgtcaaaggaacctaaagcacctgccttgcgtaatctactaaatgcttttcgagatgcttgtcgatatggtgttcactctgatgggcccttgatgcagagatttcaaagtgccagggtgttttatcaaataataatgtttgttctttctgagtcggacaacattttccgtgctcttttggaaattcaagatgacgttaacaaaggaaaaattatgaacctgagaaattcaaagaaatggctaactgttgattctctcataaagtcctacttatcaagttctcttgatcttcttagtcaacttacagacaacaagatacttgcctttgttttgactcggttgagggtatcagtggtccttttttctgcatatccatcaacatcaagtaggcttgtcaagattttatttcgcttgtgggcaagtggtgatcggagtttgtctctgtcggcatttcttatgatccgagaagtagcttcactgttacctgactgtttggatcactgtttaactaaatcctacaatacataccttgccagtaccaatcttgtgaatgacagaaacacaaagcatatttattttctgatggactgcctggtagagctgtattctcttgatgttcagaaatcatatgagagggcaataatctccgtggagcaactgaatgctattcttagacaggcttctaaaaccaaggaaaaggaagatctcaggaagatagataactggcaatatattagttgtgtcaacctatgggttcggtttctgtgttgtcactataaggattacaatctccatcccttattttctcaagttcttcaatcagatgttctatccaattccatcgttgctctttgactgcctagaattaagagaagtttctcagaaagaacaaacacaaagaacaaagatcaacttttcgtcgttgttgaaggtgccaaagaacctgctgaaatcaagggattttcaagaggagtgtattctttcagcgattcagattctatcagcacattttgcccagtggagttaccatgtttccttcccagaagtagccaccattcctcttgtcctcttgaagaggctacatgagcagacaacagtcgaatcacttcgccgtcctattaagcgtttgatagaccaggtgacggagaacaaggattttatagaaaggaaaagagaggttgtatccttttcaccaaatgataaggcgtcagttgatagcttccttcaggagaaggtcagcagaaccgcttcattcactcggttctatgcatccgtagctgaaaaccgtcaaccaaaatggagaaaaacactttaaaataccaagggaatttctgagagacatctcacatctggaatcggttggtttccaagtgagggccacgaagaaccacatcaatgtagaacattttagtgcagatatacgccgaggcagctattgtgtaacctctagtgagactgattcctacgagtcctcgagtgctcaacaattttgtacgattgtaaccttaattccgaagtgagttgtcaagtgatgaatgaaatttgctgttgcttttgaatctgttgtcactgtgcccgtagtacagagtatggactgttgtcatttcctactatgggggaagggatttaatcttactcaatccactctaatccctgttttagcttatcaatttgatttgtatgggct

SEQ ID NO: 18738 - DNA, 991 bp, Zea Mays
cacaactatccgtgagtcacggccaggacaaatatcccacctggaatgccctatccccacacgcgaatcctccaatctgtccttgccgccgccgcccgatccaggtctgcagactgctcacttctccccacccaacgcggcggcactccttctccctccccgagtgcctgctgtgcgcctgtacttcacaccggcgtcgccccctcctccagaactccccaccggagccaccctcacccgtcacgcactcctccgctgagtgcagcaagtgctgatcagtgggtggacgggagatggtgctgaggcgggcggcaaccgaatgccccaagaaggttgcggggctgaaggatctggtgaacctgccaacccagctgcgagagttcgccggaggccggtcccaaatgtcacatatctccttcttcctcagtgtctggtcgtacatcaaggacaacaaacttcaggacccaacgaataagaacattgtgaagtgtgatgagaagctgaagaccgtattattgggcaggtccaaagtgcaactgtctgaactcccaatgattgttaagctccatttcccaaaattgccaaagtagtgacaacatagtattgtatattgaagttctgtgggaccccctacagtaacttttacttcaaaaaaaaaagttctgtgggaacatgataggatagatagaacactatatgtattgttttgctgaaatttccatttactgtctgtatgtactggagcgatctatacatcgagcataccgattagattgcttgtcattttgatagcatgtttgatttatcagtaactttgctcatgtttaactgaagagacaagatgtgcaggataaatttcttttgttgtgaattagtacaactgacttcagctaagcagaacttcaatggcgcacctgattttaggacgatagagtggtagtcatatgtatgggtcacactaggtttcttgtgtctatggctcacttttaat

SEQ ID NO: 18739 - DNA, 1725 bp, Zea Mays
acctttacggtttgctggcccgagttttccccagctttgcttcgggctgacggtatgatgtggccagggagtccagtagtgtcatctccatgccgtcaatcccagacgggtgccgtgtcattcacctcaatttagtggcaagacatgggactcgcgctcctaccaagaagcgcatcaaggagctggatagattggcagttcgactggaagcccttctgaaagaggcaaatcaggtccttgatagtgattctctgaagaaaattccatcctggattaaaggctgggaatcacgctggaagggtaggactaaaggtggtgagctgattagtgaaggggaagaggagctttacaatttagctaccagaatgagggagaggtttcaagatctatttgatgacgaatatcaccctgatgtatattcaattgggactactttctgggaaaggaaagcttggacaagggaagaaccgagccttttctgttctgagtgagagtcgtgcaagtgatatttgtctgagattctttgacagctgtgagacatacaaggcatacaggaaaaggaaggagcctgatgtagagaagcaaaaggaaccaattctagagcatgtcacagctgcacttgtcaatcgttatcacctaaaatttacaactcgcgatgtttcttccctctggtttctttgtaagcaggaagcatctttgttgaatacaacaaatcaagcttgtgggctttttaatgaagctgaggttcgttttctggagtggacagatgatttggagggttttgttctaaaaggctatggtgagtcaattaactacaggatgggactgccattgctcaaggatgttgtccagtcaatggaagaagcaatcatagctagagaagaaaaccgtgctgatggtacgtttgaaaaggcaaggctccgatttgcacatgcagaaactgttgttccttttagctgccttcttggtctttttcttgaaggtccagaaattgagaagatacagagagaggaagcattggacctaccccctttgccgccacagggaagaaactggaagggcagtgttgttgcgccttttgctggtaacaatatgctggttttatatcaatgtccaagcaaaatttcggatggcagcacaatctctggaggccgaaacaactcttacttagttcaagttctacacaacgaagtcccagtttcaatgcctgggtgcggcaacaaagatttctgtccgttcgaggagttcaaggagaaaattgtgaaaccgcacctgaagcacgactacaacatgatatgcaaggtcaaatccccagcggcaagcgaggagcctgcctcgttcgcctccagggtgtccagtttcttcctaggactcctctcgcagaaagggtaccgcggtgtgggcgccgagggcgtcaagaccgagctgtaggcgtcaagacctagcttagcacggtgccgtctcctctcaccgtctgcgagcacgatcaggaaccagactaacccatgcactaacccgcagtgtttttgtacggggcgagtcgaatgtgtaggacaccaccacaggaggcgccagttcggttgtctccagggccagacgcctctgatactgtagtagcaataacataaataataaatgtgtttcgattcggactccctttcgcgcagaaagaaacaaatgcatgaatgaatgaatgaaatagtacgtgataagcatcttctgggg

SEQ ID NO: 18740 - DNA, 75 bp, Zea Mays
tctccctctggcaaggctgaggtagtatctgtagtggtaacattcccctccccttgaaaattcgcttgaccccaa

SEQ ID NO: 18741 - DNA, 1362 bp, Zea Mays
caggactgcagttgaaagctgatatccctggctaaccaaacaaatggtggagacatggattagtgcttatgggaaaatcatccccaacagggattgaagtgacagccagggatccactcatcccctgggtggaaaaattcaggttgtggattggattgctagctaccgaacaagccctcagcgtgctaatttcaatggaatcttggtagacaccactgaacttcttggtttccaattaagttcgagcatagagatcgtcttctctcacactgagttgccagtttattccgaaggtccttcaagctaagttctgatgatggctaaggccaatggagcagtccatgcatccacgaaggaacccttgttttcttttggtgtcatagctgatgttcagtatgctgatatcccagatggtcgctcattcctcggtgtcccaagatactaccgccatagcatcactgtcctccaaagggccgtcaacaggtggaacgaacaaggcaacatcaagttctcaatcaattttggtgacattattgatggctactgcccaaaggacaaatcattgtgggcggtgcagaaggtccttgatgaatttgacaagtttgatggcccgacatatcacatgattggcaaccactgcctgtataaccttccgcgcagccagctggtgtctctgcttaagattgcaacagattctgatcgtgcctattatgacttctcgccatgccctgggttcagaatcgttgttctggatgcttatgacttcagttgccttggctggccccatgatcaccctgtgactatagcagcaatgaagctcctggatgagaagaatccaaacactgataagaacagccctgatggtctggttggtgttgataggcggttcgtgaagttcaatggtgcagttggcaaggagcaggtgtcctggctcaatgatgtcctccaggacgcatcgacgcaacatcaaaatgtcatcatatgcagccatctcccaatggatcccggggcgtcttccccagcagctctgatgtggaactacgatgaggtgatggctattgttcaccagtacaactgtgtcaaggcctgctttgccggtcatgaccacaagggtggccactctgtggactcacacggtgtgcaccaccgcacccttgaggctgccttggagtgtcctcctggtaccagcgcttttggtcacgtcgaagtgtatcctaacaggctgctgcttgtaggttttgacagaatggctgatacagaggtccgtttttgagccattaagcggctttaattcgtaccgacttctactacttctataatgtttttgtctatatagattacagctgcagcgaattccttacg

SEQ ID NO: 18742 - DNA, 4212 bp, Zea Mays
gggcgagcgagtgcagcgacagtgagacgaaccgccgccgtcgcccaccaccgtccacccgccaacggaattataaaataattcaaggtgtaaagctggtatggatctaagcatggcaagtttgaacttgtcagaacctcgagactctagagaatcaacttcgcccgcaccatcaacatcatcttctatatcaagagaaaaaggtgacctggcagaagttgatgatcctgaaagtgcaatgtccactgttgctagattgttggaagacctccatgctagcatggtgtctccatcggggaaggaagctacaaccagaaggttacttgaactggctagagcgaaaaaggaggcaaggattttgataggaacagtatgaagactcagaaaatatatggacttgtgcccttctgttggctactctgtttcaggattcagtggttgttcagtcttctgaaataacacgaaccataccttccttagcatccttgctaaaatctgatgatattatcaataaatactttgctgctcaggcactggctagccttgtttccactgggagcagaggtatacagcttgctattgcgaattctggtgcagttttgggtgctgtagcattgatcggacaggtagaatctgatatgccaaaccttgttacaatggctgaagaattcaagttgtcagacaatccatgtcaaataatgttgagaagcctttttgagcttgaagatgtctgcactggtgcttccgcccggaggtccatacccttgctagtggatctacttaaaccaatgccagataggccaggtgcacctctgattgctttgcaccttctgactcaactagcggaaggtagtgagtcaaataaaattgctatggcagaggctggagctttggatgccttgactaagtatctatctttaagccctcaagactcaactgaaactactataaccaatctgttggggattttatacactaatcctgatcttctttaccatgaatcatcacgtagcacttcaaatcagctggtagctgtcttgcgtttgggttcgagaagttctaggcttagtgcagtaaggacgttgcagaaactctttgattcagagaatataagggacaccgaagtggcccggcaagctattcaaccactacttgacatgcttgagtcaggaactgaaatagaacagcaggcagcacttggtgcgcttatcaagctttctgctgggaacatcgctaaggattctgctatgtttgatgtagaaggcaacacacttgaaaatctttacaaagttttatccttcagttcgtcattggagctgaagaaggatgctgctcaactctgctatattttatttgagaactcaactgtacgtgcatcaccaattgcaacagaatgtcttcaacccctgatatcactgatgacatcaggatctagtttggctattgaaccagcagtttgtgctctaaacagattactggatgaggactacaatgcagaaattgctgcaactagcgaagttattgatcttcttgtcagttttgttcctggtacaaactatcagttgtctgaagcatgtatcggtgctctcataaagttgggcaaggatcgtccaaactgcaagcttgacatggttaaagctggtatcattgagcatgcacttgatatgattcttgatgttcctgtatctgttagttcatccattgctgaattgcttcgcattttgacaaacaacagtggcattgctaaaagttctgctgctgcaaaaatggtggagccacttttcttgcttttacgtcgccctgatgttactatgtgggatcagcacagtgccttgcaagcactcgtaaatattttggagaaacctcagagtctagcagcattgaagttgactcccagtcaaataattgagcctttaatatcatttcttgagtctccctctcaagcaattcagcaacttggcactgaggtgctctcacatcttctagaacaggaacattttcaacaggatatcactacaaaaaatgcagttgttcctctggtgcagcttgctggtattggaatcttgagcttacaacaaactgcagttaaagcacttgaaaacatctcacagagttggcccaaggcagtagccgatgcaggtggaatttttgaactttcaaaggtaattgtccaggatgatcctcagccaagtcaagcattatgggaatctgcagcacttgtgttatgcaatgttctgcgttataattctgacaactatgtcaaagtctcaatggctgtacttgtgagattgctgaactccaccatggagagtaccgtcacgatagctctcagtgctctacttgttcaagagaaaagtagctcacgctgtgctgtggccatggctgaggctggggcagtacgggcactcttggagctcctgaagagccatcgatgtgaggaatctgcagcaagattgcttgaagccctgataaacaattcaagggtccgtgaaacaaaagttgccaagtatgctattgctccactggcacagtacctgttagatcctcaatctaagaaccagtcagcaaagtttctggttactcttgcactaggtgacattttccagcatgaagctcttgcaagggcaagtgactctgtgtctgcctgccgtgctcttgtaagcctacttgaggaccagcctacggatgacatgacaacagttgctatttgtgcactgcaaagcttagtgatgcacagcaggacaaataggcgtgctgttgctgaagctgggggcattttggttgtgcaagaattgcttctttcaccaaatgtggatatttcaggacaggctgcccttctaatgaagtacctattttcaaatcatacgctgcaagaatacgtgtcgaatgagcttattcgatctcttactgaccatatatgtgatattcagcaacttcaaaaaggttcggttttctgaggccgcaaccttgtgcataccacacctggtttgtgctttgaaggatggaaatgaggctgcccaagagagcgtgcttgacaccctttgcttgcttaaagaatcttggccgcaaatgaatgaagacatcgctaaagcccagtccctgatttcagctgaagccatacctgtactacaaatgcttatgaagacatgtcctcccagttttcacgagagagccgatagtttgcttcattgcttgcctggttgcttgacagtgaccatcattcgtgggaataatctgaaacagacaatggggggtacaaatgcattttgttgcctgcaaataggaaatggtcctccaaggcaaactaaggtggtaaaccacagcatgtgcccagcttggaacgagggtttcacttggttatttgacgtggcccctaaagggcagaagctctacatcatatgcaaaagcaaaaatacgtttggaaagtcaacccttggaagagtgaccatccagatcgacaaggttgtcaccgagggtgtatacagcgggttcttcagcctcagccacgacggaggtaaggacggctcaaggaccctagagatagagatcgtatggtccaataggccatccaacgactgtatgtagcgtacggatgatttacctgacgccaattcttgtactcttggcttccatgtaaatcagccccccccccataatcatccgaattcatttatttgtacgtagaaagttaagacacttagataactcgcgccatcattcaattattgaggtcatttccgggattgtggccctgctgctgtaaactgattttgcacccgggtatttttttttgtacaggtgaatttatttcatgtagttatagcttagtgtagattggtggtgagtacggacaagccctagtgacagtaacattgggtgtgatgtgtggcgtgatatttgctcccgtgggtgtgtttccggcacttgtagcctcaggatacacatggctgagcttggcactgttctatttgtcaggcatgtttgtttacctgtttggttctggctacgcaaaactttttttttacatccaccttgccatagccgtaccagcggtacgaggaatctgaggtacctttttcttccatctcggcagaagtttgatgtttggcgaaactgtctcaggttacatggtaataacaatactatttgcaaaaccaaacacgccacataccagtactgcttgctggcagcctgaaccaatgttttaacggt

SEQ ID NO: 18743 - DNA, 2404 bp, Zea Mays
ttatctctttcctagaccccactcatgtgggagcctccgtcgaagctctccgtatctgggaaggatttttggttgacccttatagctaggcgctcacgacactttgcgggaaccagattcttgaaacgtggcgttaatgaaaagggcagggtagcgaatgatgttgagactgagcagattgtttttgaagacacatctgatggaatcccaactcagatggcttctgctgtacagcatagaggatcgatacctcttgtctggtttcaggaaacttcaagacttaatattagaccagatattatattgaaacctgatgtggactacaaggcgactcgccttcattttgagaaccttgcacttagatatgggaatccagtaatcatcttgaacttaataaagacccgtgagaagaagccccgtgaatctctgctccgtgcagaatttgcaaaggctatccattacattaacaagagcctgcctgatgacaagcgtctaaaatttttacacatggatctgagtaagctttctcgaaggaaaggcaccaatgtgcttgcactgttgaccaaggtggcatcagatgtgttggatctaactgaattcctccactgtgaaataagtacatcaacaaaacctgatgacacctcaagtggagaaagaactgctgccaaaccacatgatgacagaagtagcagtgatcaaactgaatgtgcagctaagttggcacctcttttattacagaagggtgtcctcaggacaaattgcatagactgcttagatcgcacaaatgttgcacaatttgcatatggtttagctgctttagggcgtcaacttcatgcattggggcttactgaagcacagaaaattgaattgcacgatcctctggctgatgatctgatggacttctatgaatggatgggtgatacattagctattcagtatggtggttctgctgctcacaacaagatcttctgcgagcaaaggggtcaatggaaggcagcaacccaatctcaggagttccttcggaccattcaacgctactataataacgcctacactgatcacgacaagcaggatgctataaacatgttcttaggtcatttccaacctcagcaagggaaacctgcactgtggaagctggactcagatcagcattacaacattgggaggcaagggactttaaaagaagagattggaagatcgttcataaagaggtcactatcagatggtaacatactgttggagaacaacttgcctgtaactagctgtaacaatgaaacaaacaacacagaattgcttccaatgcaacagctggatgatattagagaacctaccgactctgcgccagagatctccatatgtgaacctaacccgtgctccagtgtgaactacggcagagtgcctggaagacactctatttcagaagagcggcagagttatttgaaaagattaggttaccctgaattgcattcttcaaatttcctcgaccttgatttgttgtcgtcttctgggaattcctgtgacgaggaagtttttgagaggtcatcactgatcaattcacctatggatgtggtcagcgttgaatcatctacgtcgtacagtgaacaaggacacactgatgagggaagggatgacatggatctttcccgttcaagcagccaggtctcagacgttcgggactattctgaccggtttgcgcactgggtcgcggatggaggcatgctttggtaaaaggccatggacttttgtcttgcttgacaactcggtagaatctgtgaccgcaggaaatggatgcgagcagatgacatggctagatgcagagatggtgggcgtggaaaaagtctcgcatcggtatggttgtgaccactggaaggcttgaacgctgatattcatcggatggggatggagatttcggtggttgggttgagtacaagattcaatttgctgtggtgaaaaattttaccatagtttgtttagacaataaataggcaaaatatatatgattcttttattttagcttacagtgcgtcccccttctccatagaaaattctgaaaagcaaaaaaaaaaaggaaaatctagaaaaaggaggaaaaaaaacttagataaagaacacttttgctgtaaatagttagtatgttacggaagtataaatattgtgaaattttgctgacgacacgacttcgctcaaacgtgtaatatactgttggacagtgttaacaaaatatatcccgtatcagtacgaaaactgtgtaaatttactgtaacgcacagtatgcattatttatttatttgtttctcagattatggaagagataaaattgcaaaaatatcttaacctctgacttctcacggtgcggccagcctcggtcaagctccccggcggcgggacgaggccggtgtccgct

SEQ ID NO: 18744 - DNA, 1106 bp, Zea Mays
gaggcatagggcatggtggctaccaaggtccattatcatcttcatttgatggacgtccacaagcttagcaccactgacatgatctgtcaagtctgaggctaggtaggacgtattgcctccattggtggtattgctacgatgagagctacacctccaacacgaagactgcagctgtggccacctaccaggctatggtatcgatatcaactagtacatctacatgacgtcaacagatcatattacaagtaatctggacaagctagcagttcagaacaaggggacaaattggacctcacagccagcagggcagttctacggatggaactggatatacaaaactttatgcagaaccctcagctgcaggagtttgaattccagaactttccgacttcttacctccgctgtgctgctcatcgtgttgcacaacattatggcttagagactatagtagcagatagtttagtagaaggctcagttagcaggattgttgcaagaaaaacagcagaaagcaggtatcctgcaatttttttatcagaagttcctagcaatcaagcaagaaatgatcatgaaacagctgagaagcttaagtttgtcatttatcaaaggcccaaagcattccaaaatggaagcgctgattctagaaacaagagtggtgtaccaaaaactgttgatgagagaatagaggaatataataaagcacgagcacgcatcttcaatggttccatttctgcagattctgatgctgcaagtattatgggaactctttctactggcaaagatgaaccagtaaatgttgacccttctgttgatgaaaccaaagtcagcacaatgaacagtcgttccagagttgctgtttttaaggatactgaaaaggatcgtagtgacccagactacgatcgaaactacaaaagtttatgcagtatgacattggttatgtgcaatctcctggcatgtccacaaaccagcatactatgtactttggccagcctgatctaacaatagggtcttctggagctgctgtttatcgacattggccaaccccaacaatgatgtatccccattgctatgataatgttagtccaatgatgtctcagtttgttcttgca

SEQ ID NO: 18745 - DNA, 1723 bp, Zea Mays
gtctctccccccgtcgagcacacaacacaccctcctcgtcctccaatccaatcaacctggtagactcgcttcgcttctcccccagccgtcggacggagctcctcgcagtcgcagcagccgccgatcagcctgcgctcgggctcagcgctggaagattaagcgtgaaatttgtatcatgaaattagtaaggcaccctaatgttgttcgactgtttgaggtgatgggaagtaaagcaagaattttcatcgttctggaatatgttaccggcggagagcttttcgaaatcattgctactaatggaaggttgaaggaagacgaagcacgtaaatacttccagcaactgattaatgctgttgattactgccacagtaggggagtgtatcacagagacttgaagctcgagaatttgctgcttgatgctgcaggaaatctcaaagtttctgactttggtttaagtgctttaaccgagcaagtgaaggctgatggtctgcttcatacaacatgtggaacccccaattatgttgcccctgaggtgatcgaggatggaggctatgatggtgcaactgcagatatttggtcttgcggagtaatcctctttgttcttcttgctggatatttacctttcgaggatgacaacatcatcgccctatacaagaagatttcagaagctcagtttagctgcccctcttggttttcagctggggccaagaacatgattaccagaattcttgatcccaatcctacaactagaatcacgatttctcagatactggagcatccttggttcaaaaaggggtacaagcctcctgtttttgacgagaaatatcaaactagcttggatgacgtggatgctgcttttggagattcagaagaccggcatgtgaaagaggaaactgaagatcagccaacctcaatgaatgcattcgaactgatttctctaaaccaggcactgaatctggagaatttgtttgaagcaaaggaggagtataaaagagagacaagattcacctcacagtgccccccgaaagagataatcacaaagatcgaagaagctgcaaagccgcttggctttgatgttcagaagaaaaaatacaagatgcggatggagaacccgaaagcaggtagaaagggcaatctgaatgttgcaactgaggttttccaaatagccccatccctgcatgtagtcgagctcaagaaggcgaagggggacactctggagttccaaaagttctacagaagcctgtcgacccagctgaaggatgttgtgtggaagtgcgacggcgaggtggacggcaacagcgcggcagcatgaaagtgccctttgaactttccactggacggcgccggttttcctttgtacatagcttctctttcggatgatcccgtgtccattgcagagtcggttttgcaagcaagttctttggtttatttgtagtaagcccggtgaaacaaccgccctggaggctgttgtggatgagcttactggcgtgtttagttcgtttcatggtcgggaggttggatggaatggaaaccacaatcaaggctgtagtagtgtgtgtagtaacgaagtagatacatgcatcagatggtgtaagggagtaccagctgttagttcatggtttcaagcttagccccccttcaatttgttcgatgatgtattacttcacaataaacattattacttagatgtatgaggtgagcacacttggtcttttgtcaagaa

SEQ ID NO: 18746 - DNA, 3077 bp, Zea Mays
ccccgaactcccagacaccacggctcgtcacagtcgtcttcctcctcaggcgaggccagatccaacctgccgcggccgaccactgccatggctcccaccgtcccttcggcggcgaagtccgcttctccttcccaaccctccgggaagagcgaggtgacggatctgaagcagcagctgcggcagcttgccgggagccgcgctcccgatgcggacgcccagcgtcgtgatgtattcaagagggtgatctcctgcatgacggccggcatcgacgtgtcggccgcgttcggggagatggtcctctgctccgccacctccgacgtcgtaaccaagaagatgtgctatctctatgtaggcgcccacgcgcgcgcgcacccggacctagccctcctcaccattaacttcctccagcgggactgccaagatcaggaccccaccatccgcggcctcgctctccgcagtctctgctccctccgtgtccccaatcttgtcgagtatctcgtcacgccactcacgaccgggctgaaggaccccagcgcctacgtgcggatgattgctgctgttggtgctgccaagttgtatcacatatctgccaccgcctgcattgatgctgaccttcctgcttcgctcaaggcgctcatgctatccgatccagacgcacaggtagttgccaattgcctgcatgcattgcaagagatctgggccctagaagctgctaaatcagaagcagctgcaagagagattgagacattgcatagcaaaccagtggtattttacctgttaaacaagatcaaggagttcagtgaatgggcgcagtgcattgttcttgagttggcatcaaagttccttccatctgataataatgaaatatttgacattatgaatttgctggaggatagacttcagcatgcaaatggagcagttgttttggcaacaattaaagtttttctccatttgacaatgtctatgactgatgttcatcaacaggtttatgaacgtattaaagcacccttgcttactctggtgggtgctggcagtcctgaacagtcatactctgtgctatgccatctacatcttctggtgatgcgtgctccaatgttattttcctcagactataaaagcttctactgccaatttagtgatccttcatacgtgaagaagttgaaacttgagatgttgactgctatagcaaatgaaagcaacacatatgagattgtcaccgaactgtgtgaatacgctgggaatgttgatgtaccgattgcaagggagtctatccgcgcagttggaaaaatagcactgcagcagtatgatgttaatgctattgtggacaggcttctacaatttcttgaaatggataaggattatgtgactgctgaaactctagtcttggtaaaagatcttctcagaaaatatcctcaatggagccatgattgtatagctgttgttggaaatatcagcagcaaaaacatccaggagcccaaaggaaaagcagctctcatatggatgttgggagaatattcacaagacatgcatgatgctccatacatccttgaaaatcttgttgaaaactgggatgaagagcactctcctgaggttcgcttgcatctcctgacagcagtgatgaaatgtttctttaaaagacctccagagacacaaaaggcattaggagctacattatcagctggtctatctgacacccagcaggatgttcatgacagagcacttttctactacaggcttttgcaatacaatcctaatgtagcagaacgtgtagtaaaccctcccaaacaagctgtctctgtatttgcagatacacagagcagtgaaaccaaagatcggatatttgatgagttcaacagtctatcagttgtatatcagaagccatcttacatgtttacagatagggagcatcgtgagccatttgaatactcagaggatcttacaagcttgactgttggggcagaggatccagaaaatgtaatttctgcccaaagatatcaagaaaacgataatgatcttttgctaagtacttcagataaagaggacaatggtacaagagccagcaatggttcttctacctctgcatacaatgctccttctgatttgattagcccttcattgataagctcccaaacaccagctgaaacttcactagtaaatactggtgggccgacacattcctcacaatcaaacttcagtctcgatgaccttcttggcattggcgttactgaagctcctgctccaacaccaccagcactgacccttaactcgaagcctgtgctagatcctggtacgttccagaggaaatggggccagctagcattggcgctgtctcaggaatgctctttgagtccacaaggagcagcttcattgatgaatccccaatcactcatccgtcatatgcaaagcaattacatccaatgtattgcttcaggtggtcagcctccgaactacaagttctttttctatgctcagaaagatggggctactgctttcttccttgttgaatgtattgtcaacacagcatcagcgaaggcacagctcaaaattaaggctgatgatgggactgctgctgaggcattctcgactttgtttcagtcagccttgtccaaatttgggctttcttgatcctgagtattttgtctgagcgattcactggtccacaatttttttccggcgttcacagttttgcccccactctgccgcggtgccgcctaagcttgtccagtacttgatcaatttgttggagaatcagcgtagaaggtgcgattagagggcaatatattattatcactaaattcagcaagagagcaatggagttttgcggagtaaaatcttatttgtattaattgggtgaactgtgcatttgtacatgactacatgtcatctagataaatagctaggttatttaggattgtgctagtgtgatgccttgacttcttctgaagggccttctttttcttgaaggatgtagaaacaacacacacctccccctttcatgtatgctgtacttacctttctttcttgcacaggtgaccaataaagatgtttcttccattttgattcacattaagggcctg

SEQ ID NO: 18747 - DNA, 1072 bp, Zea Mays
gagctggaagaaggtgaaccaacacaaccatcgcgatgaccatgagatcaaaggcaacctttcatgagtgggccgggccacttagaccaacatggggtagggagggaggagcccaggcccaggaaggactccgtccgggtacggcggcggcgttgggcgcgatgcaaaaggcgaaagaagcgaagaagataaggagggaccaagaccaacccagtgcaccacacaaggcattgtcagcggcggcggcggcggcgggccggcggagactcccaggccaggagcagtctgccgattggaaggggagatgaaggccacgctcaagggccgctacgagggcgacaaggccacggccgccaccaccctcgccgcccccgccggcgacctccgcctcaaggcctccgccaccgaggccgccttcaccaacggtccttccctgcgaggcctcaccctcaccctcgagaagcccggcgccttcctcgttgacctcaagccccacaaccaggctccggcggctgccgcctcaagtacacctacgcgcacggggtcgaccgcctcaccaccatcgagcccctcttcgacaccaacaagaacgcatgggagttcgccatcaccaggaagttcgccggaggggacgccgtcaagggcacctaccaggcctccaccaagctgctcggcctcgagtggagcagggactctctcgccggcggctccttcaaggttgcgacgacattcgatttgtcggaccaaagcaaagcaccaaagctaatagcagagagcacgtggaactacgaaatatgaaaaatggaagtgtccttctcatatcatacatactgcttgattgctgtatcctcctgaactatggagctattgttttttcggaacccttggtggtggtttacatctgattcttttgatcattttttcggctgtcgtgtcatgggagttttcactgagctgcggtcgtgccattggagttttctgttgagaatgaatgaacgacgagtatggtctatgttcctggggtttgtttgcgtggaagcccgtctgggttctggcttctgctcatgtggtg

SEQ ID NO: 18748 - DNA, 968 bp, Zea Mays
ctccccttgtgccccctaaacccttatcatgattgtcctttcgccctaacattttgaggatgcagaagcagacagaataaaaatttcagtagtctaatactgtatgaggtagagactactagagacagttgataaaaagcaccacaaaatattccttttagggctagtctgggaactccattttactaagggattcctatttttaaaggaaaacgaactaatttctcttgggaaaatgaaaatcccttggaaaaataggttcccaaactagcccttatttgtttccaaaatgtctctgattcgccagcagggttccatccacttcgtgttaactttgcttttgaaaatataatttttcctacttcctcattgtatcagatgcttaccttgcacaaagaatgttgaggaggcacacttgtttcaagcattcttttagatctttcagttcagaatttattttatatgtgaataacataccactcttgttcctgatgacaatacaaaccttttttctgtttttttccagagggtccggagcatggcctgagccacttttggcttactgattcatgcccccttactgtcaaggcggtgaagggcagacgaccatttgaaattctaagtctggccggacctattgcttctgctctccagatttaggcaaatctggtctgctcgatccttcgggatattgtgactattcagtagttcttctttcctttgttgctgtgaggaatttggtgtttttccttttctatactattgagtgtctcgcaatgtatttactaaaaaatcattaaaaatggcatatcttcactgcaggtctgcttggcagaaaacattcatagtcgtagtattagctgttaataatttgactgagcaagtcaagcgttgatctgtgttctagtataaataaaactctcgaataagtttcagtaatttgccatcttgcatatggtgtgtttttg

SEQ ID NO: 18749 - DNA, 1937 bp, Zea Mays
ttttcttgggcttcgctcggtcgtttcttgcggcagcgtctgttcatttcgtttgcttgcttcgtcgtggctgcctcccctttatagaaaggctaaagcgttgcacggtctgttgcctcatcagggtggtgactctggctccaaaagaccaaagtttgagcaggatggagcaggagatattgttatggagccacacttaaccgaggataaacctgtgcggatagaccaagaatcatcgtcaacatctaatagggatgctgaggcaagcacatctactagcatgaaacctgttaaaactgaagaagcaggagcagatcttcttcccaaagagatgaatattatgacaattagcgacgataaagctgatggccataatgataaggaaggtgagggtgttacacttgatgggactggaacagagacagggcagataattgtgacaacaataggaggtcacaatgggaagccaaagcagaaggtctcatacatggcagaattggttgttggtactggttcgtttggtattgttttccaggcgaaatgcttggaaactgacgagacggtggcgataaaaaaggtgttacaagataagcgctacaagaatagagagctccagactatgcagttacatgaccacccgaatgtagttcagctgaagcatcacttcttttcaacaactcaaaagggagaagtttacctcaaccttgtacttgaatttgtatccgagacagtttatcgtgttgccaaatactacaaccggatgaaccagcgtgtacccataatatatgttaagttgtatgcatatcagatgtgccgtgcgcttgcttacatccatcgagttgtcggtgtgtgtcatcgtgatattaaacctcaaaatctactggtcaatcctcatacacatcaacttaagatttgtgattttgggagcgctaaaaaattggtccctggtgagcctaacatatcgtacatttgctcgcggtattatagggctcctgaactaatatttggagctacggagtataccactgcgatcgatatctggtctgttggctgtgtagtggctgagcttctgattggtcagcctttgtttcctggtgaaagtggtgttgaccaactggtggaaataataaagattttgggtactccaacaagagaggagatcaggtgcatgaatccaaattattccgaattcaagttccctcagataaaagcccatccatggcacaagctttttggtaagcgcatgccacccgaggctgtcgatctcgtgtcaaggctgctccagtactcaccgaacctgcgctgcactgctgtcgacgcctgtgcccatccgttcttcgatgagctgcgggaccccaaggcttgcctgccgaacggacggccaatgccaccgttgttcgacttcacagcagccgaactcgaagggctccccgccgagcttgtccaccggatcgttcctgaacacatgaggaaggaagtgaattaggtggacggacgtactggggcaaaaaaaaaaaaaaaactccctgtttctctgttggttctgagagatgtgtgagggcacggatatggaggagcggtggtgtattgtaattgtaaagagggctgaaagaaaggtccctctggttgggcgtgtcaccaaagagtggccctagaggcaaaccttacgtttgctcgttgcccttggtgtgtacccagatgtgtatcgatgacataggctggctgctgtatcatcatcagggttgacgctgaacaagagaaattcaagcagggtgctgctagctcgcttcctcccgtagctggaaaccccagaatgccagtttccatcactgcacgtcgtcgcgctgtccactggtgtcccgtaagcatatagagctctgccggctccgctattggcttgcgtgtgtctatcgataatgacttctacggacgctacc

SEQ ID NO: 18750 - DNA, 1782 bp, Zea Mays
aaaatgaggatgaaggatgcactaattgaacttagcaaggctgtccaaacaggaccttgtgcaaaccttgttcctgttttatttggagagaaggcacccatgcgctccaaggatgctatgaaattcagtccattcaacaagaacttggatgattcacagaaagaggctatttcgaaggctcttggatcaagggatgttttcttgcttcacggacctcctggaactgggaaaacaacaactattattgagataatattgcaggaggtcaagcgtggatcaaagattcttgcctgtgctgcttccaatattgctgtggataatattgttgagcgacttgcacgatacagaacaaaattggtgaggttagggcaccctgctcgtttactgcctcaagtgctcgacagcgctcttgatgcacaggttttacgagctgataatagtagcttggcaggagacattcgcaaggaaatgaaggtgctcaatagcaaattgctgaaggctaaagataggaacactaaacgggacatcaggaaagagctcaaaacgcttgcaaaagaggagagaaaacgacagcagcttgcagtcactgatgtactgaaaaatgcagatgttgtgctgaccactctgactggtgcatcttcgaaaaagttaaacggaattacatttgatttggttgttattgatgaagctgcccaggcacttgaggtggcatgctggatagccttgttgaaagggccgagatgtattcttgctggagaccatcttcaacttcctccaacaattcaaagtgttgaggctgaaaagaaggggatgggaaagacactctttgaacgccttactgaagcttatggagaggaaatcacatccatgctcactgtgcagtacagaatgcacgagcacattatgagctggtcatctaaagaactttacaataataagatcaaagcacattctagtgttgctgggcatatgctctatgatctagaagaagtcactagatcttcttcaacagaaccaactattgtactcattgacactacagggtgtgatatggaagaagtaaaagatgaagaggagagcaccatgaatgagggcgaggcagcagtatccattgctcatgccaagttgcttgttgagagtggcgttaatgcttctgatattggaataattacgccttacgctgcacaggtaacctgcttgaagatgatgagaaacaaagatgccaagttgaaagatttagagatatctacagttgatgggtttcaaggccgggagaaagaagccatcatcatttctatggtccggtctaactcaaagaaagaggtggggttcttgagcgatcacaggcggatgaacgtggcggtgacgcgagccaggaggcagtgctgcctggtgtgcgacgtggagaccgtgagcagcgacaggttcctgaaacgcttggtcgaatacttcgaggagaacggggagtacttgagtgcttcagaataccagagcagctgactggcgtcgatcagatccattcagctcttcttctagtggctcgtggtggcatctggctggcatgtccgtggagcaagtggataggatccgcatggagtcttggagaacacaatatcaagctttggttcctagatatctcagcttttcttttcttttctcttggtgaacgcataaatgatgtattgttgtgacgttgccaatgccatgggaatgagatctttaacaaaacaaaaaacaaaaaaacaagagggcagtggagaatgtgctgtggcatagtgtgtg

SEQ ID NO: 18751 - DNA, 4498 bp, Zea Mays
aacccacccggcctctccaccgctgcacctgcagtcctgcacccatttaaatttaaacatttaaaaaaaaaacccaccccacgaaattcgcagaccaccttaattcccattacatcaattattttctcttcccgacccagtccgccgctgcctgcttccttccttccttctctctcctccctctcctccagcgacagagacagggaaggaggcggaggaggaggccgcgtggctgcggaggcgggcagccgcggcccgtgcgattcgcggcgcctctctcgccgtatctgcggtggcgcgggcgggttggcggccggccagcgagatcggctgttgtttttggtggtatttttttttctttccccacggcggtttttgggagttggagcgtggattgaagacggctgacggccggaggggtttggggggtccagttgaggccgtcggggcggagatcccgcggggagctgcggttccgccgcggcccgtgagttggattccgggcgcagcgccgcgccgacgatggcgtcggtggaggtgcgcaagtccagggccctgcgggcgcgcagcgggcccagcaagctgcagccggcgcggtcgatgccgctcgactacaggtactcggccggggcgtcgccggcgaacggcgccggcggcgggccggacgcgaacggcgtcgggcggcgggcggctgcggcggaggcggagaacggaggggaggtggtggtgcggttggaggggggcgatgcggactccccgtacagctccacggcggtcacagcggcggaggaggaggaagtgggggagagaggtggaggaggagacgaggtggattcagcggccacggcgacgccgaggcggttgtcgccgagggcagcagcgagccccacggaaggcgacgcccggtggggtgacaccagctcgtacggcgctaagaagaagcatagagttttttgtcagcttccgaatggcgattgggcattatgcacagtaattacaacctctggtgatgagtcggttgtaaaggtttctgaagggaaggtactgagattgaaaaccgagtgtctacaacctgcaaatcctgaaattcttgatggagtggatgatcttatgcagctaagttatctaagtgaaccatcagtactgtacaatctgcagtacagatactccaaggatatgatttatactaaagcaggtccagttttggtggctgtcaatcctttcaagaaagtttcactgtatggtaacgagtacatcgatgcatatagaaataaatcaatggatagtccacatgtttatgcaatagcagatgcagcactttgtgaaatgaaaagagatgaagtcaaccaatctataattataagtggtgagagtggagcaggaaaaacagaaaccgcaaaaattgctatgcagtacctggcttcccttggaggtggaagtggcattgaatacgaaattcttcagacaaatccaatactcgaggcttttggcaatgcaaagacattgagaaatgataactcaagtcgttttggaaagcttatagaaattcatttcagtaccactggaagaatatgtggtgccatgattcaaacatttttgcttgagaagtccagagttgtgcaatgtgcagttggtgagcgatcataccatatattttatcagctgtgcgctggtgcacctgcctctctaaaagaagttgaatttgaaaaaggtggatggatacaaatatcttaagcagagctgttgctattcaattgcgggtgtggatgatgcccaaatgtttcgaactgtgacgcaagctatgaacattgttcatatcagcaaagaggaccaagagagtgtttttgcaatggtctctgctgttctttggctgggggatgtctcgttcacagtaattgacaatgaaaatcatgttgaaatcatagtagatgaagcttcgaaaacggtttcagaacttcttggctgcagtattgaagatctcaatttagctttatcaaagcgccacatgaaagttaataatgaaaacattgtccagaaacttacccttgctcaggcaactgacacaagagatgctctggccaaatcagtgtatgccagtttgtttgagtggcttgtagaacaaattaataagtctctctcagttggcaagcgtcgaactgggagatctatcagtattcttgatatctatggctttgaatcatttgataagaacagttttgaacagttctgcattaattatgctaatgaaaggttgcagcaacatttcaatcgtcatttgtttaagcttgagcaagaggaatatgtggaggatggcatcgactgggcaaaggttgacttcgaggataatcaggactgtttgagcctctttgagaaaaaaccactgggactattgtctctgctggatgaggaatctactttcccgaatgccacagatcttacttttgcaaacaagcttaagcaacatcttgactcgaattcttgcttcagaggagaaagaggcaaggcatttgctgtccgtcactatgcaggagaggtggcttatgatacttcgggttttctggagaagaatagagatttattgcacatggactcgattcagctccttgccaaatgcaaaacttctctgccaaaaatgtttgcatcgaagatgctagttcaatcagataattctatgtctgttccatatagatctagtgctgctgattctcaaaaactaagtgttgccatgaagttcaagggtcaactgttccaacttatgcaaagactggaaagtacaacgccacactttattcgttgcattaaaccaaacaatttacaacttcctgcaatttatgaacaaggacttgtgcttcaacaacttaaatgttgtggggttcttgaggttgtccggatttcaagatctgggtatccaacaagaatgactcaccagaagtttgctcggcggtatggttttcttcttgaggatgttgcatctcaagatccactcagtgtttcagttgcaattcttcatcagttcaacattttacctgagatgtatcaagttggctacacaaagttgttcttccgaactggtcagattggcaaccttgaagatactcggaatcgtactctgcatggtattttaagggttcaaagctgtttcagggggcatcaagcccgtcatcatgcaagagaacgaacaagaggagttttgactcttcaatcattcattcgtggtgagaatgcacggcaaatttactcctctttgttgaggaaacatagagccgcagttgttttgcagagaaatgtgagatgttggcttgcaagaaggtatttcataaatgtccggaaggcctcagtgataatacagtctggtattcgtggcagtcttgttcgaagatgtaatggcaatattgatctaataaatgtgctaagagagtttgaatcaaaacaggaggcacatggtgaccaaattttgatcaaggcctcagtcctggctgagttacagaggcggatactaaaagccgaggccacagtacgtgaaaaggatgaagagaacgagatgcttcatcagcggcttcagcaatatgaaaaccgctggttagagtacgaacagaaaatgaaagctatggaggaaatgtggcagaagcaaatgcgttcgctgcaatcgagcctttccgtagcaaagaagagccttgttttggatgaaacgcctaggatgtcggactcatcagtggatcagagctgggaaagcaatgggaaccaccatgtcagcagcggttctcagctggtgccacacactggtggacgtgaaatgaacgctggcctcagcgtcatcagccgcctggcagaagaattcgagcagcggagccaggttttcgctgatgacgccaagttcctggtcgaggtcaagtctgggcaggcggacgccagcctaaacccagacatggagctccggaggttgaagcagaacttcgactcgtggaagaaagatttcagtggacggatgagggagacgaaggtgatcctgaacaagctcggcaatggcaacgagtcatcgcccaactctgtgaagcggaagtggtggggcaggctgaacacctccaagttttcgtgagtttattatgtattgattggtaatttgtagatgtaaccggtattttacacgccggtgtggttctagcttcctagagtttctactctacgggtgctgtgaaagtccagtgtgttggactggatttgtattccacggagggcgagttgtatagttctcccacaatggcttccttttgaggggtcaaggaccactgaattgtgatgtaattacttgctgaagtagctgtcgaaggggggagattgtgagtgcttaatattccactatccttgtgctttactttctgcctgttgtagattcatagatttaaatgttggtatggtgtgacataatctatcatccgatgactcgtagcatgtttggtttgagaaataagatagtttattatttctcacttattttttg

SEQ ID NO: 18752 - DNA, 4330 bp, Zea Mays
ggtggaatgggtgggtctgagagccatgtgaccccgttcgctaaagccggggttttcagcgtgatgtcgttctggtggatgaacccgatgatgaagacgggctacgagaagccgctcgaggagaaagacatgccgctcttgggtccctcggaccgagcgtacagccagtacctggtgttcctggagaagctcaacaggaagaagcagctgcgggcacacggcaacccgtcgatgttttggaccatcgtttcttgccagaaaactgggatcttggtctcgggtctctttgcactgctcaaggttctcacgctgtcttcgggcccggtgcttctgaaagcattcatcaacgtctcgctcgggaaagggtccttcaagtacgaaggctacgtgttggccgtagcgatgttcctctgcaaatgctgcgaatctctgtcgcagaggcagtggtacttccgcacgcggaggctagggctccaggtgcggtcgttcctgtcggccgccgtctacaagaagcatcagaggctgtccaactcggcgaagctgaagcactcttccggcgagatcatgaactacgtcaccgtcgacgcctaccggatcggcgagttcccgtactggttccaccagacgtggacgacgagcgtccagctctgcatcgctctagcgatcctgtacgacgcggtcggcctcgccacggtcgcggcgctggccgtcatcatcgccaccgtggtctgcaacgcgccgctggccaagctgcagcacaagttccagagcaggcttatggaggcgcaggacgtgaggttgaaggcgatgtcggagtccttggttcacatgaaggtcctgaagctttacgcgtgggagacccacttcaagaaggtcatcgaggggctgagggaggtcgagatcaaatggctgtcggcgttccagcttaggaaagcgtacaacagcttcctgttctggacgtcgcctatcttggtctcggctgcgaccttcctggcatgctatcttctgaagatccctcttgatgccagcaacgtcttcacttttgtggccaccctgcgcctcgttcaggatccgattcggcagataccagacgtgatcggagttgtgattcaggcgaaagttgccttcaccaggataaccaagttccttgacgcgcctgagctgagtggacaggtcaggaagaaaagctgtctgggggatgagtatccgatagtgatgaattgctgcagtttctcgtgggacgagaacccgtcgaaaccagctctaaagaatgtaaatctggtggtcaaaactggacagaaggttgcaatatgcggcgaggtaggatcaggaaagtctacactgctggctgcagttcttggagaggttccgaaaactgaaggcacgatccaagtttgcgggaaaacagcatatgtttctcagaacgcatggatccaaacaggaaccgtgcaggacaacattctctttgggtcttcgatggacaggcaaaggtaccaggaaacactcgagcggtgttctttagtgaaggatcttgagatgttgccgtatggagaccgtactcagatcggcgagcggggcataaatcttagcggcggtcagaagcagcgtgttcagcttgctcgtgcattgtaccagaatgcagacatctatctccttgatgaccctttcagcgctgttgatgcccacacagcaacgagtctgtttaatggatatgtcatgggagctctgtcagacaagactgttcttttggtgacccaccaagttgattttctgcctgtattcgattctattctgttaatgtcagatggtcaaattattcgttctgcatcttatcatgatctattggcatattgtcaagaatttcagaaccttgtaaatgcccataaagacactattggtgtttcagatcttaacagggtgcctccccatagagaaaatgaaatattgatcaaggagacaattgatgttcatggaagcagatacaaagagtctttgaagccatcaccaacagatcaactgattaagacagaagaaagagaaatgggtgatactggtctcaagccttatattctctacctgcgtcagaataaaggcttcttctatgcttctctgggtattatttcccatatagttttcgtatgtggccaaatatcacagaattcatggatggctactaatgtcgagaatcctgatgttagtactcttaagttgacttctgtgtacattgcaattggaatcttctcggtgttcttcttgctatttagatcattagcagttgttgttcttggggtcaagacatcaagatccttattttctcagttactaaactcattattccgtgcaccaatgtccttttatgattctacccctcttggaagaatacttagccgggtttcttcagatctgagtattgttgaccttgatattccgtttggcttcatgtttagcattggtgctggcataaatgcatatagcaatctaggagtattggctgttgttacatggcaagttctgttcgtctctgtgccaatgattgttttggcaatcaggttgcagaggtattatttagcctcatctaaggaattgatgaggatcaatggcactaccaaatctgctctcgctaatcacttgggcgagtcgattgcaggggctataacaataagggcttttcaggaagaagatcgtttctttgagaaaaacttggaacttgttgacaagaatgctggtccatatttctataattttgcagcaactgaatggctcattcaacgtttggagaccatgagtgctgcagttctttctttttctgcccttatcatggctcttcttcctcaaggaacttttaaccctggctttgtaggaatggcattatcttatggtctatccctgaatatatcctttgttttctctatccaaaaccaatgccagctagctagtcaaatcatctctgtggaaagggttcatcagtacatggacataccaagtgaagcagcagagattattgaagaaaatcgaccagcaccagactggccccaagttggcagggtggaccttaaagatttgaagattagatacagacaagatgctcctcttgtattacatggaatcacctgcagtttccacggtggagataagatcggtatagttgggcgaacaggaagtggaaagacaactttaattggtgcactgtttcgtcttgttgagccaactggagggaaaataattatagactctatagacatcaccacaataggcttacatgacctgcgttcacgtttgggtatcattccgcaagatccgacactctttcaaggaaccataagatataatctagaccctcttgggcaattctctgatcaacaaatatgggaggttctaggcaaatgtcagcttcttgaagctgtccaggagaaggagcagggattggactcacttgttgtggaagatggttcgaactggagcatgggtcaaaggcagctcttttgtttgggacgtgcacttctaagaagatgccgtatcttagttcttgatgaggccacggcatctatagacaacgctactgatgctatccttcagaagacgatcaggacagagtttagagattgcactgtcatcactgtcgcacaccgtatacccaccgttatggactgcgatatggtacttgcaatgagtgacgggaaagtagtggagtacgacaagcctacaaagctcgtggaaaccgaaggatctctcttccgtgatcttgtcaaggagtactggtcatacacatcgaattgaaatatctaggagaaactgtgacaatcacatgttcactcgttgcagtctcttaaaaaagagataacaggagcctgttctcacacacatccgatgaactattctatctcaagtccgaagtagaggtgtcaggcattgtcgggaagtgctttttgttaactagttgaacagggggaaacctgtcgtcccttaaaaaaaaggaaacctccagcgtttttttgctccgatattgagcgaataaaccgaaatatctagtggaaggcgcatcaagtatgcatccttgatactgcatgttcacagaaatgcttgtgcggcaggctgttccaaggctttaaactttatggtgctttacattcctaataaaccgaattgtgtatatgatgtttgggaaaatggtgatttttcaggtttcagctccctctcttgctcacgtttaatgtattatcagtgtaaattcatccgtgattggatttaaggcaaccaatttgttggtacgtagctctgttttcacagcgtgtgcccttcaaacttataactcttgggctccctcatatcc

SEQ ID NO: 18753 - DNA, 145 bp, Zea Mays
cggatatgaagacttggtcactgacttacacgtagcaatccagtgaactgaagggatgataaaaagacaactagtataggccaagtgcttgaactagggtagaaagaactctagatgcaggtaactttacttaacctgacaataa

SEQ ID NO: 18754 - DNA, 3088 bp, Zea Mays
gtgttggtattttcagctgctcaatcaggccgatctagtaggaggactatgagttcaaatgaggattctgaaccagaatgtggacggcttgtcggtactgttaggcgccacatgcctattgatacacgtgatcctgttggagctgttatccatttttatcttggtgattcatttgattctaactgtgagtctaatgttctgcggaaactccaatctcagagtacctggtatctaactggacttggttctcttgcaacaacacaaagagaatatgttgctttgcacgctttccgccgtcttagtgtgctgatgcaaaatgcaatacttcagccaagtccagagcatttcccgaagtatcaagagcaaccacctgccattccagactgcttcaccccaaattttgttgatcatctgcatcgtagtttcaatggtcctcaattgtcggcaattcattgggctgcaacacatacagctgctggcacaagcaatggtgttgtaaagaaacaagaaccatggcctttcacgttggtacaaggtcctcctgggacagggaaaactcatactgtgtgggggatgctaaatgttatccatcttgttcagtatcaacattactatgctgctttactcaagaagcttgctcctgaaagttacaagcaagttagtggtagcactagtaccagcttggagactgttgcggcagggtcaattgatgaactactgcagagcatggatcagaatctgtttcgcactcttccaaagctttgccctaagcctcggatgcttgtatgtgccccatcaaatgctgcaacagatgagctacttgctcgtgttcttgaccgtggttttatagatggtgaaatgaaggtatatcgccctgatgttgcccgtgttggagttgattcacagtctcgtgctgcacaagttgtttcagttgaaaggaggacagatcagcttttactgatgggtcgtgaagacgtaattgggtggctacatcagctgaaaggccgtgagcagcagctatcacaggagatttcctatcttcaaagggaactcaatatggttgcagcggctggtagatcccagggttcagtaggtgtagatcctgatgttcttgctcaaagggatcgtaaccgtgatattcttcttcagaaacttgctgcgtcagttgaaagcagggataaagtactggtggagatgtcacagctgctgatattagaaagcaggttccgtcctggcagcagctttaatattgaagatgctagggctagtctggaagccagttttgccaatgaagctgagattgtttttacaactgtgtcaagtagcgggcgtaagttattttctcgcctgagtcatggctttgatatggttgttattgatgaggctgctcaggctagtgaagtaggagtcctccctccattggctcttggtgcagctagatgtgtcctggttggtgatccacaacaactccctgctactgttattagcaaagcagctggaactttgctttacagtaggagtcttttcgagaggtttcagcaggctggttgtcctaccattttgttgtcagtgcaatacaggatgcatccccagatccgtgaatttccatcaaaatacttctatcaaggtcgccttacagatagtgagagtgttgttaaattacctgatgaagcctattacagagatgcacttatggcaccttatatcttttacgacatgtcacatggccgtgagtctcatagggttgaaatgccttcagcgggaattcaaggatgttatgaatactgaggaagggaaggatatctacataaatacagttgatgcttttcaaggccaggagcgtgatatcattattatgtcttgtgtccgtgcttcaaaccatggtgtaggttttgtcgctgatatacgtcgtatgaatgtagctctaactcgagcaaggagagctctatgggttgttggtaatgctaatgctctcatgcagtctgaggattgggcatcactaatagcggatgcaaaggccaggaaatgttttatggacctggatagcattcccaaggacttcttacccatgagggttccatccaatactccaggtaggaattcttccaacaacatccggaggactggtggtggacctagaccaagacgcttggacatgttctcagaaccaagggctggtatgaacatgaggcctgatgaatatgagcgtctgaattctgttccaagaaatggtagctacaggaatttggatgattttgtccaccctggagatcgctccagggataatatgcagtttggacatcctaggaggccaaatgcttctaatggtaggagagaagtctaagtagtgttgctatcaataactctggtacagcatggaacattgatgaagagctctgaacagtccaagattcagcaaggtgcagatgcatgttctgaagatcagttgcttgtgcattagattccttgcaacctttggtgggggtggtcacaataaagcattgctgtcagcggaggatgtgcgaatctaccatgttgtgacctggatcgagacacattcatgataggtgattaaaggctcatgatgtcaggtggaagaaaggctgctgtagccctcagtgttatgaactttgcaggattttcttttttagatcgaagctgtctgctgtgttttgacgttgcagtccttgctttagccagctccatctttccgtatatatgtacatgcatgggcatttccattttgctgctgcgatcgttgcatgccaggagaaagctcactggttctagatgaggataggtctccagcattgttgcctgattgctgccgcgatcgttgcatgcttgatatgtctggtaggatcagtatgctaacataggcaacgcttctgtatcatattcatatgacaaattccttctgtatacagggtcgagatctagagagaaaaaaagttcattatttcattcagctcatgttgttcccctttgttcttgttaatttgttctgtgcatattgttgtaatatgttaccatgtttgtagcactgatttttctgtttataagtggcatgatactctgcttgtatgtt

SEQ ID NO: 18755 - DNA, 1326 bp, Zea Mays
cagatgcacgtcgatgcttaggatgaagaggactacgatggcgtcacagctaggctgtggcagatgctaacaaagcaattggtcttgatcctacaatgcataaagcctactaccggaaaggtgctgcatgcattaagcttgaagaataccaaactgcaaaggctgctcttgagttaggttcttcctatgcaccaggcgattcaaggtttacccgtctattgaaggaatgtgatgagtgcattgctgaggaatctagccaggcaccagcaaagaatgtcgaggctcctgtagctgctactgttgaggacaaggaggatgtcgcaaatatggataatacaccgccagtggtagaacccccaagcaaacctaaatataggcatgactactacaacagtgccacagaagtggtcctcacaatatatgctaagggtgttcctgctgatagtgtagtcattgattttggtgatcagatgttgagtgtatccattgaagtacctggtgaagaaccgtaccattttcagccccgtctgttttctaagattatccctgagaaatgcaagtatcaagttttatccaccaaggtcgaaatacgccttgcaaaagctgagcaggtgacatggacaaccctggattatagtggaagaccaaaggctattccccagaagataagcacgccagctgaaacagccccaagaccttcatacccatcttcaaagtcaaaaaaggactgggataaactggaagctgaagtaaaaaaggaggagaaggaagaaaaacttgaaggtgatgctgcattgaacaagttcttccgtgatatctacaaggatgctgatgaagatatgcggagggccatggacaagtcattcagggaatctaatggtaccgttctctcaaccaattggaaagatgttggatcaaagacggtggaagcgagccctcctgatggtatggagctcaagaagtgggaaatttgaagtttggactgcccctcttgtaaatccaggtcttggaagttatgacctagttctgtccacccatttggtgtcgtaagtttggttaagtgtgtgtgtgtttttggttcagctgtcgttcgaggaaaagctattgtaagttgtggactgtgtaaaagctgcaatagattgtgggttgtgaaaaaggtgtatgctgtttaatttaaacaagcataaaacttacacgtgtctctattttttcattttcttgaaacctgcaattgttctctagtttcatttcgctattttagaaagtagaaaaccaacaaaaaacaggatctgcaataactaaaagtagctgcttctgacaagcagc

SEQ ID NO: 18756 - DNA, 495 bp, Zea Mays
caatgggcgctactctacgagaagtacaaggcgaatgatgtggagatgattttaccggtaatcgagttctctggagccggcccacaacgacccgcgacatcacggtgttgaaagtactccaacgagcaattgggggtatcgctggtggatctcctcgcttggaaaggcccgaacaaagtgcgaataatactgttgatccccccatcgcccaccggggaattgacgtcacaaatcaaccggtgacgcgatttgctctcttcctctctctgcttcatggtggcggcctcctcctacgttctcattcacggtctgaggtcgaggaaagctcacggatggattagcggaggggaaaggaggggtcacgatatataggcatgaggaaagatgagctctgcccaatatcgcgattgatttgccgcggcaagcgcggagttcgcgcggcggaagccaggatttgttgcgatcctggaatattgttccgacaaatgggaccca

SEQ ID NO: 18757 - DNA, 1780 bp, Zea Mays
gtacacgactacactatctctatcctatatcggtgtatatatttggacctaatgctctcatattgaatatagtgcaattcataacagatttcaatcccaaatatcttatgtggtcataactatatttgataacacattctaatacaattaaatatttatgtttagtgctggttcagtaagatgagtttactgtctcaattgatttcatgacgcaggctttacactatgatgtaagaagaggtccacatagcattgggtcacatgttaattgtagaagagctgcttctgctgcctttcaagagaatgttggaagacagggaactttcccacatggcattgatattgtgaatacgacagattactttgcactggcttcccgatcaaactcttatctgaatgttgctgtttctgttgctcagtgcaaggagtatctttatccctttgcagatgagctgctttgcaataaaataactcactgggagaaaagcttaagagagctggcagctcaggcccttgctttgcttgtacaatatgatatgaattactttggtggacatgcccttgaaaagttagttccgtgcactctatcaacggacttgtgtactcgacatggagccactttagctgctggtgaggttgctttaaagttgtaccagcttggttttacttttactacagacatgcagaaaactttgtcaggtattgttcccgcaatcgaaaaggcgcgtctttatcggggcaaaggaggagagatcatgcgctccgctgtttctcgattcatttcatgcatttctatagctgggatatccttgaatgacaggacaaagaaatgtttgttggaaacccttaatgagaatttgcgtcatcccaattctcaaatacagtgtgctgctgttgaggcattaaagcattttattccaacatacctggtatcttctggtgaaaagattgctagtgatattatctcaaaatatgtggcacttctagatgacccaaatgtggctgcaagacgaggagctgcactggcccttggaatattaccattcaaattcttgatgttgaaatggatgcctgtcatgagtaaactctgtagctcatgcaccattgaggataagcctgatgaccctgatgctgaagcacgtgtgaactctgttagggggctaatttcggtttgcgaaacactaacagcatcttttgatcagctctcaaatggagattctctatatgcatacataaaagattatgtcatgcgagctttatttagagcactcgatgattatgctgtggacaacagaggagatgtgggttcttgggtacgtgaagcagcaatggatgcgctagtacgatgcatgttcatcctctgcaagagagatattgttgctttgagagcagtgtcagccactggccatgactctgaactgggtgatatggaagtaaatgcaagtagtactgcataccggctatttgattctggtattgcacaggatctggtagcaggcattgcaaaacaagcagttgagaaaatagataagataagagaaatagctatcaaaaccctgcagagaattctgtaccaccaggaacacctcatcccatttatacctcacagggagttgcttgaagaaattattcccaacagcagagatttggagtgggcggtggtttgcaggagtctttgaagaaagcttcaatgtcagctttggtagggtatctccaagattcagacgtttttctattgcgaagggaaaagtagagagtatgtactgagttgtgacgtcta

SEQ ID NO: 18758 - DNA, 1142 bp, Zea Mays
tacatcagttcatcctcatcgtggctgctagctcaattggcgaggagctgttctaccgcgccgccattcagggagcattggccgatattttcctgagaagcacggagctaatgaaggatgctcgagggattgcatcactgagtggtatcgttcctcctctggttccattcgctcagacgttcgcggcagtcatcactgcagccctcacaggaaccctctactacgtcgccacaactccgaaaggctccagctaggtagtgttaatcttgaaatctattaaaaccctatatatgtgaggtgacaatgcgctgttcactcaaaattttcagaccctacgtatgtggtgacaccagcgatgcgttcgcgcacagggcgtgagaacctcaagaaactatttgcagcttggtacgagaggaggcaaatgaggaagatatactcgccgcttctggaaggaatcttggctttctaccttggcttcgaatggatccagaccgacaatatcctggcacctatgatcacccacggcatatactccaccgttgttcttggccatgggctctggaagatccacgaccaccggagaaggctacggcagcggattcagaaggtcaggagtgaagggagtagctctgcagacgacacattgtaactgcagcatatgtagatcggcgtggtctactgctggatagctagctgctgattgcacgcacgtactgggtgatcgatcgatctaccgatcagtcagaagaccagaggcgtacgtctcacaagttttgatctacttaattaatatcaacaaggtaggtataagattgggcaaaaatatatatataatgcatgtagtcatgtaatgtagatacaatgtgtacatatatggataaatatatgcaggctgtaatcaatataggaagtatatagtgtacgattgcgacatccaagtatgttataatcctagtatcacgtatgcatgcaaggaatataccagccacatcctttctttctcgtccctctcccacacttgcaatgttacatctattcggaacatccatgcacgagaaggctcgatctatggtctaatagttcgatttagtttgtgagtcttagaaagaacatatatgttcaccctatttaagctcttgctg

SEQ ID NO: 18759 - DNA, 2809 bp, Zea Mays
gattaggtatgtctcttgtcttatccgccacacacgacacgacacgcgccggccacagaaacagcgcttcactcccctccgcgccgcggcgaccatggagctcgccaccgtcgccgctgcagtcgcctccgccgctgcgcgcccgcacgggcctttctcctctccccgcgcagtctctgcctccgtctcgtggaccagtctctcgctcgcctacacctcccgctgtctctcctccacgtcctcgcgacggcggctgcgctggctccccgtcacctcggccgccgtggagctccgcgaggccactgccgggggcggagactcgctccgtgtcaccaagacgccgcagcctggatccagtgttaagttcagcgtggaggtgcctacttccatcattcacgagtgctaccaatccacgctacaggagtacgccaaacgtgttaaggttcctggatttcggcctgggaagaccattccagaaaacgttcttataaactatgtaggaccgcaacatgtacaggatgccacgattgaagctatcttaaaacatacgcttcctcaagcactgtcctcgaggagagggcattagaagattctgttcgcattctgactcaatttgatgatatgagaaattctttctcactcgacaatgtgtttagatatgatgttgctgtggatgttgcccctgaagtccgatggttatctgaagacaaatataggaacctcaaagttgtcgttgaaatagatgaagctgttgatgcggaaaaggcggcagagaaagagcttcagcgtcgtcataaagctctaggcttacttagaattgtggctgacagaggcctccagattggtgatctggtggtgctggatatatttgcggaaagcattaacaatgatggctctagaggtgaaaaaatttcatcggctgagagtacaggtttccacttggacactgaggaaaatagtaaccttgttcctggatttcttggttcgttgattgggattcgtgctggtgagactagatcatttcctatccagttccccgagtcatttgagcgagaaagtctacgaggtgtccgtgcacagtttactgttgtgtgtaaagagctgttctacagagagttgccagtaatggatgactcacttgctgtaaagcttcttccaggatgcactacaatagacgaggttcgagagcgtattttgaaaagatgtaaagaagtggagaagacggccatagaacaagcaacagacaacgcgatccttgaccagctcgggaagttggtcgaggtcgacgtccctcgtgccttgtttcaagagcaagggcagcagctttatggagccaagcttctgcagcttcaggcggaaaggaagctggataaagaccagctagcttcgttatcaaccaagaggtcagtgcaggcgtacctagaagatgagaaggagaacattacaagaatcattaaacagatgctggccgttggcgatattttcaaatccgagaacttacagtactcgactgatcagctcgtcaaggaagttgagaactccatagcggagttcaaacagtacaaccaagactatgatgaggacaacatcaggcagcaggtccaggatgtcctagaggcggcgaaggtgcttgaatggctcaaggagaactgctcggtcgagtatatcaggcgatgagtcccacgatgctgggtcaaggaaagctcctctgaacgtgagaaagatggtggctggtgtggcggtcggcagttttgcgagtggccttggtccttgccaatgccaaccagcctagagcagtgcagtgattaagaggtgtggctaacaaacatttgtctattgactcggttcatgatataaattcggatttggagctttagtaactagcatgttttcggtagagacaatcacatcgcattagagggcgtgtttgtttgtgtttataatctccccagattatataatccaacatatttatattttgaactttataaattcatactgtggccgattggtcgatcttgcgcaaggataatcatggaattaagaacgctatacgaagtgcataaatataaaataccaatcggtgtatactataagctaaatttgaggcaccagtattgcacttaaataggataaacataaactaaaataaaataaaataaaataaagcctgagaagcctacgaatcgccaaccatgttattatcagagttctgtaaagtcgtagctaaacggagccacgacagcggtccggcaggcgctggcgctcagcggtaggacttctggaacctggcgcgggcgccgcggccgccgaacttcttgggctcgcagcggcgggggtcggcgacgaggagggtttacagaagagagaaattctggcagatccaattgctgttgccgtcattctgatacaacctgacttgatgactctcaatgaagctgaatgctgaaaggtgttgctgccttgcagaatgaagctttgagttcaatacatggaattcatatttggtggtggtgttttggaacttgtttatctgctaggtgttgctgccttgcagaatgaagccgtccacattgtccttgtttatctgcaagatgcatgcctgctctatttcttgctcttcagtcttgactgatgcctactgcctgagtgcagattcagtgtgatagttagattctgctgatgtgttaacatgttcattgtaaacaaatttcttgttaaacatgtgtgatctcttcaagaccatgtgtctttgacctaatatattgcgaaacattcttcagttgtgtggtgttatcggtttacatgt

SEQ ID NO: 18760 - DNA, 1378 bp, Zea Mays
ggtaaaaataatctaaacatatccaatatttacaacaatgtggcactgaagctcacttgagcagtgctcactgtttccaaaatcttacaggtgacaacttttcaactcctgattgcttaaatgataaagtattgttgacaacagatgaagacgtagttcgacaatcagctgaatctgagccttccaggttcaacttgcaggtttctaggaaacaacgggtgacagtattgcctttccattgtcacgaggatgaatcgatatctgtttcggatcatactgatggtacaaaattttgtaaaggctcaaaagaggttgagcaaccgagcccagtgtccatccttgagcctccaattaatgaagatatttgttttccacgatgtttcaactatgacttgcaagggatggctaacaaacagagaggttgccatcaatatcacaatgaatctgaagttaacatgtcaagtgatgatgaagaccattctttttaccaatctttggaagcatttcaggtcgaggaaaactgggacttctcatatcttctcgacatacttatatgctctggtatcatagttgttgactggcagctcatctgcaagtcatggtacttgcctggttaccctgttggccctcatgtctttgataggcttgaaaggaaatacaataaaatcgcaacatgggcaaagcctgagaggaggcttctttttgacctcgtgaattcaattctttccgaggtccttgcaccatgtgttgatgtgcacccatgggtgcagcctagtagacactgtgtggcattttggggccctgaagggcctgttgagaaggtttggcagacaattgttaggctgcaggaagactgtgtcacaaggcatcctgatgagatggttcttgatacaaattggctggaagtaggcaccgacatcaatatggtggggaagcagatagctaggatgttacatggcgacctcttggaagaagtcatagtggacttccttggttgagttggtagtttcatgtggacataactagtaactaacaacttcggcaacatggggttcgctcaaacttcaagcagattatgctgaatatgtaacggcttttcaagtgcacacatgccgcatttttcttctggttataataggagctatgtattatgtaattacattggagagcaaaatatacaggccaaaaaaacactactgcaggtatttttcgattctgtactgctaagctgtacttcctggtcctatctgatactttgatgggtgtagtaattgtaaggaaaatggaccttaatctagtttggttatgatgtttgatgaccaacatgattatttggactaatatttgattggtgaaaaagtggactgatttagacaaa

SEQ ID NO: 18761 - DNA, 1356 bp, Zea Mays
cgtgccgaagcactatgggccgtgccgtgcttagtgtcggcccatttagcacggcccgtttggccatctatacacagcagtcactgctcatcagcatacgggcagtcgggcactctctctccttccccgtccctgtcgccatctatcactttccccgtttgcgttttggcccgaatctccgtctccgtctccgtctccatctccatctcctagccgccgcggctccactcctcagtcctcagtccgaagcgaactctccctccgcatccactgccaccatgagccgcgatcgctacttccaccgcctcctcgacctccacctccacgccaacgacgacctcttcttccccttccctacccctgcctcgtcctgcccctacatcaccgcctcctccgcccaccaccgcttcctcctcgacgaccaccccttctacccaacctcctgcccgctcggcatcacctcccgctccccgatcgacgacaccttcgacctcgacctcctcctccccctccccctccacgccgccgtctccgcgcccccgtgcgcggccttcgacttcgaccccttcctcctcgacaccctcggccaccgcatctccgtcctcgagcgcgcgctcgccctcgccccaccccgccgcaagtacacctacgccgccgaggccaacggcaggaagctcaagtggaccgccgaggacaggcccgccgggggccgcaacctcaagtgggaggccgagctcaggaccccgcacaccgacggcttcgaccgcaagtggaagtgggagtccaaggagtccgccaccggttccaccaaggtcaagtgggccaaggagatcaaggggaagggctgcctcgagccttggtccaactcctactccgtcgaggagacctacggtgaggatgaccatgccgacgacgacagggagaagaagaaacccactggcgtccagaagaaagtcaagggggaaaacaagcagcagcagaagaagcagggcaatgtggagatcgtcgagatcgaggacaacactgccggatgcgtcgccatcagaaaggcttttgaaatgaaccactgcaagggcaagaggaaggaactttccccacaggatgccgcactgctcatccagatgaactacagggcgcacctggcccatcgctcccaggtgctccgttgccttcgcgacctcgccgtcgccaaggccaagctcaaggagatcaggtccttcttctacaacatcacataccgccgccgcatcgcatatgacaatgaagagcgccagaggtttgctgagaagatcattgtcctgctactgacagttgatgcccttgagttattcaccatttgagccacctcacaattcc

SEQ ID NO: 18762 - DNA, 530 bp, Zea Mays
gtgtcatacacatgacgaggacgaaacattttgtggtgcgagtggcatagatgtcaacagaaataaatgtggtaatggatctatccaagaaaatgaggctcaagcttggtgctacttctgaacctgtgaaaccattggagaagccttcagttggacttgtgaaggatgagcttgtgaaaccatcagagaagccttcatctggacctgtgacgggggaacctgtaaagccaccggagaagccttcagctggacctgtgaaggacgagcctatgaaaccatcggagaagccttctgctgaacctgtgaagaacgaacccagtgagccagctctagctggagaaaacaatcgagctcccaggcctgctgtatgaagttaattgccagtcaatttcaagtcgtgcttgagaagaggtgatggaattgcaagcgagttgtaaggctttctggctcacctcacatttcaaacttcattctatgtgcagtccatggtgtaaaacagtattttgcacaaccatataactctactggag

SEQ ID NO: 18763 - DNA, 1666 bp, Zea Mays
gactgacaaaccgcacctacgtccataaaccccagaagtcgactcctgcccctgcctcgccgccgccgttgcttaccaacctcccgccatggcgacatcgccgttgccgacggcgaccgcctctgcctcgaagaagcggcgttccagaggcgggacgctagccctagatgaggatgtagcactggatgctctcatggatttcgtgaagctggggaaggatgggaagttccattcggcaatttaccacaagtttctctacgctgtcgttcatgctgctgatcccgtcgatatgttgttagagttgcttgtatcaaagtacttcaaatacactgatattcgttacttcacttacactagcttagacaagattgccaacagtctgggcagtaaaaccactggctctggaaaagatgctttgcaaaatggaagtgacgagtcaaaaaacaggagtagtatttttatacacaacatatacaatcttttggcacatgttcctttgatggattttcaaaaggaatcaacatttgatatgtggagtactgttggtctatcttctaaaggagaaaatgactcttccaaggacacttctacgtacatcaataagaaactaaaattgaagttcaccaaagcatggctgtcttttctcaagttaccactaccacttgatgtgtacaaggaggtccttgcttcaattcatcaaaatgtcattccttcaatgtcaaacccttccatcttatgtgatttcttgactagatcatatgatattggtggtgttatcagtgtgatggccttaagtggccttttcattcttatgacacaacacggtctggagtatccaaaattttatgaaaagctttatgcactactgactccggctgttttcatggcaaaacaccgatcagtgtttttgcaagaggttgatgagagtgatagcaatgccacaagagaagctagtcaatctaagaagattggttctgatccttttaaccagaatgatgcagaccctgcgaagtctggtgcaatgcgcagttctttgtgggaaatagacacgcttcgtcatcattactcttctgcagtttctagatttgttgtgtcacttgaggaggatctcactgtccgggccaaaactactgagatgaaaataacggacttcagttcaggttcctatgcaacagttttcagggacgaggtacgtcggcggttaaaacaggtcccccttgcattctacagaaccacaccaacctcgttatttctaggatcagattttcctggatggacctttggggaccaacacaatagcaccgtagaaactactgtagaaggcaacggaaaagtcgaggcagtaggggctagcgacagcacaccttccaaaaggttgcggatggagacctgagaaggaaacaccgcgaatctccaagaattaggccggcttgttggggtagcattgggtggttgtgtgcctctcatttggagtttggtttcccagtgttgtctccaggattgtctgggtgttgtagcttcaattttgagcagaatgggttacgtgaggaaacacttctttcggttacgactaatataagttgtaagcttaattgccaattacagaggaaatgtaccgattttttttttcagtcctttatccaaaacatcatttatgttttgcttt

SEQ ID NO: 18764 - DNA, 199 bp, Zea Mays
cggagatggagagatagttgaggcggcccacggtgtggcacgatctacggtggagcgcccgcaccggcgaggaattgccgatgatatagcgaaggtctgccctgtccgaggtcgacaccacacttcccactctcagacgaccctccgacacgtacccaagggacggaacgccgacgaggatgcagatccgcggtgcact

SEQ ID NO: 18765 - DNA, 225 bp, Zea Mays
gcatatgcatcggttgaactaaataaagctcgctaaagtaaactaagctagtctacagatatgtgcatatcacagcatcagaaagttagtacaccaaataagacagtgcagacaattaatagccaatattcagtatattgatctaaatttcgtgtgaaatcatttcaacttggaacagaaacggtattttccaaacggtatagccttgggttctaatttcgatca

SEQ ID NO: 18766 - DNA, 614 bp, Zea Mays
ccgctgtccaccgcgcagttccagacagtgcgaaccgtttcctaaaaaaagttctagtgcgaaccgagattcccaatcccccaaacatttcgtcgaatccgccgtgagatccgcccgactctcgctccgttccggcgctctcggtcgggcgaaggctccaccttcctccgacaagatggcggggaagggagccaaggccacggccgccaagtcggcggacaaggacaaggggaagaagaccggcggccccgtctcgcgctcctcccgcgccgcaccccattcagctccgaagaaagatgtttatcaattgtttgctgagaaggtcagggataacaaacaactggaatcaagatgggcgatcatgcaagaaacccgcgtggagtatttccgtggaaaagatttcaataccttcgtcaaaaatcatccagaagtcagggaaattttggggccagataaggatttagaggtggaagacattgttaacactttgctgaccaagaaccttgtgataaggtgtgatcgagtcatgaaaactgtgaggcctggcaagaaaaagctatcgtcatggcctgctcatttggagatacataatggggtatgctgattccattcac

SEQ ID NO: 18767 - DNA, 870 bp, Zea Mays
aaggcaaggcagcatgtacacccagaggccagagctagtgatgactgatgactgacgagcctctatagcatacagcaccgcgcgcggcggagccaaagccaaggacggtccggtcgtatgaataagtatcacccccaccagaaccccaagccacacaccaggcacgccagcctcactcactccccagaccacctcacacgcacgaagcagcagagcagtggactggactagcaaggtgggcaacatgaagcctgcggccaccgccagagttgctggcctcctcttcttcctcgtcctcctcctggcgctgccttccctccgcgtctccatggctggatcagggttctgcgacggcaagtgcgcggtgaggtgctccaaggcgagccggcacgacgactgcctcaagtactgcgggatctgctgcgccacctgcaactgcgtgccgtccgggaccgcgggcaacaaggacgagtgcccatgctaccgcgacatgaccaccggacacggcaaccgcaccaggcccaagtgcccctgatgatattccttccttcgctccggggagccagctgccagctggggctgtcttgcatgcgtatgtaatgtataggctgtgcaatgcatgcatacatgatacatgccgtgactctggatcggtggatgcctatgcatgcttttcagttttcactagctgctactactactactcttcctgtcttcctagttcctactatgtgcaccagagagtgagagggacgacatgcatggagatgagatgtcgtgttatgtgcactggcggccgcttggccagactacagtgtgctcaagtcaagtgtggttttgccatgccatccacaagcttcgtgcggtgcg

SEQ ID NO: 18768 - DNA, 1005 bp, Zea Mays
aaaaagctcacgagaattgaacgaagtaaacaatatctcagaacattagaaaatcaacctaaatatccactcccgtcgtcctggactcgcagttcatccacgacccaccgaaccacaatggccacgttcctgggaagctcaccggcgctcctcgctcgtcccattgccaagccgcacatctcctgcgcgcagacaccgcgcccggcaattgcccagaaccagccgccgtccagcgagcagccggaaccacagaaacagcggcactccgtgcaagcgcagccacagcaggcggcggcggcggcgaggccgaagcacgcgggcgtcgcggactccactgactggatagcctcgtcgttgacgcggcggtccggaatcggtgcggggctggcgtgggccggcttcctggccgtcggcgtcgtgtcggagcagctcaagacacgcttcgaggtcgcgcagcagcaggccaacaccaaggacgtggagcaggagcacgaggtcgtgttgcccaacgggatccggtactacgagatgcgcgtcggtggcggcgacgtcccgcggccgggcgacctggtggtaaccgacctgcagggccgggtggccggcagcggcggggaggcgttcgtggacacgctcggcgacggcaagcggccgctggcgctggtgatgggctcccggccgtacaccaggggcatgtgcgagggtgttgagcacgtggtgcgctccatgaggccaggcggcaagcggcgggtggtcgtcccgccgggcctcgcgttcggcgacggcggcgccgacttcggggaggagcacgtccagatcccgcccggcgcgacgctcgagtacgtcgtgcaggtcgacaaggtgtccatcgcgccggcgtgagggcctgccgaggcgggagccggggcgaagctacattattcttagagcttcgatatagatcaagagaaatacggcgaagcaagcttcgtcacgacgaagcaggaaggcgacgcatggagaaggtgt

SEQ ID NO: 18769 - DNA, 2160 bp, Zea Mays
aacacacgtggattgcggtgaatactagagtatccaaataaggcctaaggggtattaaccccctcccccccaaaaaaaagtcctgggaatctatttactgatttcacttatataggtgtagtgttaggaaacattttagcgtcggaaaacaagattttgaagcaattaagtgattttgtattttgtgctctttgaggttgtggaaaacaagactcgaagtggttgaagtgattctgaccagacctactgcattatgttttgagcatatctggtcgtgtagtgggtttatggcagtagggattcagtgctatcgttttcactcattagcgcatttgattgtaaacaaatacatccttgaaagtgtttatgatacattctccggtgaacctcatcttcaggtgaggcaaagagaggggagattaactctcccagcaaatttataatcctgacatggtttcttgaacttttttattgtagctagatggaacaagatactggatgaagtaccaagaatcagattgttttgttctagaagactctactgaccaccttcacatgctatagtatattgctggcctatcattatccctgttattgcagatataaatatacaaaagctgaaatttacagagaacctcatccaagcgaacataatgccttatgactgacctgctgatgaccatttctggtctattgcaacctgcagggcttcagaaaggttgatcctgacaggtgggagtttgcaaatgaaggtttcctcagaggtcaaaggcacctgctgaagatgataaagagaaggaagccaccatcagctgtggcaccattgcgacagcaacgtgcccctgcttcttgcctggaggttggtgagtttggatttgaggaggagattgataggctgaagcgtgacaagaacattttaatcacagaagtagtaaaactaaggcaggagcagcaaagtactaaagatcatgtgagagccatggaggaaaggctacgagtggctgaacagaagcaggtacagatgatggggttcttggcaagagcaatgcggaacccagagttcttccagcagttggcccagcagcaagacaagaggaaggagctcgaggataccatctcaaagaaaagaaggcggcccattgacaacacaccattctacagtgatggggaaagcgaacagcttgattcacagttgaaaatgttcgagtcaggtgttctcaatgggctcaatgaacctgagctggagaatttagcagtgaacattcaggagcttgggaagggaagcatagatgatgggaacttgactcaagttagtgaccagtcagagctgaacgacgacttctgggcagagcttttggtcgaagattttggagacaaggcaggacagccagagttggagggaagaactgaagacgtgaatgaccttgctcaacaactggggtatctgagttcttctagcccaaaatagagccagttcctaatggttgcccccacaatcactggtgctttccctaccctactgttgcagaccatcctgatcaaaccggaatgatgatggatctggcagacaagttgactggtggtggagaggtgttcatactgaaggcgtgctgtggagaggtcactgccttgacgttgaaggcttagcgctgtactctgctgtgggagttacgtgtggggtgttggctaaatgtctcttccggcgtcttctggcaaaatgatctcgtggacggtgactggcaaagatgcctaggggccaacgtatacgtacacagctgttatcagatcttgttcaaagtcattgcgcggttttgacggtgctatgtatcgatcagggttctggccttctggggttgggttgtagaattgactggctgatctagtgttctccatgtatgactggtgtaaccttaaaacaccctcagcttgttgttgaactgtgacaagcatctcgtttttttgttgtactccattttcatcatcattgtacatcaaattgctgaattatgaacagatccctaataatttggtggactgcgtcttggcatttggctacggcccagcttgcagtgtagttgatacatgcttttgttgaagctcttgccataggttgggcgcccacagtacgccttctgcatgtgcactgtcacagttggctag

SEQ ID NO: 18770 - DNA, 5632 bp, Zea Mays
gtcgcaggttcgtagcagcctcttctacatttgcaggggaaagacttgcctcggtttatcccttccctagaccccactcttgtgggagcctccgtcactactcactgggtccaggtggtgtattagacatgtctttcaggaagcgccaaccttccagtaacggagcttccattaatttagctcccctgggttttccaagtcaggaacttgagaaggttaatcctgtaaattcagtgatgtcaaccgattttgaatccatggatggtgttgatattgatatgagggaagtttactttctcattatgcattttttatctcatggtccattcaaacggacctttggagaattgtgcaatgaactcctagaacatcaactgctacctagaagataccatgcttggtattcacgtggtggtttccatagtggcgaagaaaatgatgatggcatatcactccctttggattatgtaaagctagctgagaggtacccccacattggtaaagaccacttggtgaagctattaaagcaactgatggctagttcttatcacccacacaacttgattggaagagtttctccaaatgctgctgatgtcccaacacttcttggctccaactccttttcacttcttccatctgacaggcaagataagggaactcccaggctgccaagttatcttcgttggcctcacattcagactgatcaagttcatggtctaagtttgagagagataggtggtttcactaagcattgtcgagctccctctgtacgtgcatcttgctatgccatcgcgaagccatccacccttgttgaaaagatgcaaatcataaagagattgagggggcatcaaaatgctgtgtattgtgctacctttgatcgcacagggcgttatgttattactggttctgatgaccgccttgttaaaatatgggcgatggaaacagcgttctgcctggctagctgccggggccatgaaggtgatattaccgatcttgcagtgagttccaataattctgtggtagcatcttcatctaatgatttcattattagagtgtggcgtatgcctgatggaatgccagtctcagtgctcaaggggcatacaggggcagttactgctattgcatttagtccaaggccaggtgctgctttccagctgttgtcgtcatcagatgatgggacatgcaggatttgggatgccagatactctcaacaacctccaagactgtatacaccaaagcccccagatgttgcccctggtaagagtggtgatgcatcttccagcgccgctcaagttcagccaacaaatcaccagatcttatgttgtgcatttaatgctaatggaaccgtgtttgtcactggcagctcggacacttatgcaagggtctggaatgcttgcaagagttcttctgatgaacatgagcaaccgattcatgagatggatctattatgtgggcatgaaaatgatgtaaactatgtgcagtttagtggatgtgcagttgcatcaagatctttttcatctgattccagtcatacctctaaggaagaaaatagcctgaagttaagaaattcttggttcacgcataatattgttacctgctcccgtgatggcagtgcaattatatgggttccacgatctcggaggtcacatggaaagattggacgttggacgcgtgcttaccatcttaaagttcccccacctccaatggctcctcaaccacctcgaggtggtcctcgtcaaagataccagccaactcctcgtggtgtcaatatgatagtttggagtctggacaaccgctttgtgcttgctgctatcatggattgcagaatttgcgtatggaatgcttctgatgggagcttggtgcattcactgattggccataaggaatcaacgtttgtgctagatgtgcatccgttcaatcctcgtatagcaatgagtgctggatatgatgggaagacgatcatctgggatatatgggaagggaaacctgttcagatctatgaaacaggacaatttaaactagttgatgggaagttctctccggatggtacatcacttattttatcagatgaagttgggcgagtattcattattggaactgggcaaggagagtcccagaaagatgcaaaatatgatcagttcttccttggagactatcggcctctcattcgtgataccaatggaagtgtcattgatcaggaaacacagcttgcaccatacaggagaaatatgcaagaccttttgtgcgacgctggtatgataccatatccagagcccttccagagtatgtaccagaaacgccggttgggtacccttggtctcgagtggcggcctccctctgtaaattttgctgttggccccacttacaatgcaacaactggtgaataccaaactatcccaattattgatccggataggtgggaaccgcttccagagataacagatttcattgagcttgaacctgaaaatgaagttatctctgacgatactgattctgagtacaatggcatggatgagtattcaagtgaaggagaacaggatattatgagtggtgattcttcaggtacttcatattcgagtggagaaattgatgcagataaccctgatagtgctcatctccgccgatcaagaagaaagaagaaaaaatctgaggctgatcttgttacttcatctggtcggcgagtcattaggaaaagatttttggatgatcctggtgtagccacagtgtcaaggccacatagaggaaggaaatctaggaatggatgttctagtaaaaagaaaagatcccctaaatccaggggtttgcgacctcggagacgtgctgctgaaaccgcattaattactttcccaaagaaaggagtttcaacagaagaggatgaagatgactccgagagtttctcagatagtgaattgaacacggatagcactgaagctgaacagttagaatggagtggtcagttaagaactagaagagagattaactccccatttgacatcgatgatgttacagatccttctcagtttactgataataaggaaaattctggaactggtaagaaactagttctcagaataccacgacgtgatttaagaactcaatttcctttaggaagcggaaaagcagaatgctccatacaggataaagcagtgaagtctctttctctagctaatcatgaaccagttgagcacgaactgactattgaaccaggacattcccctgcctccaaggctgaattaacaattgatggtgatctgcatgatagttctgctgtttgcagtaataactcaattaggtggggtgaggttaagatgcgatcctcaaagcgttgcaagtacagtgagccagctggaggtttgtggtcctcttcaaataacgttgctttgcaggatatcgagggatcgagcagtcagcagatacctcatgaatatggcgatggcatccagccaagtgttgtgcaaaacgtacaagaagtgcaacatggaacaattctagataacattccggaaaacaacagtactgatgaacacactagagaaaattttggggatttagaaaagatagctaacaatattaatgctcatgcagacggagtgaatgacactgtacaagttcccaatacttctcagcctcaactaaaagttaagtttaagtcaagaggctctgcagatgcagtaggaaatatcatgaactccaagcatgtcaaagattcagtgcagtgtggcgatgattcttccatcaatcaaccaagaaatgctgacttctatattgtgcccaaaagttctcaggaatgcctagataaaagcactagtttgcatgattcaaaaaaaccgtacttggatgcttcaaagaagtacactgcagtgtacaaaaggtcaaagcgaaagaacaagaaaaaaatggattcagatgaatgtccgaacgaggatagcacttctatctccaatgacgatggtggataccaacctgcagaatacagtcctgttgcagctgcaagcagtagattgagaagaagtgctaggaagtcatttgcatacaatatcaatggtacaacacaggatgatatctcggaagtgaaagtttcttacggttcccatgaagcatcaactagtggaagacgagttgtcacagatgtgcgtgaagggatgtggcgacaaaactcaagaagtgttggtttaaggtctgctaggaacaaaagagaaagtaacagcttccttgatacacatccattgggtagaaggcaccaggtttcttttaagtattcatggttaatgttgcttgagcatgaagatagctaccgttatattcctcaactcgatgatgaggttatgtacttggggcagggccatgaggaatatcttaaacaagtgcaatcatctgaattttgcccttggaaccggataaaaggacttaaagctgtagaactttgcaaaatacagggtcttgattatgccacctacagaggatctggtgaaagctgctgtaaattaaccattgaatttgttgattgcacgtccagtggatttggcaaaacatttatgatcacgttgcgtgagctggtcaactttccagattttcttgtggagagaacaaggtacgaagctgctatggagcggaactggacccacagagacaagtgcaaagtctggtggagggacgaagaaggacaggtaggaggaacttggtgggagggacgggtgatggcagtaacacctaaatcacctgattttcctgagagtccatgggaaaaatatgtcatacagtataaggaggatggttctgatcacgctcatagcccctgggaacttcatgagacaggcagtttatgggatccatggaaacatccacatatggatctcacggttcgagataaattgttatcagaaatggaaaatttacaggaaatgtcacacagggatcaggatcattatggtgtttttaaactggacaaggttgcagaaaagtcagatttcatcaacaggtttcctgttcaattttctattgaggtgatcaaggcaagattagcgaacaaatattacagaactctgggggctgtcagacatgataccactgtgatgctttcaaatgcagaatcttacttttcaaagagcagtgaaatgaccaaaaagatccgcaagctctctgagttgctcgaccagatcttttcatcactgtagggaacattgcttgatgcctgattgacaatttcccttttcgtttctgcaaaaaaaatttggccttaggcatcgagatgatttttactggtcctactgaggcattagagaattagccaaagtagttctcaggacagaaagggtttccggtgtagctccaaccagttaaactagttgctgatacaaagtgctcgttgctaacacatttgaccgtttgatctgttgtcaagatacaatggttcatcctattggacatgaaatattggggttttgttagagaagatgccaaggtgtaaatctggtggaggaaatgcattaactgataatttcattttgtacagacaccctcagcaataaaaggaaaaaaagaaatgtgcaacgttgtctattacattttggggtgacacatggtaactataatataggaaattagtggcacttttttcagcgtgcccaggcac

SEQ ID NO: 18771 - DNA, 801 bp, Zea Mays
tgaatttttttttctgaactcgagagatatatccttttggattaaggaaaattgccagaacaccctgtcaaaactatgttgccaaaatgccattgatctgtgactatgccaatgatagttggtagtcttgtcccatatgtcatacacacactcttggaatgttggcaaagtgctatttcactaatggtatggcggcaacttcccaaacactgaatgacgtatactgcgtgggattccaaaatggtgcatcacagtcaaaggatggaaaggacattgtgcttatgggagatcttgtcctttccaacaagttggttatctatgacttggaaaatcgagtcattgggtggactgactacaactgttcgtcgagcattaaaattaaggacgacaaaacgggcgcaacatctactgttaattcacatgacttgtcctcaggatggaagttccactggcacatgtccccggttctattgttggtaacaacggtgtgcagttatttaatatgctaactccactgtacaggaaatccatctggttcgtatatcctttccacgaaaaggatcggagagatgtagggctatctttaggttgtgttctccgaccacggaaaacaatggaaatagaaaaatactgtaatgctatactgagccattgtttgactagggtaatgccgaggtgaccgcacgtgagttcagtttcccgtttaaaaaatatgcatgtacagcagcaatgtatatggccaaataagaatttcttttgtttgcagtacagcaatgttctgtcatttctttgggaaaacaa

SEQ ID NO: 18772 - DNA, 3680 bp, Zea Mays
atggcagatagcgaggcttgctgttcagccatgtcgacggcgcaagggacagcgttgaagtcggcgccgataggcgcaggtcatcgggcccggcgcggccgccccgtggtgccgccgtaccgttctggctggcaagcatacggcggcgtttccctcgagggcagcgggttcctcggcggcctgcagcgcaccgaggagcgcgtcgctacgctggcgccccgcgcggcggcgcgcgacgcggaggtggactgatcagtccacctccgcatcatgatatttattcgattgaggatcttgcacagcttatacatgatcttaagaattcaaatcctggagcccgtatcagtgtcaaactagtttctgaggctggtgtgggagttgttgctagtggtgttgtaaaaggacatgcagaccatgttcttatatctggccatgatggtggcacgggagcttcaagatggacaggtatcaagaacgctggacttccatgggaacttgggttggctgagacacatcaaactctagtagcaaatgggcttcgtggtcgagctgttctgcaaacagatggacagttgaagactggtagagatgttgctgttgcttgcttgcttggtgcagaggaatttggttttagcactgcaccactgatcacactcggttgtattatgatgcgaaaatgccacatgaacacttgtcctgttggtatagctactcaagacccagtgcttcgagaaaagtttgctggagaaccagagcatgtcattaacttttttttcatgcttgctgaggagctaagagaaatcatggcaaaccttgggttccgcaccattactgaaatggttggacgttctgatatgcttgaggttgatccagaagtagtgaagactaatgagaaacttgagaacattgatctctcactaatcttgaaaccagcttcagagattcgtccaggtgttgctcagtactgtgttgagaagcaagaccatggcctagacatggcattagataacaaactaatagatctgtcaagaactgctattgaaaagcaagttcgtgttttcatcgagactccaattcagaacacgaaccgagcagttggaactatgctcagtcatgaagtcacaaaacgttatcacatcaatggattgcctgctggtacaattcatgtgaagtttactggaagtgctggtcaaagctttggtgcttttctttgtcctggagtcactcttgaactggaaggagacagcaatgattatcttggtaagggattatctggtgggaaaattgttgtgtacccaccaaggaacagttcatttagtccagaggacaatattgtcattggtaatgtggctttatatggtgctaccatgggagaggcatatttcaatggtatggcagcagaaaggttttgtgtccgcaactcaggtgctcaagcagtggttgaaggaattggagatcatggatgtgagtacatgactggaggcactgtggttatccttgggaaaactgggcggaactttgctgctggcatgagtggaggcattgcctatgtttatgatgttgatgggaaattcagtgctcgctgcaacaatgagttagttgatctatatcatgtggaggaagaggatgacatcatcacattgaaaatgatgattgagcaacatcgtcgcaacactgagagtgttttggctagagacatactctccgattttgataatcttcttccaaaatttgtaaaagtatatccaagggactataagagggttttagaaaacatgaagttggaaaagagtgttgctaatcatgcaaaggagcctaagatggtaaatggaatatctgtgacgactaagaaagtacaacctgatcagtcagcaagccggccaacacgtgttgccaatgccaaaaagtaccgaggttttattacatatgagcgagagagtatttcttacagagatccaaaagagcgtgttaaagattggaaggaagttgcaatcgaatcaacacctggtccactattaaatacacaatctgctcgttgcatggactgtggtactcctttctgtcatcaggaaagctcaggtgctggctgtcctcttggaaataagatcccagaattcaatgaattagttcaccagaacagatggcgcgaagcattggatcgactacttgagacaaacaacttccctgaatttactggacgagtatgccctgctccttgtgaggggtcatgtgttcttgggattattgagaatccggtgtctatcaaaagtatagaatgtgcaatcatagacaaaggtttcgaagagggatggatgattccacgacctccacttcaaagaacaggaaggaaggtggccattgttggcagtggaccagctggtttggctgctgcggatcaactaaacaaaatggggcattttgtaactgtgttcgaacgtgcagaccgaattggaggtttaatgatgtacggcgttccaaacatgaagactgacaagattggcattgtccagcgccgtgttaacctaatggcagaagagggtgtcacatttgtggtgaatgccaatgttggtagtgatcctctgtactcaattgaacgtctacgttctgagaatgatgcagttattttggcttgcggagcaacaaaaccaagagatctcaccatccctggacgcgagctatctggagttcattttgcaatggaatttctccatgcaaataccaaaagtttactcgacagcaacctggaggatggtaaatatatatccgcccgcgggaaaaaggtggtggttattggtggaggtgatacaggaacagattgcattggcacatctattaggcatggttgcaccagccttgtaaatcttgaactcctgacaaaaccaccaagcaatagagctgctgataacccatggccccagtggccaagaattttccgtgttgactatgggcatcaagaagctgctaccaagtttggaaaggatccaagaacttatgaagtcttgacaaagcgttttattggcgatgaaaatggcaaggtgaaggctcttgagttagtgcgtgtgaagtgggagaaagtagatggaagatttcaactcaaggagatccaaggatcagaagagattattgaagctgatctcgtcctcctagctatgggattcttgggtcctgaagcgtctatcgctgagaaactgggtttggagaaggacaacagatcaaacttcaaagcgcagtttggagacttcgctaccagtgttgatggtgtgttcgcagccggggactgcaggcgtggacaatcactggtggtatgggccatcacggaggggcggcaggctgctgcagcggtagacaagtacatatcaaggcatgatcagaatgtcgcaggcgacatcactccctttggggcagggctcgttcagccggttggagcataaaaaaaacatagaccgaggcatgttttaggttctcgtcagtggttcctcacagcaaattttgttcttgtatattttgacgatagataaacagttgaaagttttggtgtctattgtttctttttcttctccggttattatgttttgcgtgtctgcatgtggttttctagtccaaaatgtacagttttccttttattaaatagatgtaaatttggtgggtgatatggcgatcattttgtgtgtatatgaaag

SEQ ID NO: 18773 - DNA, 1384 bp, Zea Mays
gtaaatcaataccactcggtccgcgacgctttcctctcccttcgcgatgccgacgatttcctcgcgttgcctcccttcgcgccgccgcctccctcgcgtcggccgtcgcctccccccacatcggccgtcacccctcaccggtgagtatcgtcctctccctccctccctctctagctgtttcctttctctgacgatgcggatccccgtcggatggtgtggatctaggcgaccaacctaccctcgacctcctctgctgatgcggatccccagcgggtgctgaccgtgacgggacctccccgtgaccgtgctctgctgcgtggtgcgcgccccgctccgcgttcggctgcccggcggcggctcgcaccaaaacagttcatgttttgatgcatccatacgagcgcttcccagtcgattcaatgcatccatgttcgcgttcggttcggcggccaaaacagtcgccgtgtgctccgtcaggcatcagcatcaggcttcccaatcgaaaaatgtgcatcagcatcaggcttgtccgttagttaagttcaaagaggcattccataccagcgcgcaacatcattcagatatcccaccactactccttgtttctagtataaataaatgtgcatccaagtcactcatgaggagcaacaagctggagtagctagcaactcgagggatgaagactagttgataggctagctttctccttctgtgccactcataaaacaacagctaggtagcacctttttgttgccaagcaatgcaagatctatctgctgagatcaatctgaatacctaaaatatctatctggccggtcatcagctcgatcttaagcaggtgatcttcatttcacatgcatgcttgttccttaccaaaacttgtttcttccaattctttctcatatatcctgcgcttagtgatggttactaatcagggatgctctttattgagcaactagtctagtctagtctagggatgcaaatttgccctctatattttcttgtcttgtttatatattgtgctcaaagaaatctgatttttctatactaaccttgaacaacactatggcccgtcttcctttatctacacgaacgcggaagagaaatttgacatttagaaatgtgacatctgccattatgcttatgtactattatatcttggctttattagtactatcacataagtggaagtgttggaagatagaaaggaggataaaggttaaagaacttagaagtcaacgtatgtaccatctaatctgtgagagcgatgttaagtgtataaatgaccttcgcatggataggagaacatttcatatattgtgtgatatgcttagagatgttggtggtttgaggggtacaagaaatacaccattggaagagatagtag

SEQ ID NO: 18774 - DNA, 2801 bp, Zea Mays
tagggccctaagtcgttggagactcgtcaatttatgttctgtgacatcgtacgagcacatacctaataagaaattaaagttacagtgaaaggaccatcttgtccttcaaaccctagctagtttttcctatataaaccctggggggcgtacatatatatcacgcatcaaactagtagcaaattaataatccagcgaacacactatactagtgagcaaataaagccaccgatgtcatcactcctgttgcgagtgctgctcatccagcttgcagcagtggagtgcctctccgccgcgattccaggctgcctaacgcaatgtggaggcgtagagataccctatccattcggcgtcggcaccaactgctcccgcaaagggttccggatcaagtgcatcaacggcagcgcgggcgaggagattccagtgctgctacctactacgcgctaccagaacatccgggtgctgaacctgtccgtgtcgccgttgccggaggctcgagtgcttcttccggtggcatggcagtgcttcaacgccaccgggggcgtcactgggatctactcgggagatgtggacttcaacccagagggcgtataccgcatctccaacacacagaacgagctcttcgtcctcggctgcgacacctatgcgttcaccaaaggcgtgagggtgcacaacgttaacgcacgcttcccttacagatacttcacggggtgtatcaccgtcagtgtagacgacaaggacccgcgcgacggtgcctgcgcgggcctcggctgctgccgcgtcgacatcccgccaggcatcacggacaccagcatgaccttctcgtctacctggacgcgtgccaaccagaccttctgcccctgcgactacgccttcatcgtggagaagggcaactacaccttcaaggcatccgaccttgtgtcgcacacacccgacaaccgtctgcctttggactggtggaccatgccactgcgtctcgactgggccatccgcgacaacaacggcgactccatgacttccatctcctgcgcccaggcacccaacgaacctgactatggctgccgcagcaagcatagcgagtgcactaattcaaccaatggccctggctacttctgcaagtgtgcccatggctacgacggaaacccctatgtccagagtgatggtgaatgcacgaatatcaacgagtgccaagatccaaagtcacataattgttcaagtggcagcaaatgcattgacacagacggaggctattattgtcaatgcaatttcttccgaagagggcagcaatgtgatcccttaattcctatggctgccgttgcactaaatggaggtaaactactgaatgcccagggcataaccacctacaccaaaagggagctgaagaagataactaatggctacagcaaacgccttggaggagggcactttggcaatgtttacgagggcaccatcgtcgacggcagaaaggtcgccgtcaaatgtcctttgcggacaagggtgtcgtcgcaccgctgccattggaagaatttgattcgacctcgccgtgtaccgctaccgcaacagagggtggaggaagatgggtcgttcatgaacgagatcaggttccagttcgaagtcagtcgtcacaagaacttggtccagctcctgggatgctgcctagagaccgacattccgatcctagtcttcgagtttgtcgccaatggaagcctggaggacatacttcatagtgccaagaaaccatgtaccctctcgctgccggagcggctggacatcgccattggctccgcggaagctatcgcctacatgcactcccttgacaatcaaaagcgtgtccatggagacatcaagccttccaacatcctccttgacgatgacctcaatccaaaagtctctgactttggttcctccaagctcctggcaatccatagctactacgttagggcagtggctgcagatataggctacatggacccattatatatgaagaccgagcacttcacattggagtgcgatgtctacagcttcggcgtggtgcttctggagctcatcacgaggagaagggccagctggtatgaacaagatcaccaagggaacaagatcctccccatcgagttcgtcaagtgcttcaaggaccacggtagcggatgtgcgatgtatgatagcagacttgatttctcagctggcgaggatgctcaatctcgatgcaacaagcgttgcctcgacatgattggcatgttggccgtccgatgcctcaaggaagacaagagggagaggccaaccatggcagaggttgtcgaggagcttaagcgagtgaaggtactactgctgggtacacatatataaaataatggcctgcagcaatcaagcgagttcgaagcacgcagatgaatggaagcgaagcaagcaataagaatggtcggtcagcacatgtgaagcgctgaacatggcggcggtactgatacaagcaataataagggttcctcaactcaaataaatatacatgatttattctcttccaataaaacagcaatgtctatctgtaaacatagtaattcgcatgaattgcttcgctttatacttcttaatttgatgtatgtccatacaaataattgacactatatatcgagcaccaaaagtgacggacactatatatcgagcaccaaaagtgacggacggtccggccttagagcccgaacggtccgcggccccgcgattagatcaactcagttgatcatccttatctcgtgcgtggtgatctatctaatcacgtgtgagttgttagctatcttctaggaacaagtcca

SEQ ID NO: 18775 - DNA, 427 bp, Zea Mays
agtaaactcactacacaaaaacatgcatacgtggagaacctggagaaagaggttcgccggctagtggatgacaacttgaagctcaagaagcagtgcaaagagctgaaacgggaggtagcggcactggtcctcccaaccaagagctcacttcggagaacctcatccacccaattctgaaggggcgaagggaaatgaaatatatagatttatatatttggtggtagcagtagcagtacaaagttaagatcgagaaggaatatggttgttggacttgtgctgtgtgcattttttcagtgccagtgtgtgtcggtgtgtgaagcaggggcaaggggacatatatatgaattaggcaatgtgctatgacctatatatatatataatatatatatattgttagctcaaatgatatagggttttataaaaaaat

SEQ ID NO: 18776 - DNA, 652 bp, Zea Mays
gttttgacaaagctatgtttgtcaggaggttgctgagcttttttatgaacaaaacgtgctggaggtggaacctgagattctcccggacatcagttggcgtctctctagttcagtagatggtaaagcaaagattgatgaagaccgtcttaccgatgctgagcttgaccagtaccattctttggagaacaatccaattatttttgagctgagagacgagccagcgatcccgcagctgggagtgtattgaagaatctgtgccagcaggacagaaagctctgtttgcttgctgcttgctctggagtctggagttgtctagtctagaattctagtaggtcttgaacctggtgttttccccagctatgttctagtgggatgttggtgatgtaggatttcagtttgagtactggtaccagttccagctgaagcgacagccttatggctgctgatgggtgatggttgtggaacaacgggcgatataattctaatattttcagcaaactagtctgtggtctctatatttattctcgtgaatcctaaacagtgctaagttttttttggccctaatctatggtctctataaaatcgatattatttttactattttaatcacttttagcttttactatttagatcttctcctaagtcactaaac

SEQ ID NO: 18777 - DNA, 1367 bp, Zea Mays
gctggtagccaccgtggcgttgcgagggccaactaccctgtcacctccgctcatggccaggaagaagaaacacacgcatggggaaaaacgcacaggaaagaagaaacacaagggaagatagaggaaagggagagggggttgagaccagcaagaagacactgatcctccatggtaccaagactagtgctgtgttgaactctgtgctgtcagatatttaccacctaaagcgtgataatgctgtgaaatataccaagaagaatgacaacattaggccttttgaaagtggtggagaatcttctctggagtttttctctcttaaggcagactgtagccttatagtgtatggttctcattcaaagaagaggcccaacaatctgattttgggtagaacgtatgaccaccacatatatgaccttgttgaagtaggagttgagaactacaagtcaatggaatcttatgtttatgataagaagctagcaccattacttggatcgaagcctttctttgctttcataggggaacactttgagagtgctgaagagctgaaacatttgaaagaagtgctgcttgatcttttcagaggagaggtcgtagagaatctgaaccttgctggtgtggatcggatctatgtgtgcactgcaatctctcccactaccgtctacatgatgcactgtgctctccgtctaaaaaggtcaggtacatctattcctaggatggaactggtcgaagttggaccttcgatggatctggttgtaaggaggcacagacttccagctgaaagtttaaagaaagaagctatgaagaccgctgaacatgctaagaagatgaaaaacgtcactaaggatccagtgcagggcaagctgggcaaggtctacatgccagaccagcaggttggaaagttgaccttatcaaacgacataaagggactaaagagggagcgccgtgaagccaagaaaaaccaggactcaaagaagcaaaaggtcaaccccgagtaaagatcactgaagtttacctttgcattggatacaggtcaggttaagaaaccctggtttgtatctgttcccatctgctgtgttatccaattagaagttgctcgttgtcagattgtgttaaatagtttagggccatcttgttaggctaaagacatgtgtacgactttcacaacaatattgcgtaccaattcatgttaagacgtaagcatggaaaaatttgggagtgttatcctatcaaatatcttttgatgtctcaagcttggataaatgaggagggttacgataggcttggcgagccaacgttaaaggtagcaattctggagattgaaacataaaatacctaaagatttagccttgattaggaatgcatgaaaa

SEQ ID NO: 18778 - DNA, 959 bp, Zea Mays
gtggcagtggcgcacacagacaccacacgggttcatcttctagctcccctagattgcccggacggggtactggccaccagttcaccatatgatagagaagtgcatctgcttcaacctgagcaaggaagagtgcatggacgcgctggagaagcatgccaacgtcaagcctgtcgtcacttccacggtgtggaaggagctagagaaagagaacaaggagttcttcgagacgtacaacaaggaccgcgaggagcggaaggtggaggcggagacgatggcgcggatcgagaagatgctctccgaggcggcggcctccaagagctccgacgacgaaggctagctagctatagcacgcgatccgttagcttagctagctctctagagctatagatcatgcagctccgacgatcctctccatgcatgggaattgggagctagccttctcgtacgtacatgagaccattctatttaattagctgcctatatttatatcttgctacatacctagctagtacaacataacacgccgccactgcaacaaggaccatgcatgcatgatgtgtatatgtggtacgtctggttattattaggaccagaaaagttatgttttacgatgtagaaagatgcatatgcatgtattcgaccaatattacacataagaatctaccatgcctgtagctagctagggtcatgttaaagcaaaaggtaggcaggcttgtctatcattgactgtaaccttccgtgacacgtggcagctggcgcgcgaatccaccagtgatgtcctgtacctcatcgggggttgctacttggtacttgccgaggtagccggtgcttcttggcttgccgtagaaaatccttaagaccttctcgccaaatttccccatttcccgtgttttttctgtaaaaataaattgtttcatgtgaaatttctatatattcctataaaattcatgcgttctaaa

SEQ ID NO: 18779 - DNA, 1150 bp, Zea Mays
tgaggagctaacataaacatctgagatgggttcctcatttattataatatcgaaatatctcgatgatgtctggtcactaatctaagagcaggctatgctggaggtgccacagtccagtttagtccatcttccctgccatagcgatttctgtttggttgctccttggccatctggactaaatttaaggagcaatggcccaagaaacagtgtgaacagctgcaagttgttccaagagttaacggttgctggattctgtcaatttcttcacgtaggcgccaattgcttcgatgtaattgtctccgtgggcgaagaagccaacgatcctgctgtcgctctgcaccggaacctggaacgcggctcccagctgcgttccgaaaggcccgtgtgttttgcccgtgctggtcacgagcgtcagagaggacacgacactgggtattgttctgtcccacgcgcatggatggaatgtcccagtaacttccactatgaactcttcaggggcaagatgaatctttcgaccagttcctccgcagccgccccacggaccggtggtgtgctgctgcccgtcgccatcgctgtacagatactccagcgagtttacgatcgtcccgctgaagatcgtcactctgtgcaggcgatgcggcctctctgcgatgtcatggagagcatttccaaccccgccccaaggcccaatcctggcgacgacggcctcatcaccacctgcttttggttcgggtttcggcgccgtgtagacaccgatcgcgttgaggtaccgtccggagcgcccaaagaaaccgacgatgcagccattgccctgcactgggatgtggaaggatgtgcctcgccctcttccaaacggcccgtagctacgagcgttggtgacgaacgtcagagacgttatgacgtttgcatggccgttgaatgtgccgattgacccagacacacctgtaaggaactctgaaccagctagctgaaactgtaaggaaatcaaagagaagttatacttcattgtccctcgggacaattttgaataccacgttctcggtggatagtttgtttttttaaatgttcatcacactcacagagctgttgtctcctccatgaccaccccaagggcctgcggtgcggtactggctgtcagggccagcgtacg

SEQ ID NO: 18780 - DNA, 1069 bp, Zea Mays
agatggagacattaaagcgtgtagtcggtgctggtaatcgggctcgtgatgctcttgttgcacaggggcttaaggttggtcttgttgaagtgctccttggtattcttgactggcgtgctggtggaagacagggactccgtaataaaatgaagtggaacgaatcagaggcttcaattgggcgtgttttggctgtggaggtgcttcatgcttttgcaaccgaaggtgcacactgtgctagagttcgtgaagtcctgaattcctctgatgtatggagtgcttacaaagaccagaagcacgaccttttccttccatccagtgcacaatcttctgctgctggagttgctgggctcattgagagctcgtcaagattcacttacgccctcgccgcaccgccatcttcttctctctctccaccatcagctccagcaaaccctagtggacggcaatattatcagcattcgtagtggaaaacgaaacacttaatctctgctccttggagtatgaccatgaaggcaccaccatggtaacgatttgtagagtgaggccaccttgagtgggcttgttactgtcaccaaatacagctcgtgtctccattcccaccaatgagcagctgatcagttgcccgcatttcagtacatagcatagcatagcataccattgtacagttttccattacataagggtcggggtcggttttgtgtgtgtgttttttttttgtaaagcatatgattttttttgggtaccatagatgtccatagaatacgcgagctgaatattgtatccattcattactgggttgatgcactcccttgttcggatcacacgacttacttgtgacgagagaaataaatgttttttttgcctttgtttgatgagcattttctggtgtcagttaaccttttacagtcatattgtcgtgtatgaccaccgagtgtgtgtaggttttatatagcctgtccgtcactacttttggttagagtttgctatttcatttgtaatgaagttgtttgctgacacctttgcgtgtaacaaaagaaaagcacacaaaaaataacatgctccctcagcc

SEQ ID NO: 18781 - DNA, 571 bp, Zea Mays
cttcgctcgtcttcctccacggagcggcatatcggtgcgtcaccagctcctcacgtcccggctcaccatcggcggctacggggacgtgacacaaatttagatgttggagaagttttactctgatgtacagtatccaaagctagaggaaatgggagagtacacaacctgtgttggtttgacttacagtcagggctgcatatggttcaaagagcggaggagaaaagagaggagggagatgggagccattggtccttagatggaaaggcaatttagtgcactgtaggggatgaaagtaaagttatatcacaagttctgttccccaagaattatatcctgagcaaaattttccgcaaggatgttccacctctgatagtgaatttgaccccctcccccaaaatgcacatggttgtaacagagacactacatgacatcattcctagaaccaaagaactatgaagaagagaaaggatatgctattccttattcagaatgatttttttggtttctttgcattaccatacccgtgtttgcaagtatttttggtcatcacaaatgcaagttcttaccagtg

SEQ ID NO: 18782 - DNA, 2415 bp, Zea Mays
cacactcccggccggaatctgaaccgaatgaagtctagtgcagtggtggtggtggtagtgtagagagccctgcccttccgatccggtccggtccggctggattcctcactttagtttttttttcgcttcttctctgatcagatgcaatctcgccgttgccgtccgtagcaaccgcacgcttcctcgctcgccgcgaaccctagagagcaggtgtcggtgtcatggccttctggtggccgctgctggtgctcgccgccgcatacgcgctctgtcgcctgctcctcttcctcatcccgcccaccgtcccatccatcgacgtcgacgcctccgacgtgttggccaaggaggacagcttcatctacataccgagaaggggtaaatcaactcagactgacaaggtccaatgctatgaaccagcgaccatgaaatacttggggtacttcccagtggtgactcctgatgaggtcaaggaacatgttgcacaatccaggaaagctcaaaggatatgggcaaaaagcagcttcaagcaaaggcgccagtttcttcgaatccttctcaagtatatacttgaacatcaggatctcatatgcgaggtatcatctcgggacactggaaagactatggttgatgcttcattaggagagataatgaccacctgtgagaagattacctggcttttggatgagggcgagaagtggctgaaacctgaatacagatctactgggagatcaatgctgcataagagagcaaaagttgagttttaccctcttggagtgattggtgcgattgtatcttggaattatcccttccataatgtttttaatccagtgctagcagcagtattctccggtaatgcagcagttataaaggtctcagaacatgcgacttggtcgggctgcttttattttcgtattatacaagcagctctttcagctgttggtgcacctgagaatctggtgcacataataactggttttgcggaaacaggccaagctcttgtatcatcagtagacaaaataatatttgtgggatcaccaggtgttggaaaaatgatcatgaaaagggcgtcggagactctaatacctgtaactctggagcttggtggcaaagattcatttattgtgtgtgaagatgtagatttacccagtgttgttcaagttgctactagagctgctctgcaatctagtgggcagaattgcgctggtgctgaaagattttatgttcacgatgacatctattctgcctttgtttcacagatagtgaagacagtcaaatctataagtgttgcagatatgacatgggtgcaatctgtatgattgagcactctgagaaacttcagaatcttgttaatgatgctctagacaaaggtgccgaaattgccgtcagggggagttttggcaatcttggtgaagatgcagttgatcaatttttcccaccaactgtcctggtgaatgttgatcacacaatgaaaattatgcaagaagagacatttggacctattataccaatcatgaaattcagttctgatgaagaggctatcaaacttgcaaacgactcaaaatatggtcttggctgtgctgttttttctggcaaccagaagcgtgccatcagaatagcgtcccagttacactgtggggtagcagcaatcaatgattttgcttcaagttacatgtgccagtctttgccattcggtggtgttaaagacagcggattcgggagatttgctggcgtagaaggcttgcgagcttgctgccttgtgaagtctgttgtagaagatagattgtggccatatattagaacagtgatcccgaagcctatccagtatcccgtctcagagcatggatttgagttccagcagttgcttgtggagactctgtatggctatagcgtgtgggacaggttgcggtcccttgtgaatcttataaagatggttaccgagcagaattttgccccgacttcaaatgcgaccacgaagaaaaggcgatgagacgaatgcccggggggttcattgaatctgtttatggtaagtctgatctctggacgctgtaaacctccccaagctgctgtgatcggccttgtttgctctctgaaacaatctcgagcctgggagcttgtgtattcaagcgctttagctttcatttcagaaccttcttttctctctctctcccttgcttattaacacccaaatgcgtgggcaatggaaatgaaattccactgtggatgtgctaggaactgtcaatgtgctgccgctgctgtgatttgtgaacatcatcggtattgagggtgaaggtgtggtgtaccatgcatgtgctgggattaaatgccctcgcgcatgtagcaaacagtacgctttcgcgcaattaattggcctgcagcctcctctttcgcgcatcccttgcttgagacaagaccgcc

SEQ ID NO: 18783 - DNA, 528 bp, Zea Mays
tcaccaagagcttgtgaatcaagtacttgatgaaattggcattgatatcaaccaagagcttgttggagccccgtcggccgctgttgctcaacctgcttcagcgggaagggttgcccaggctgaaagtgctgggaatgctgacactggaatcgacgccgatttgcaggcaaggctggacaatctgaggagaatgtaggtgctacaccagcaaaagagtagtgccttctagctctgttgcctgcgaatgtgaatacctagtcaatcaaagcaaaacgtttacaagccagtgtgtatgttgaaatgaatgaagcgttcgatatgccggtagtaatgacaaatgttaaatatacatatttacaatttcttcccctctgagttcatgatggattgatgcctgcagatgcggcatgtcagctgcgtgctaactgtgatttgcaagctgttgcttaaatacacagcagatatctaagctttaaattgccatgcttcctttccggcgattcaacgtcgtcgaagctccgaatcgtt

SEQ ID NO: 18784 - DNA, 2579 bp, Zea Mays
caaccctgcaggttgccggcgagttcctacctcccagacagactttttttgcaggttatcaccaaacgggacagactgctgactctgaagcttggtgtttctgaacataacttgccaaatcctaataattttggtgagctaactgttcaggctgaagaaagttcaggttcaaaagcaataatggagatgatattccgctgttcggatcttgaaatcaaggatcttctaacaaagagtgatacttttttgctaatatctggaatatcagatagtggaatgcctgttccaatttgcaagacagaagtaagaaagaatgatctcaatcctaggtggaggccagtgagtctgaatctgcaacagattggaagtaaggagaaccctctaattgtagagtgctttaacttcagtagcaatggcaaacatgacctagtcggcaagatagtcaagtcagttgcagaattggaaaatatgtaccataggaagaatggtgaaaatttctttgttcctgccagcaatgcacatgaatgtcacagtaaggaggtaaatatttttttttactttggaatgtcttcagctgttgcattgtgcatatcgtttttcattctgatattcaggtgttgaagagccagctatatgtagagaaatatgttgagagtaacagacatactttcctagattatatttctgttgggtgccagttgaattttatggtaggcgtagatttcacagcttcaaatggaaatccacggcttccagattctttgcattatattgacccctcaggtcggccaaatgtatatcagaaggcaatactggaaattggtgatgttctacaatattatgacccaccgaagcgtttccccgcttggggctttggagcaagacctattgacggtcctgtttctcattgttttaatttgaatggcagcacttatcaacctgaggttgacggaatacaaggaattatgtcagcttatatcagcgctcttcgtaatgtatcattagctggtcctaccctctttggtcagttgataagcaccgccatggcgatagctagccaatctcttgctgagaatcaacataaatacttcattttgttaatagtcactgatggcgtggtaactgattttcaagagactattgatgcgatcataaaggcatcagattttcctatatccataattgttgttggagttggaggggctgatttcaaggaaatggagtttctagatccaaacaaaggagagaaactggaaagctcaaccgggagagttgcatcaagggatatgatacagtttgccccgatgaaggatatgcacggcactgggatatccacacttcaatcacttcttgctgaggtaccagggcaattcatgacatacatgaggacaagagaaacccaaacagacagttagtacatgcatgctgccttcaatcagtacaagatgcaccttggaatattctttgttaatatcattttcgtccttcccgttacatagtggtgcaagtttcaagtcatgggtgtgagatagatagtatggacgtgtcaagtgtaggtgagacatcgatctcctggagacgccaacatcaaattggttagctgagcttgtttaaaatcgtcgccgttaaaaaaaaatgctgcttgttaagagaaatgaggacctccaccagcccaccttaattccatggcatctttttttttattattattctgtgtcaagttggattcctaggctgtaccgcccatctttctctacctgtttgtaagatatgactttaggggtttcggcctttattatccctagtaggcccattggaataggaacttttttggcattgcacattagaattttcaagtgttggcatggctgtttagttctatggtggtgactcgtgacctgtataatataatttagacaatggaatatacagcatttgtggtacagccatgtgacaatgtcagattaagatttgaggcatctggttgcaatacgtttatgtatcgttttctcttttaactatgtatagcaccgatggaacctggagtctgaactagaaattggcagtggctgttctcggacagtttccggaagagaaacccctagctactatgcaagacggtaggactacaaaggaacaactagacccccggcccaaattgcatcctggggaatgccgagggcggagggagatcgatcgatgctccggttccacgactatgtgcgtggtccttgtagaaaagaaaagaaaaagtatgcgtaatctgggtgaaagcaccagcagagtagttaatttggttcagacgttcagtggacaatcgaatcgagcaagcagtggaaggaatccatttcgatacgctgtggaggcaaaggcgccactccaacgatcccagcgatatctacgagaggaacttttcagaagatcttacgtggacaaacatgccaataagccaatcaggcttcggttacggtctcactcaggacatttccctgtgtccacccaacatccctagttagggcttgttcggttattcctgtcgcatatggattggatgagattggaaaaaaatatgaaggatt

SEQ ID NO: 18785 - DNA, 2086 bp, Zea Mays
ctgcttgactctgctccagcctcaggccggccttcgcctctaaaagtttcattacatacccagcttgtagctgtatgctgcaaccctagtctgcgttgtcttctcaaaccttaacgtaattcgtaggagcatcattatttatagaatacgatctactttatagctgatgacaatgtctgcttctactgctgcaattcgtactgcgaatacaaatggaaaccatgcagtaagttcggattcacattctagccaagatgctaggcagcgaacagctggtattacaaaaagaaaagcattgccttcgattcttcaaaaaattcctagcaatgatctgagtcatactatccgaggagaatcagttcttcaaaagtcaaattattcttctgaaggaagaaaagatgtggttgcttcagcaactgctgaacgccaaaacaaaaacactacaaatgtggttgcttcagcagctgctgtacgccaaaagaaaagccctactaaacaagaaaacgccaactgggtaactgccttaagtgtgctggtgaagctgtgtcttcttatttcagctactgcttggatggggcaggtgttctggagatggcaaagtggtgaattatcatttacaacactggatatggagaacaggctatccagggtggaagggttcaagaagacagccaagatgcttcagctacagttggatgttttggataaaaagctagaaaatgagattgacaaagcaaaaggggtcattgctaagcaatttgaggataagggtaataagatagagaaaaagatgaagattttggaagacaaaactgacaagttggacaagtcactggctgagcttagtgacatgggatttctttctaaaaatgagtttgaggagattttgagccagttgaagaaaaagaagggattcggtggtacagatgatgaaataagcttggatgatataaggctatatgccaaagatgtggttgagatggagatagcaaggcattccgcagatggccttggtatggtggattatgcattgggatctggtggtgctaaagtggtaagtcactcagagcctttcatgaatggcaagaactatttacctggtcgcagcaatgtgcacacaacagcccaaaagatgctggagccaagttttgggcagccaggagagtgttttgcagtgaaaggaagtagtgggtttgtgaaggtgaagctaagaacagcaataattcctgaagccgtcactctagaacatgttgacaagagtgtggcctatgatagatcaagtgctccaaaggatttccaggtccgtggatggtaccaaggaccacatgatgattcagaaaaggattcaaatgtgatgtctactttaggagagttctcttatgaccttgacaagagcaatgctcagaccttccaactagagagaaccgctcaatcacgtgttgtcaacatggttcagcttgatatctcctcaaaccatgggaacttggaacttacatgcatctatcgcttcagggtgcatggcagaaagcccgtctcccccagcactggaggatgaagccctgagctgtgacatgcgtgccaaagcgcgacaacattcttgcagcatttctgcctataggagctttggttcagcggttagcggttagtcggagcatttcagccagcgccgctgcaccagtgttgataatgttgattctattctcgcacattgttgtgaacagctcggaaataccttgcgaggtttccttaagctgttcctagtttggcatcaagttcgcctgttttctctgctcctcctcccctcctgttaagactgcagcttagtattccgtttgaaattggtcgtctcatttcaccaggactcgctcttaaaaagaagactttgccattatatggcctactcagctagggaggaaaagaaggggaatgctggggccaactgccaagctagttatgcacttatatctaatctattgatttgaatatgagagcatgccaagctagttatgcacttatatctaatctattgatttgaatatgagagcacgcaagttcttcatctgttgtttgagccttttcagcttct

SEQ ID NO: 18786 - DNA, 744 bp, Zea Mays
gtttgctgaggcagaggattatctcacaagagctctacagaaggctgaagaacaatttggtgcaaaccacccaaaggtcggcattatattgacctgtgtagctagaatgtacaaactaaaggcaaaatctgaaggttctacttcaattatggtccaggaggggctgtacaggaaggccctagaagtattgaaagcccctgctattaattctgagggtaaaaacaacgatctcctatcaatgataaggtgagtacgcggagctgttattaattcagtctaataggaaggcggaaggtgaacggatgaagcagtgggcagaagatgcttggaggaaccgtaggctaacgctagcacaagctctagagttttcagaaccttcaaagccgactgtcgttgttgacacccgaatcggcagggtcgtgtagcttcagtcaacaatctcgtgagatgcacaaatgaagcaatccgtggatgcacctcgtgtcgtgtatattttcgaaagtgttgctccttgcgggctgcatccggtttgatccgttcaagtcccagcacactcgcctgcttgtttttcatatcacctttttgaatagggggacattcgaggatcacaaagcttgtgcatgtgatcactttaaacatttaatagcatatgtatatgttattgtacacagaataacaccacttaaagcatctttacattttgattgctatatacatgaagctcttatattttttttatttcca

SEQ ID NO: 18787 - DNA, 2096 bp, Zea Mays
atttcctcctccttttcccagttcccaccttgcttcctctcctcgctttgcttcctctctggctctctctcacatgcctgcctactactccctcaagcaagcaagcaagcaagctgcaagaggtcaggaggagccgtgactgtgagtgagcggcgtctggtgtgaactgtgaagtgaggacttgttggaggaggacggagcgcggagggtcatggcatggtgatggacctgctgctccccctcactttgcccctagtgctctaggcagccttagctagcctcgcagtcctgggaggaggagaaggacaaggtctctgatcagctccagcttgtctggtcaaagctgaggagcctgcttgggctgcctgtgagtccaagctcgacaggaccactgccactgtgaagcacagcggcagcggcgacgagacgaggacgcggaagctgccaagcggatagatctacgcaaaatggagaccaaggacgtgtcgccgcttgccgccgccgccgcggcgcccgtgcttgcaccggcctctcagcagcagcagcagcagccgccccagccgcagcagcaccaccaccagccaccgcagccgcagcatcagcaccagcaccagccgccgccgccgccgttcccgcagcaggcggccccggcggcggcctcgtcgcccgccgcgtccatgcccggcggcatgcgcctctcgttcgaccatatgcccgggaaggcgcccggggagcagcaccaccaccaccaccacgcggcgccgcccatgctgtacgcggcgccaccgcagggcgcgggtgcgccggggggcagtgtgctcggcatgggcgaactgatgcgcaagaagcgcgggcggccgcgcaagtacgcgcccgacgggagcatggctctggcgctggcccccatctcttccgcctcggccggcggcggcggcggcgccgcagcccccgggcagcagcagcagcacggcgggttctccatcggtagccccccgtccgaccccagcgccaagcgccgcggccggccccccggctccggcaagaagaagcagttcgaggccctgggttcttggggcatcgctttcacccctcacatcctcgccgtcaaggcaggcgagcaaggccctcgcacagtctgcatcctctcggcgaatggcgcgattagcaacgttacgcttcggcagccagccacatctggtggactagttacttatgaggggcgtttcgagataatctcgctgtccggttctttcctgctcgcggaggatggtgacactcgcagcaggactggtggcttgagcgtcgcgctcgcgggatctgacggccgagttcttggagggtgtgtcgctggaatgcttatggctgcaactcctgtccaggtcgtggtggctagttttatcgcagaggggaagaaatctaagccagccgaagcgcggaaggtcgaaccgatggctgctcccccgccgccgccgccacagatggctgccttcgtgccggctccggtggccaccagccctccgtcggaggggacgtccagcgcgtcgtctgatgactccggcagcccgatcaaccacggtgcgatgccgttcagccactccagtcagcaccagcaccctcaccagcaccagcagcacatgccgcctgcctacgcgtccgggggctggtccctctcggtgcaccagcagaacaggcatgattctgacatgaagatgatgtcgaactaacaggcgccccattcgttggtgtttgggctggagaggaaggaaaggaacctgctgatggttaggttggtactgctgctatgaaacggtcctcttgcgcgtcgtctgtgctctggtcagtgacgacgtgtcgatctgctacttaagctaagctagctaggagagttagggttcatggtctcaccccccgctgttgtgcccctgagtaagattaatttaatttgaattagtcgctctcataatgctgcgagttgtgatggtttcctgatcagatcttcaccttctaggctagttaaaatatcatttctctagtactatggatcatggatttacttggatacttgggtttaattcaggaatttgatcgtattctgt

SEQ ID NO: 18788 - DNA, 1751 bp, Zea Mays
ccagacacactcatggtgaaactacaactatgatcaaattaacagcaaacctgagcagtgcctttttcccacggttcagtccggatgggaagtatcttgtcttcatctcagcgaagagtgctgtagatagtggggcacacaatgctacaaattcattgcatagaatcgaatggtgtacagatggaaaactggatgggagccttggagttgctgacgtggtgcccattgtgctgtgccccaaagataactgttttcctgggctatactgctttggcttgcttagggatccatggcttaccgatggacaaactatgattatatcttctgtctggggaagtagggaagtaatactttctgtaaatgttgtgagctgtgaactttcaagagtgagtccccaggactcagattattcatggaatgttcttgcagttgataagaacaacattcttgcagtttccagcagccttattacactccctcagatgtactatgggattaaggtttctcagactgaaagcaattgggagtggcagggagtttcaactcctttcccaaagccatctgataagatcagctccgtactagcagagcataagttcagcatactcaaaatcccaattagcaacccttctgacgaacttgccaatggggctaagcttccttttgaggctatttttgtgtcgcataaggattctgcaagtaatccaacaatcgttgttcttcatggtggaccacactcagtttatccatcaagttattccaaatccttggcttttcttttttcgcagggatataatcttcttgttgtgaactacaggggttcattaggctttggggaagaagcactgcaatcccttcctggcaatattggttctcaggatgtcaatgatgtattgacggcattggaccttgttataaagagaggactaatagatccatccagagttgccgtagttggaggttcacatggaggtttcctgacaacacatttgattggccaggctccagacacatttgttgcagcagctgctcgaaacccagtatgtaacttatcattgatggtgggtacctctgacatccctgattggtgctttgtcgagatttatggaaaagaagggaaaaagtacttctcagagtctccttcagtagacgatctttgtcaattccaccagaagtcaccaatttcacatattgcaaaggtcaagacaccaacactctttcttcttggagcgcaagatctcagagttcctgtttctaatggcctgcagtacgcaagggctttgaaggagaggggaatcgaaacgaaaactattgtcttcccagaagatatccatggaattgacaagcctcagtctgatttcgaaagcttcctcaacataggggtttggttcaagaagcacatgggcaaataaacattagtgcttcccattacattcatgatttactttttcattgttactaaatgcctgtaaccgggtcaaagtatacatgatttgcctgtccaatctggtgtttgccaagatggaataattcttgaagacatatagaagcccgtgtttattctagtgtggattctggaataccaactgtagctagtttatataataatcttctaataaatgatgcttatgtgttaatgtgaaacggtgcgtgcttttgaattgtattcagaaaaaaaatggcccagctgaccagctcactgttgtttagttcatactaagactgtctccaacaggtcctgtaaaccctcc

SEQ ID NO: 18789 - DNA, 3853 bp, Zea Mays
ccgcgcagcaccagtgccccaccccatttccgcctacggcactacggcagtcggcagcagacggaccagaggctctagcacagtgccgcctcccacctcctgtcgtctcggtctcgctttaaaatcccgcgacgccgtggtcgctcgcctcttttggagcaggccatgtgaagcctctgaccccccgataccttccccttcctcccgtgctgctgctgcaggacagcgcggcgttcgccacacgcggcggcgaagcttcgcgagatccgtgcgcgatgtcgtcgcggccgtcgtcgtcgtcctcgcggcggagtagctcgccgttctccgcggggcaccgccgcccgcccaccgcgtcctcctcctcctcgagctcgtacttcagctccggccgcctcattccgcgctcgtcctcgtcctccgtcagctccagcttctacggcggcgggggtgggggcagcacgaggtccaccaccccgagccgccgcagctcatctgtagcaccggcactgccgccgtcgccagtgccgttcccgagcgcggacgagctcgtcatcgaagacacctcccgatccggcgacagcatctccgtcaccatccgcttccgaccgctcagcgagcgcgagttccagcgcggcgacgagatctcgtggtatccagatggggaccggcttgtgcggtgcgattacaacccgccaacggcttatgcttatgatagagtttttgggccttcgacaagcaccgaggctgtctatgatgttgcagcccgccctgttgtaaaaggtgctatggagggcataaacgggacagtttttgcctatggcgtcacaagtagtgggaagacccacacaatgcatggtgaccagaattgtcctggaataatcccactagccatcaaggatgtcttcagcatgatccaagatagtcctggaagagaatttttgcttcgtgtgtcgtaccttgaaatctataacgaggttataaatgatctacttgatcctactggccaaaatttgcgtgtgcgggaggatgcacagggaacctatgtagaaggaataaaagaagaagtagttctgtcaccaggacacgctctttcatttattgcagccggtgaagaacatcggcatgttggctctaacaacttcaacttatttagcagccgaagtcatactattttcacattgatgattgaaagcagcgcccgtggtgatgagtatgatggggccatgtattcacagcttaatttgattgatctagctggttctgagagctccaagacagagactacagggttaagaagaagggaagggtcatatattaataagagcctcttaactcttggaacagtcattggaaagctcagtgaagggagggcaacacatataccctatcgtgattctaagttgacccgtctactacagtcatcattgagtggccatggtcatgtctcactaatttgcacaattactccagcatcaagtaacatggaagaaacacataatacattgaagtttgcaagcagagcaaaacgtgttgaaatttacgcctctcgcaaccggataattgatgagaaatcattgatcaagaagtatcagaaagaaatatcctctctaaagcaagaactcgatcagctaaggagaggaatgattggtggtgccagccgggaagaaattttgagtttacgtcagcagttggaggcgggtcaggtcaagatgcagtctcgtctggaggaggaagaggaggcgaaagctgctctaatgagcaggatacaacgtttgaccaagttaatacttgtttccaccaaaaacaatattcctgccttgacagatgggcatcagagtcacaattctctcagtgagcaagataagttaatcacttcacaagatagttctacacttgtccaaactgagggcaccacaaaagaccccctatcatccgctttgccagactccttagatgagatcaatcagttaagatctggcaccggtgaacaatcttcagttaccggttctgcaacagattcaatgcaggtgggattcacggcatcagatcatatggatctactgattgaacaaattaagatgcttgctggggaggtcgcatttggtaccagttcactgaaaagactaatcgaacagtccatagatgatcctgaagcaacaaaggaccaaatcgagaatttagagcgtgaaatccagcaaaagaggagacatatgcgagccctggaaaaacaaatcatggaaagtggcgaggcatcagttgctaatgcatccatgatggatatgcagcagactatcacgaaactaacagcgcagtgcagtgagaaggctttcgacttagagttaaagtcagctgataatcgtgtactccaggagcagctacatcagaagaatttggaaatctacgatttacaagaaaaagttcttcgcgttgagcaacaactctcagcaaaagtggatatatcccctgagaaggaaactgattgtgcacagcaggagactattgatttgaaatctaaacttcagtccaaggaagctgaaatcgaaaagctgaaatatgagcatctgaaaatttctgaggaacattgcgatttaatcaaccagaaccataaattaagtgaggaagctgcatatgcaaaagaattggcttcttcggctgccgtcgaactcaagaatttggctgaagaagttacaaagctatctgtgctaaatgcaaagcaggcgaaggagttattagttgctcaggagatggcacattcaagggttcatggtagaaagggtcgtacagctagtaggggtagggatgaggttgggacatggagcctcgatttggaggacatgaaaatggagctacaggccagaagacagagggaggctgctttggaagctgctttggcagagaaggagcttctcgaagaagagtacaagaaaaagtttgacgaggcaaagaaaaaggaactatctctggagaatgatctagcaggcatgtgggttcttgttgctaagttgaaaagaggggctttaggcatatctgatttgaatgttgacgaccgaactgttaacctagctgatataactaacagcacaaaggagaacaaaggtggaaagaattttgctctagttgagaagcaagcatcagaagattctgtgaagtcactgagttcagaagaacatacaagtccggagtttgaaccacttcttgttcgtctgaaggctaaaattcaggagatgaaggaaaaggacattgatcccctgaccgataaagatgggaactcacatgtctgcaaagtttgtttcgaatctgcagccgctgcagtattgcttccttgccggcatttctgcttgtgcaagccttgctcgcttgcctgctcggagtgccctctgtgccgcacaagaatcgcagacaggataatcaccttcacgtgagctgcgttctagcttcaggtcattctgaagcacacatcctcttgtaaaatcttcaatggtatatgtttctctttttccttagcaaagaaggtgccttttatgttccttctgtgttgtatcgccattctttgggttccccttcccctatagcttcacgccttcaccttacgttctttgttgtatcgaggagttacaaatgatgacttctcgctctgcaaatatgtatagatacgcaactcgacgctgtaacacattttgattctctactcctgaagaaaagcagcgaacgacatgatgacgtgtgtatactgtgctcctagtcgtccctgttagcatggaaggctatattctataattgctgagctacgcccctataattatagatgatggccttcacttttattatcatggttgattagttgcctaca

SEQ ID NO: 18790 - DNA, 1511 bp, Zea Mays
aacagcttcaggtatcccaacaataatgtacctgccatcgttgcttcatatctgaatgtggatccagctacaggcgattattatcctacagtattcttcaacgagttttggcttttgagggataaattaatagcgctcaatgagtctgtgaaggaattgcccttaaaccttgaagttggtcctattagcatgaccaagtggcagttttttttacagattgagcagtccttccaggttcatcgtagttatggaagtatgcttgaaggcgaggctgatgaactcaagagggttttccttgaaggaaatccttatcttcttggattgactatgattgtttctctattacactctctgtttgatttcctggccttcaaaaatgatattcagttctggaacaagaacaagtccatggaaggtctatcggcaaaatctgtggttctgaattttgtgtgtcaactaattgttttcctgtaccttcttgacaatgacacttcatggatgatccttgctagctctggaattggtgtttgcattgagttttggaagatcggaaaagcgatgcatattgaagtcgatagaagtggaaaaattcccatgttgaggttccgagatcgtgaatcatatgcacagaataagaccaaagagtacgatgctattgcaatgaagtacctcacctatgtcctcttcctccttgtgatcggtttctctatctattcactaaagtatgaaaagcacaagagctggtactcatggatactttcttctatgacaagttgtgtgtacatgtttggtttcatcatgatgtgcccccaattatttatcaactacaagctgaagtctgttgctcatatgccatggagacaaatgacctacaagttcctcaacactataattgatgacctttttgcattcgtcattaaaatgccaatgcttcatcgtctctcggttttcagagatgatgttatcttcttgatatacgtctaccagaggtggaaatatccggtcgacaagaagcgtgtcaacgagtttggcttcggaggcgaggaggaacccgcagcccaggagactttggaaggaagtgatccagcagctgcagcagcagcagccgagccaacggaggacaagaaaaccaagtgatctccaatcgttcgatcatccaaatgtagcacgccactcagcagcacctgccctcccacagcgggtgtgaaatttttcgctgaactggatgctggactcttgcggtcttgccttactgagatactgacgataagataagttgtgtgtgtaacaggggatacaatagtgtttctagggcagcgggcgaacaggcacactatcgcaattacgtttctagtttgtcttttagcagccattactaggcgatatgcttgtttatattgcttttttgtacaattttgtgcatcatttttcaaaatacataacggcgattcttagcttcctaataatgttgcaacgaatgcccataaatgagtgcataatttagcggggta

SEQ ID NO: 18791 - DNA, 3955 bp, Zea Mays
cgcaggcccagcgcacctccccgcggatagatggttcttcttcgttcaggccgagatccactgctcactgcaccgagccgagcgcaggttaggcgggcgcgcgatcaccgaagccgacgcggcgcccgcacgcgccaacggccgaacgcactctctctctctctctctctctctctctctctcccctctccgttgtgctccccgacccaaccctacgcgctcctgccgcccccccgcaggccgcagctacatctctcctcccacctcgccagtcgccaccgcgcggtgggagctcgctgaagtgcttccccccgctttgcggcagcgtcagctcagaccccttgcccgcgctctcgttgtctggcgggctcagctggtttggtcagcgtggcgaggttgtcctggccagatcctgctcccgcccgcgcacgactgggtgtgggcggtggattggctgcgcgggtcatcagatctatgccggagatctagggcgccaggtgccgaggtggaggccgtgagccggtggcgatcggagggccgaggacagggatggcgtggtggtccgggaaggtgtcgctcggcggcctgcaggacatcgctggagccgtcaacaagatcagcgagagcgtgaagaacatcgaaaagaacttcgacagcgcgctcggcctagaggagaagcgtgacgatgaagatgcatcaggatcacagacatccaactctgatagaataggattcttcaatcctgtcatggctttcatgggacacaatggtgaggaggatggcactgaagtatcagaaaagccacaatctctgaagaatctgtcagcagaggaaggaattaatagcacaccaactaagaaacatatatctgaggtagatccttcggaagtatcaggaacaacatctccaaaactgccttcaaaatcggaagaagttcatagtatttccaatgggtcacctgtttctaaggcagatgtttctgagcaatccataacaccacaaactccaacacatccttcagtagcagaagaaaagcttgatagctctactgaggcacctgcatctaaggtgggtgatgctgaagcatcagaaacatcacaatctgcaggacatccttcaacagtggaagaaaaccagcaccatcaagttagcaaacattctgatcctagtgatgaagcagagccgaatcagcttagagagtctgttcgagacttacctgatggtagtgcatcttcttcgcctactaaaatacatcaatcaggtgacaccgaaacaggggaatctattcacacaggaaaggaagatacgtctgataggaacatcttgcagtcacaaccagcagagtctgcgctagctagttcagatgatataacggaagctgaggacaatattgctcaagaatatgatgccccaaaagaacttagtggcccacaggagagtagtgatatggtagacaaaggtactcatcttgaagttaaattacatgatagcaatattaatactgaaaaaagtgaggaagaaagcaataagatggagtcaggggaatcatctgttgttgtacaggaggataatgcaatggagcaacctcaagacttaacgttgaagtccttaactgcagagcatgactcaaattcgcagaacgagtcagtgatcaattcgactgatatacctgttggactaggtgaaggtcctccaaatgattttacaaaagaagaaaagattctagaatctgttagaggcacagattctcagactctggactctgttgtttctgtcgatgagctagagaaattaagacgtgaattgaagatgatggaagctgcattgcaaggtgctgcaagacagtcacagtccaaagctgatgaaattgcaaggttgataaatgagaatgagcaactaaaatcaacaatcgatgatctcaagagtaagtcatctgaagcagaaatggattcactgaaggatgaatatcaccaaagagtagcaactcttgaaaggaaggtatatgcactaaccaaagagcgtgatacactaaggagagaacagaataaaaaaagtgatgcagctgcccttttgaaagaaaaggatgagatcatcaatcaggtcatggctgaaggtgaagaactatccaaaaaacaagctgctcaagaagctacaatacgaaaactgagagcacagattcgtgagtttgaagaagaaaaacaacgcctgaactcaaagatccaggttgaggaggctaaggttgagagcatcaagagagacaaagcagcaactgagaagttgcttcaagaaacaatagaaagaaatcagactgaacttgcagctcaaaaggagttctacaccaatgctcttaatgcggctaaagaggctgaggcattggctgaagcaagagtcaacagtgaagccaaaattgaactggagaatcttttaggagaagctggtgaaaaagaaaatatgctgattaagacaatcgaggagttgaggcattttctcacccggcaagaacaggaggctgctttcagggaaaaaagactaaaaggggactatgatgatcttcaaaagcggtatcaagccagtgaacttcgttataatgaactggtaacgcaagttcctgagtctaccagaccgcttctaagacaaattgaagccatgcaggagacaactgctcgaagggaagatgcttgggctggtgtggagagaaccttaaactctcgccttcaggaagcagaagctaaagctgcttcttcagaagaaaaggagcgatctgtaaatgagagattgtcacaaagtttatcccggataactgtccttgagacccagattacaattcttagaacagagcagacacagctgagccgatctcttgaaaaggagaggcagagagcatctgaaagtagacaggagtacctagcaatcaaagaggaggcagcaatacaagaagggcgagctaaacagtttgaagaagagatgaaggagcttagagctaggcacaaggaggagctgcaagaagcagcagaacacagggacctgcttgagaaggaccttgaaagggaaaaggctgccagggcagaaattgagaaaacatcttcccgtgaagcgcctaaagctccacttcccgatcaaacaagaaatgcccctctcagaaagctgtctagttctggcagtataaatagtctagaagaaagccattttcttcaagcatcgttggatttatctgacaatgcttcattagagaggcgaatgtcttcagaaagtaatatgtcgtattatctgaagaccatgactccaagtgcttttgaatcagcacttcgtcaaaaagatggagagctggcttcttacatgtcacgcttggcctcattggaatctattcggaattcactagcagaggagttggtaaaactgacagaacaatgtgaaaagttacggactgaagccactgctgtgcctggcttaagggctgaattggaagctctgaaacaaaggcactttcaagctctagaactcatgggggaacgtgatgaagagttggaggagctaagaaatgatattgttgacttaaaagagatgtacagagagcaggtggatcttcttgttagccagctccagtcattgggtgctcgtgtatagcgctgcctgcgctggtatgaatttgtcataccatctaattctcgtccagtgcatcgcggccaggccaagataccaggtccgtgacttgagcatgttttgtttcaaattttgtaacaccatacaacggcactgaatgttttcgtttgtatacatcggaacacagttgttgggtttaggaggatacgttgttgtatactagtaggttgagtagtttcacagctttacgtgtattctttgtgatttgtttccgttgaaatgtatcaaatttgaatccatttgcaagtgtacctcagaggaatgcaatcaataatatcgagagctccttttgtcc

SEQ ID NO: 18792 - DNA, 2287 bp, Zea Mays
acaacacaaccaagagccaacagagcaacgcccaggcacacacgacacgaaccaggcaaccagctgccgagggaggaaccctagcggaacactgtgcaggtgacggcggcgcgctaccggtgacgggggatacggcggcatcgtccccctcggcccctcctccatccccggcgcggcggcgccagcagccggcctgcaggttttgcaggtttcacacttcttatcatggatgataagaacaaagtcaagaaggaaatagatggcccccttggacccccacctcgcaaggggggacttaaattcgcaccaaaagtacctcagaagaaacctgccaaggttgtcccaaagaaggaaccggttgaagagagaaaggaggatgctttggataaggagttattgatgaaacttaagatgtcgcaaaacaagtatccctcaagaattaagtccgacgaaaagcgtaagaatcctggtttttgttcaccacatgctttatagtctaaatcttatcactgcctgtgaaaattgtaagttcctacttcctatcattgagcatgctcaaggcttgtcatcaattgttattgattagtcacatagcgtgaaagggcctctaattgagttggttaggtgggctacggtgctgcggtatatgggtggggcaggggtttggaggttttctcgacctgcgtgaggtcttcttaatataatgttatggaggcggtcttacctccacaggtcgagtttttttattagtcacatagcattttctcgacagttttacagttttaacttcaataaatatttctaagtatgaatctttgaggctgtagattgaacactcttgattcattccttaccacttgataaaaactggcaatataacaattgcatatgtcgcacacttataggagcaagagcaatcttatttactatgttatatatttatcttccgtacttcacttgaaaatcatttttcaatcctaaaataatatttgttgcaacattgtgagtagttttgagctgataaaatacaagtatgtgatttggtttgcatctttgtatgatgtgctctgagttggctaattataattgtatgctttgggtgggggattcatctatatttaatacagggacatacttctgcattaggttgtcttaaaaatgcattacgtagagcatgtaccaaaatttttattagctataattgatgtttagtacatatagtataaaaggcaaggtttttgttacaaagaaaatactctctgtttgtgtgtgtgtttgcttaagtgttatggattattcattttttgtaaatttagtgatatttttatttgacctgctgcacacctagctaatagttcatttctctgttggcatagcaagaagtggtacacaggttgcatttggacaaggaaactcttattatgcaagaaattttcccatgcccaaaaaggattcttcagcaggtggagcttcgaagttaccaaaagaatatgcagaaccatgggactatagccatgattatcctgttactctcccactaaggaagccctactctggaaatcctgaaattctggatgaggaagaatttggagaatcttctgccagcaggacccaagatgatgaattatctgcagcagagcagcttggattaatggatatgtcgtcggaatcacagttcctcttcttccagttgccatcctctcttcctttaccgaggcagccacaatcaggtgctgaccctaacgaagtccgcgatgagaaacgtgaggacatgaggccatcatcgcacaatggctcgaaactcaaagaggttcctgaaggctatatggggaaaatgctcgtatataagagtggtaaagtgaagatgaagataggagacactctctttgatgtttcatttggctcgaattgcatgttttcccaggaggttgcagcaatcaacatcagagaaaaacattgctgtacggtgggagagatcagcaagcgtgctatcatcaccccagatattaactacatgttgggttctgttgacaagatggaagaatagtccattggtttctttcgcgcaaaccatatagaccatattatgccattacaagatagttttgctttcttatagagaacgacctgtgataccctctcagacttcttcaagaaaagatgcctcaaacaaaggaatgtgcctaatttgacactgccgttagtttccacagcaaacgcataacacaactagactagacaggtctgcggacctttctcgatgccaacgtcggtagttcggatatgc

SEQ ID NO: 18793 - DNA, 1988 bp, Zea Mays
atccaagttccaagcggccccaaacctgagcgagcagttttcaggcaggaatgaccccggtctcacatgtcagtgagtcacaacagccagatggaaaggcccacgtcatctagtcattggttgtgaaatccccgttctacccctcccgtctctgatctcgataggggagccgggggagcgcgacgacggggagaaaaaacagaggaggaaaaaaacacccaaaaaaccaccttcttttcctgcgttcccctgctcgatccccgacgagaattcgctcccgaacccatcgatctgctctccgcagtccgccgatccgtggatcgatccgtgcgcgggctcggtccgccccgggttccgatctggtcgccgcctcgcctgaggagatgaacggcgccgggggcagccaccaccagcagcagcagaggctccggcagcagcagcagcaggcgctcctgatgcagcaggcgctgcagcagcagcagcagcagcagtaccagtccggcgtcctcgccgccgcggcggcggcggccatgacccagatggaacctgtttccaatggcaaccttccacctgggtttgatccttccacttgtcgcagtgtgtatgttggaaatgtgaaccctaatgtcacggagagccttttgattgaagttttccagagtgctggccttgtggaaagatgcaagctcatacggaaagagaagtcttcctttgggtttgtggactactatgatcgaagatctgctgctctagcaatcatgacccttcatggccgtcacgtatatggacaagcaatcaaggtgaactgggcatatgcaagtacgcagagggaggatacgtcagtgatgctcgagtcatgtgggacaacaaaactggacgctccaggggttatggttttgtctccttccgtaatcaacaggaagctgaaactgctataactgaaatgactggaaaatggcttggaagcagacaaataaggtgcaactgggcaacaaagaacaattcggaagagaaaccagaaactgacaatcataacgcagtcgtactaacaaatggtagctccaacaattcagcaacggatgcaagccaggacgcaggaagtaaagagcccccacagaacaatcctgattgtactactgtatatgttggcaacctcggccatgaggttaaccgggatgagcttcaccgccacttctataacttgggggtcggggcgatcgaggaggtccgtgttcagcaggacaaagggtttggattcgtgagatatagcacccacggggaagcagcactcgctattcagatgtccaatgggtcggtagtccgcgggaaaccaatcaagtgctcatggggtgtcaaaccaactccaccggggacaggctccaagcccctaccccctccagccgcaacgtaccagcccgctgtggcaatgccaggcgtcccgcaaggtttcacgacagcagaactccttgcctaccagaggcagcttgccctgagccaggccgcggccgggcagcagcatgctggtcttgcgggccaggtttctgcagcaggccttcttgctgctgccggttcccaggccctctacgacggctacccgaatcaatcgtcagcgcagcagcttatgtactacaactagtagagctcaagaggaaggaaggcgtctgtagtgttcagcttgtttttgcgcaaacttgggtcatcctcgccctgtttttttttctttattattttgtggttcatgtactatttgtgtgagagctcttgttctctcttctcagccgcgggattgtgttacttactgtcttcttactgtaccattttccttgtctaattctgttgagtaagaggtgtattctatgtgactttgcgattgattaatgtaatgctcccctggggatcggctttggtcgctgggctggttcatgatccggtgttcgggtccgattggacattgaaaggaggtttactggttcatgatctggtggtgt

SEQ ID NO: 18794 - DNA, 3002 bp, Zea Mays
tgggaatccagattgtctctatttgcatgatgtaggcagtcaggaggatagttttactaaagatgagataatctcagcatatacgaggaccagagtcccccagatggcatctagtgtttcgcaaagacgtacaggcaacatgttgcctcctccaggagatgatttctcttacagtgcagtggtttcagccaagcataccttcaagaatgcaacacttaataccaccaaccagcccagaccttcacctccaaacagtagttctgggaggtccacacttccaccagctgcctcatggggacaacgtgatgtgaacgccaggacaacagctactggggtgacatcatcacaatctcatacaaaaccaaaatcagaatcacagagtaatccattttcaagttcttcagtaatttccagtacaaaaacaccctcttcatggaatgatgatacaagtacagcagcaaaaatgtctgaaggacagcaagtgtcagaaaaagagtccaaaaccttgcagctgtataagcctggtatttcaatggcaacacaagctacatcatcacttgagttatcactgaacatagacttctcgacaataccttcagcttggaatgacgatgagattgtagtatcagatgggatgtcaaaaggaagcgatgaaaatcaagttgcaaatgaaaatggcgagctaacccatccagcatctaagccactagtcttatctaagaaagacataacaatgaaatctaccagtaccagcaaaagtcctccaaatattgtatcaagtctagcaatatctaaatcagatgtaaatactagtgatggtgaccactcacttaccaatattagccttacttcaaatgctgtagtctgccaatctaatcatgttgctggggcgaaaatattggaggatattagatccagggacactgacatggagaagctatctgttcatatatcttcagtaaaattaggtggcaatgatgagattcagattatggcaggaaatcagcgaccagatgtaatgccatgcacatctgttgatgcgcccatgaatcagaatttcgacagagaccaatctcatctcaatcttaatgagcctttgttaccttcagaaaataaggatactgttctttcttgtcaatatagttctgataagcgtcttgattggagttcagagatgcaaaatggtagtgtgactccttcaaataatatagtagattctacgatgctcactggtaaacttcatagtatactactggatgtttcagagcaaccatcatatgcccgattccctagttcattggatacttcattgtgtaatgatacagaaagtaacactgcagcaacgattgacactacaatttcacatatgcagactgagttctcttcaattaataatatgtatgccttgttaaatggaggtcaagatggactcgggactgtaaatacacacggtaatgtttctgaacagcatcctggaatgggaaatcatcaatgtagagcaatgggttcagtaagaactgaagcaatgggttcagtaagaacagatagtataggaagttttgagaagaccataagcataaataaggatgagagcagaataatttctgatatgttatcatcagagtttaatccatgggatgattcatattcgactgctaacaattttgttaggatgcttagggaatctgaaaataatgatgtccacttcgctgtgccttcatggaaatcaggaaccgggaacaaagagtctagattttcatttgctagacaggataaccaagggaacttattggattcatctctcagaaactgtggtactggtaccgagcagaatttcagtttgctaccccagaattctcgaggaaatatctaccagaatggccttgcattccaatctttggagaacgatttttcgaacagcaactctcttggtgtattagatatgttaactactggttcgttctcttgtatgatctgtgaagcttgagtgaaaagaaagattatgtgccgagaacaaagcagctgaagttgaaatatattgagatatgtctataatgtagtgtggtgtggctcttgaacgtgagcgactaagaagatttggtgggcttgacttgatgatggcagtgttttcttgtgttggtacatgatgatggtgttggtcggtggctgcctggccagtacatgcgttttgccataataatacccatggtataataataataataataataataataataataataataataataataataataataataataataataataataataataataataataataataataataataataataataataataataataataataataataataataataataataataataataataataataataataataataataataataataataataataataataataataataataataataataataataataataataataataataataataatatactggttcctttgctagcattacttaatttgtttctcaaaaaaaatgtagtaaacacattaattactacatacaatggactcaaggtacgagtaggttgttctcatctcatctgagacccggctgcatgagcagctcgtcgaaagatgctcctccattctgctccacgctacctgaacccatcctgttgctgcaattggacacgagcacccgctccatggcaatggcgtcctggatctccttgagcacttccgagatgggaggcctctgggcgcccttgggcttcacacacattatggccacctccgcgatcttccacaccgactgcaggtcatagcagcctctgtccaacgactcatcaatgatggcgtggatgttcccgctctcgatgtgcgatcgggcctgcatttatttatttatttatttaacgcttttgcttcagcagaaccaacaggaatactcttctttcttacccacgcaacaatgttccggcagttgagcccaaagttgtcattcgagatgggttca

SEQ ID NO: 18795 - DNA, 2022 bp, Zea Mays
accggtatctccagcggctcggctgacggccctccactgtagtctctcgatcgagctcggctcggtcctcccctgcgaggttccccgtcttcgtccgcgctgcaatccaacctggcgccgccgaacccttctctcgcccggtgctgccgaagccgaacccttctctcgcccggcctgccgtagtcctccactccgccggatcctctctcagctcgagcggtcttggagatccgtccgtcccggccatcaattctagcatctctgggcgcacattacaagatccccatgccagcccgctggttctcatctacagggcttcctccacatctggtggtcggaatgccagcactatctcctactatgaatcaaggtaacatcgcgaaatggagaaaacaggaaggggacaagatagaggttggtgatgtgatatgtgagatagaaactgataaagccactcttgagtttgaaagccttgaagaggggtatttggccaagattttagcacctgaaggttctaaagatgttcaagttggacaacccattgctgttacggttgaagacgttgaggatattaagagtataccagctgatacatctttcggtggtgaacaaaaggaagagcaatcaacagaaagtgcaccgcaaaacaaagtagttaatgtgtctgaacaaagctcaacagtgagccggatcagcccggcagctaaattactgatcaaggaacatggactggatacatcatcactgagagcatcaggcccccgtggcacccttctgaaaggggatgttctggcagcattgaagtcaggtatcaattcaagttcaaccaaagaaaagaagtctccagctcaaccttcgtctcagccaactcgagattcccaatctcaagcatcctctatttcacaaaaggatgatacatatgaagatattccgaatagtcagatacgcaaggtcattgccaaaaggttgctcgaatcaaaacagacgactccacatttgtatctatccaaagatgttgtgctggatcccttgctcgctttcaggaatgaactaaaagagctacatggcattaaagtttcagtaaatgacatcatcataaaggctgtggcaattgcgttgcggaacgtccctgaagcaaatgcttactggaacaatgataaggaagaaactcaaaagtgcgattcagttgatatatctattgctgttgctacagagaagggcctgatgaccccaataataaggaatgcggatcaaaagactatatctgcaatatccgcagaggttaagcagctggctgaaaaggcaagagctgggaagcttgcacctaacgaatttcaagggggaactttcagtatctcgaatcttgggatgtaccctgtggaccatttctgtgcaatcattaaccctccacagtctggcattctcgcagtgggtagaggaaacaaggttgttgaacctgttgtggacagcgatggaaccgagaaggctgctgcagttacaaagatgagcctgacactatctgctgaccatcgtgtatttgatgggcaagtaggaggcaagtttttcacggagctggcgctgaatttcagcgacatcaggaggctgctattgtaaatgaaaggaggcaattaccgtgttttgacgtattctttgggagcgaaaaccgctcaggaaaagagaacatttggatgcaacccgtggtctgctgcttgatcggcatcccgtacaaaagtaaccaattttgtaataaatttataataagaatgcactggcaccttcacggttttttaacccgttttccattagttgggaggaggcatgtcctgagaatttagcaggtacggtgccattcaacttcgtggttccgcaacaatgaccacccttagattatgcaatctgagcggttctggatggacgcccattttgttgatgaccttgtgatacatggaagtaataacagaatgcttttgttacatttcccccccaaatgcaacagtattctggttgctggtttattgttac

SEQ ID NO: 18796 - DNA, 1465 bp, Zea Mays
gcgccgacgtggcccgctttccattcacaggcatatagcatagccccaccaaccggaagccgatagatgcccgaccaatctaatagcgccgcaacgcgaagcgcgaagccgcgaagcctcgcctgtctggtcagttccttcgcgcaccggcaccgcggcggcagttcagcatggtggcagcatccgtagccgagcgggcctatgaggcggcgacgcggtccgcgctggtggcgctggagcgcaacctcatcccggacgcggtgacccggcgcctgacgcggctcctgctagcgcagcgcctccgccagggctacctcccctccgcgccgctccagctgcagcagctcctccagttcgtccactctcttgaagagatgcccattgccattgaaacagacaaagctaaagcccaacactatgagttgccaactacatttttcaagctagtgctgggaaagaatctcaaatacagttcctgctatttccctggtgattcaagcaccctagaagatgctgaggttgcgatgatggatctgtattgtgagaggtcgaaactacaagatggccaaagtatcctagatgttggatgtggatggggatccctttcactgtacattgcaaagaaatataggaactgcagtgtaacagggatatgcaactctactacacagaaggcttttatagaagagcaatgtagggataacgagctgtcaaatattgagataatcgtagccgacatcagcaagtttgagatggagcgctcttttgacaggatcgtatctatagagatgtttgaggataaaaacgatgatgactggatcacgaggtatttcttcactggaggaacaatgccatctgcaaacctacttctatactttcaggaggatgtatctgtggtagatcattggcttgtcagtggcacgcattatgctagaactagcgaggagtggctaaaacgtatggacaagagcatcacttcaataaggctgatcttcgaggaaacttatgggaaggaatcgactaccaaatggatagcttattggcggacgttcttcatctcggtagctgaactttttggatacaacaatggagatgaatggatggttgcccattacttgttccgaaagaagtagaggctactgcttggaagtacccaatcaaaaatcaatgttttcagtaattttgtcatgtacatcgacgaacaactccttttctggcacgtagttgtatctcgtaccgacttcgtagtggtttcaaaaacaaaatctggaatccctgttgtgaaatttcatcttggacagcgcctgcatatgctttgcagagttaggctaattcttgcaactatgccttcagatgtttgtagagttaggctcattcttgaaagaaaacaaaggattgtttttttagataataatggaattaaggttctggcttcagccctcttcaaagaagaggcatcagtcca

SEQ ID NO: 18797 - DNA, 1606 bp, Zea Mays
gcacatatgacttcaaatattaattagctaagtttgagtcctcttggctcaccttatcttcttaatatgaatatgaaggcttctgaaaaggcaattgctccaaccactgcaaaatcagaaacaaaacctgcatcatcgctgccacctgttcgacccccagctgctggtgcccctgctccaagggttgaaagcaaaacagaactggagaagaaggataatccacctccatctgcaaaagtcccggaagggacagcagataatgagtttgaaaagcgtattagaccagaagtgatacctgcaaatgagattggagtttcatttgatgatattggtgccttggatgatatcaaagaatcccttcatgagcttgtcatgctgcctctgagacgacctgacctcttcaaaggtggtcttcttaagccctgcagaggtatattactctttggtcctccaggaaccggcaagactatgcttgccaaggctatagccaatgaagctcaagcaagttttataaatgtctctatgtcaactatcacatcaaagtggtttggtgaagatgagaagaatgttcgagcactgttcacgttagctgctaaagtatcaccaaccatcattttcgtcgatgaagttgatagcatgcttgggcagcgtaacagagctggagagcacgaggcaatgaggaagatcaagaatgaatttatgacacactgggatggcctcttgtcaaggtcggaccagagaattcttgttcttgctgcgaccaacaggccttttgatcttgatgaggctattatccgtaggttcgagcgaagaatcatggtaggtctgccatcaatggaaagccgggaactcataatgcggcgacttctgtcaaaggagaaagttgatgaaaggctgaacttcaaggagctagcaaccatgacagaaggatatagtggaagtgatctcaagaacctgtgcacgacggcagcatatcgccctgtgagggagctaatccagaaggaaagaaagaaggagctggagaagctgaagcgtgaaaaaggcgagactccatcggatcttccaaagaagaaggaagagaccatcaccctaaggccgctgagcatgacagatctgaaggaagcaaagaaccaggtggctgcaagtttcgcttccgaaggtgtctgcatgagcgagctgaggcaatggaacgagttgtatggtgaaggaggctccagaaagaaggaacaattaacatacttcctctgaacaatatgaaaatctatggaccatcacacgcaaaaatgtatggacattttggaaagtatagtgcacaaaatagtcatgaggaaataggccgaacatgtataagaacatgggaaacggggggagtgttaaaaggacaggctcccagggtgtgtcggaggctcccacgccagtgggcacaagaaatcaggtcataaaagccactttctggtgtaggacaaggaagaagagttttatctccacctaaatcccagtttgcctgtgctgtaagtattacactaaaaatgggtgtatgtataaactggtaggttgtggctactggttagcagcgaaaggttcaggtagcagtttttaatcattt

SEQ ID NO: 18798 - DNA, 1916 bp, Zea Mays
tgtttgggaccccaaaccgaaaactatggggatttctcacacaataacctgacgtggccgattcctagcaccatgggaaacctgaccagcctccaagtggtcaatctatctcagaacaagctgaacgggaccctaccagtggagctatccaatctgcctagcctccacatctttgacgtctcccacaacatgctgacaggggatctgccacacagccgcttcttcaacaacatccccgagtccttcctcgtggacaattctggtctgtgtagctcacggaagaatgattcgtgcagcgcagttatgccaaagcctattgtgctcaacccaaactcctcatcaaatccctcatggcaggctacacccagtgcccctagcaacatgcatcacaagaaaatcatactgagtatctccaccctcgttgccattgcgggcggcgcggccattgctatcggagtgatcaccatatccgtgctcaatcgccgcgtccgggcccgtgcggctgccccacgctcagcacctgctactgcattgtccgatgactacctcagtcagtccccagagaatgacgctagctccgggaagcttgtcatgtttggcaagggcagccctgagttcagcgccggtgggcacgcgttgttgaacaaagactgtgagcttgggcgtggaggctttggggcagtctacaagacggtgctcagagacggacagccggtagccatcaagaagcttacagtctctagcttggtcaagtcaaaggatgacttcgagcgacaagtgaagacgctcagcaaggtgcggcaccacaatatcgtcgcgctcagaggcttctactggacttcgtcactgcagctcctcatctatgattacctacctggaggaaacctgcacaaacacctgcacgagtgcaacgaagacagcttactttcctggatggagagattcgacatcatcctcggcattgcccggggcctgacctacctgcaccagcacggcatcatccactacaatctcaagtcaagcaacgtgctgctggacagcaacggcgagccaaaggtgggtgactacggcctcgccaagctgctgccgatgctggaccggtacgtcctgagcagtaaggtccagagcgcgctcgggtacatggcgccagagtttgcgtgcaagacggtgaagatcaccgagaaatgcgacgtctatggcttcggggtgcttctgctggaggccttgacgggcaggaggcccgtggagtacttggaagacgacgtggttgtcctgtgtgacctggtcagaggcgcgctggaggaaggcaggccagaggactgcgtcgaccctcggctgcgcggcgagttccccatggacgaggccctgccggtcatcaagctgggccttgtgtgcacctctcaggtgccgtcgaaccggcctggcatgggtgaggtcgtgagcatgctcgagctggtgaggaatcctcgagatatcgccgaggatgagctggtttgagccccggccgtcgggagattctgttctagttcaccttgagagccttctcttttgtgttttttttttcttctctcggatgcatatatggttgcccgatggggaagaaaggagagggagaggggggtggttcagacttgggagagtgggaagtttgtattattgtgttgaaagctgaagggatgcaatggaaggctgtttgttgcttctctgaaattctttgatgattccttggttggatgagcttgtagatcatgtaggtatgactcgatgcaacgcaggccaggtttgctgattacctcggcataactggaggaatgttctgctgatagtgcgacttttgtttgactgattaaatggctgaagatttcttcatttaatatgtctgcatctagtgtttcctgttttttttttaaaaaaag

SEQ ID NO: 18799 - DNA, 2091 bp, Zea Mays
acggcagtccgcaccgcacacacacgcacaggcagcagcacagcgatctgccttctgctgtgccccgcccccatccagcccagagcagcagcgcgcggtgccggccggcaaccgcagctggtcggtcatcaggtctctgggcctccacctcctccttccccctctcaaccctccccgtgtcgcctcctcccgaatcctcacacgtagccccgcgcgccacctcgctgccggccgccggcacacagatatagagagagagagagagagagagagagactgagagagagagagggaggggaagcgaagagaccagaacaagagcgaagatggtcggactcctccccgagaccaatgccgcggcggagacggacgtcctcctcgacgcctgggacttcaagggccggccggccccgcgcgccaccaccggccgctggggcgccgccgccatgatcctagtggcggagctgaacgagcggctgacgacgctgggcatcgccgtgaacctggtgacgtacctgacgggcaccatgcacctgggcaacgccgagtccgccaacgtcgtcaccaacttcatgggcacctccttcatgctctgcctcctcggcggcttcgtcgccgactccttcctcggccgctacctcaccatcgccatcttcaccgccgtccaggcctcgggcgtgacgatcctgacgatctcgacggcggcgccggggctacggccggcgtcctgctccgcgaccggcggaggcgtcgtcggggagtgcgcgcgggcgtcgggggcgcagctgggggtgctgtacctggcgctgtacctgacggcgctgggcacgggtgggctaaagtcgagcgtgtcggggttcgggtcggaccagttcgacgagtcggacggcggggagaagcggcagatgatgcgcttcttcaactggttcttcttcttcatctcgctggggtcgctgctggccgtcaccgtgctggtgtacgtccaggacaacctgggcaggcgctggggctacggcgcctgcgcctgcgccatcgccgcgggcctcctcgtcttcctggccggcacacgcaggtaccgcttcaagaagctggccggcagccccctcacgcagatcgccgccgtcgtcgtcgccgcctggcgcaagcgccgcctccctctccccgccgaccccgccatgctctacgacgtcgacgtcggcaaggccgccgccgtcgaggatgggtcctccagcaagaagagcaagcgcaaggagcgcctcccccacaccgaccagttccgcttcctggaccacgcggcgatcaacgaggatccggcggcgggggcgagcagcagcagcaagtggcggctggcgacgctgacggacgtggaggaggtgaagacggtggcgcggatgctgccgatctgggcgaccacgatcatgttctggacggtgtacgcgcagatgaccaccttctcggtgtcgcaggccaccaccatggaccgccgcgtcgggggctcgttccagatccccgcgggctccctcaccgtcttcttcgtcggctccatcctgctcaccgtgcccgtctacgaccgcctggtggtgcccgtcgcgcgccgcgtcagcggcaacccgcacggcctcaccccgctgcagcggatcgccgtcggcctcgcgctctccgtcgtcgccatggcgggcgccgcgctcacggaggtccgccgcctccgcgtcgcgcgcgattcctccgagtccgcctccggaggcgtcgtgcccatgtccgtgttctggctcatcccgcagttcttcctcgtgggggcgggcgaggcgttcacgtacatcggccagctcgacttcttcctgcgcgagtgccccaaggggatgaagaccatgagcacggggctgttcctcagcaccctgtcgctgggattcttcgtcagctccgcgctcgtcgccgccgtgcacagggtcacgggcgaccgccacccctggatcgccaacgacctcaacaagggccgcctcgacaacttctactggctgctcgccgccgtctgcctcgccaacctactagtctacctcgtcgccgcccgctgccgccgccgccgccgccgcc

SEQ ID NO: 18800 - DNA, 1230 bp, Zea Mays
acagagggggtggtaatcaaggtgagagtctgggcacgcgtgaactgaacccatacctcaggggaattggttcggactacagcaacggcgtcaacttcgccatggcaggctcgacggtgacccacggcgtctctccctactccttgaacgtccaggtcgaccagttcgtctacttcaggcacagatcccttgagatgttcgaacgaggactggaaggcccggtgagcaaggaggggtttgagagcgctctgtacatgatggacatcggccacaacgacatggttggtgtggcgcacacaccgtccgatcagtgggacaagaagatcacagagatcgtcggcgaggtcagacaagccatctcgatcctgtacgacaacggagcgaggaagttctggatccacggcacgggcgccctggggtgcctgccggcgctggtggtgcaggagacgaagggcgagcaggacaagcacggctgcctcgccggcgtcaacagggccgccaaggcgttcaacaggaagctcagccagctctgcgacgacctccgcttccacctcaagggcgccaccgtcgtctacaccgacatgttcgccatcaagtacgacttcgtcgccaaccacaccaaatacgggatcgagtggccgttcatggtgtgctgtggcaacggcgggccgccgtacaacatgaagcagggaagacccggctgtggcgacctgtgcccaccggaggcgaaggtggtcagctgggatggcgtgcacttcacggatttcggcagcggccttgctgccaagcttgcgatgagcggggagtactccaagcccagggtgaagctggcaagcttgatccatggcggatccaagaaaacgtcagactcttgatgcggaccattgaccgagtcgtgacctttggatccacatctatggaatggaagatgggtagcggtgaagaattggagggatatcttgcaccaggctgtttcttgacgaagattgactccttgtacacactacacagaactactacagaaggcaaagtagcactgggaatgctcagttacaagcttaagttaatttgctgtctttttattttgggattttgtgctgcagagtacagagattttgtaccttgatgtacgtgtaactatttatgatagttcttacaagctccaaaaggaaaatatgatgtgtctcgtcatttccttctaatttcaaaatagtgctagaaagcaacgaa

SEQ ID NO: 18801 - DNA, 1445 bp, Zea Mays
ccttccattcttcgattctcctccttgcgtcttgccaaccaaagaggagttttctttccgtccctgttgggacgtgtgcttacttctgtgcagcaatggcggcggcgccatagattgaacgagtgtttcttattgaccgcctcgcctctttctttgggatctccgaagttgcctttatgaagccgttggcatctcattctgggcggcggcggccctgaccctgagccggaggaggaggaggaggagggcgtcacggcggcgtacgcggagcggtggccgcggtggctgcagccgctgctgtccgcgcgcttcttcgcgcagtgcaggacgcacagcgactccaaccgcagcggcgaatgcaacatgttctgcctggactgctcggccgccgggggcacgggcacgggcgcgggcgcgctctgctcgctgtgcctggcgcagcacgggcaccgcgaccaccacaccatccagatccggcgctcctcctaccacgacgtcatccgcgtctcggacatccagcgcttcatggacatcgccggcgtgcagacctacgtcatcaacagcgcccgcgtcgtcttcctcaacgagcggccgcagcagcagaagccgggtggcggcaaggccgcgtcgtcgtcgtcggcctccgccaacctctgcgaggtctgcgcccgcagcctcctcgacaacttccgcttctgctccctcggctgcaaggtcgtcggctgctcccccgacgccgccaaggccaggaactggctcctccgggccgccgacggcgacggttccaccacatcctcctcggccccgcgcaacgccgacaggaagctgagcttcacgccgcccacgccgcagccgaccctgccgacgaagcgccgcaagggcatcccgcaccgcgccccgttcggcagcctcatcgtcgagtactagaatctccttctcccccagccatcgctgtccacgtccgttgcttctgcattggcagttggcactacacgcgcgcggtagagtggaagtactcttcaaacgacggaatggaatcgcacagtgagccagtgaatccagattacaggcaagccaataggttggccaccacttgggtggcctggcccgcctttctttgccacggcacttcggttggtgggtgcttatcgaggtggatgccatttgctcgctggcttcgctttccagaaaggggagggaggagaaaggaaggtggatggattggatcggacatcggaggaagaatcaaaaccagcttttcatcactgttcacgagatatatgtttctttctgtctgagaaatacatgtaaattttatgtcttgctctgctccaaatcatcgtagcggagcagtatagctagcttttgtgatgcttttaccagattgtattgttataggttgtctgaagaaacgagataaccaacgcacagtgcttgtgtgttca

SEQ ID NO: 18802 - DNA, 1894 bp, Zea Mays
ctccttctcacatcacatgggactggactgggagtgccaatgcctccagcccagcttgcctgccacctggtcttgaccctctcctggataggaggagcagcagccagagggacatcaaactgtgctgcctgcgtgtgtgtcttctttcttgcctctcccttcttcaacctttgctagcttgccagggagggagtccatgaattccagcagaagcctcctctcttcgcccctctttgctagctcgtctccaaacttcaggagcagtgcttccgtctcctcctccccatccccatcccgcaccacagcagttccaatgatacatgacaccagcagcagcagagcatccacggcgtgccactactcgccgtcgcttgtggcagaggagcagcttcacggctccaaagacaccttgaccttgaagggcgagaaggctttgctcgagttgcttctaggcatggctctggaccagcacgttgacggcaggaagctcattacccaacaggaggctgaggatagtgatttcgagagctatttgagagaagcaacaagccgagtgctttaccagccaacattcattgaagaggatgatgatgatgattctgtttcggagagctcttcagcatcattggccaaaccagctggaacattggatcttggcaagctgacagaggaaccacagttggatgtaccacagcctcaccgccgcagtgtggatccaaaccattcgtatgatcaagtgtttattagatccactcggttactggagaggagatccaagaaacgcaacggcggccacagggctttggataatggtgtggcgtgcagtggtgtgaactcaaagagaaaagacaagtttggcagagttcttgatccagacgagccttttaggttgtttctacgggatcgagagacgacagagttcttgacagcgaaagaggagaaacagatgttcagtcaaatacagaatcttatgaagctggagggggctcagcgtaacctgcaagctcagtgtggtcgtgaaccaacagttgaagagtgggctcaagccgtaggaatgagctgcagggagctgcaatcctgtgtgcgcaccggaagacggtgccgagagaagatggcccgctccaacttccgccttgtgatacatgttgctaggaaatatgaaggatgtggccttgacattcaggacctggttcaggatggatgctgtgggttgatgaaaacctttgagaagttcaacccgagcaagggatgcagattcccgacctacgcgtactggtggatacgccagtcgatcaaaaagtccatcttcaagaattcaagactaatccggttgccggagagtgtgtatgcacttttgaggaaggtgggcaaagcgaggatggaatgcataatggacggggagcagccgacgaacgaggtggtggcaaggcgtgctggcatcacgattgaaaagctggcgaaactgagagcgaaaaccaggaaagtacggtccatgcaggatcgagtctggtcagacgacggtgtgacataccaggagatcaccgaggaccccaacattgaaggtcctgaggtgagcgtggacaggctgatgatgcggcagcaggtgcgcagcttcctgacggggatcctgagcccccgggagaaggagatcatcgagcaccggttcggcatccacgacggccagcccaagaccctgcatgtcatcggcgacatgtacggcctgtccaaggagaggatccgccaggtgcagaacaaggccctggacaagctcagaaacagcatctcagcacagggcttccacgtctactttgatttgctaacttaagactcttcaacacgcaaacattacattgtttctgcacagcacctaatggcaacattgaagaaactcgca

SEQ ID NO: 18803 - DNA, 1018 bp, Zea Mays
ggggagcagagatttcacgtaaatggactcatcatttgaccactctattgttctttctatttggcatttggtcattgtgggaaggcttcaaggaagatggagattcggaagaattggctgaagttgaagcagagctggatgctgcctttaagagtaataaaggtgaatctaaaaataaatttaaggcgaatgatgatatgaagaaacagcaaagaccatttctcatgcagttcttctcaccaatttttctgaaggcattttctattacattctttggtgagtggggtgacaagagccagattgctacaattggcttggctgctgatgaaaacccgttcggtgttgtcctgggtggaatcatagcgcaagcactctgcactactgctgccgttcttggtggaaagagcctagcgtcccagatatctgagaagatggttgaactgtcaagcggagtgctcttcctgctcttcggtatcatgtccttactctctggaccagaaggagaattgtaatccctgcttgagcctttttcagctagctgattaacatggctttctcttcttagacctatcttatttcagtacatgaatgatggcaacgaaagccatccatccatggcgaacaggatggtgatttaacagtttagccgacacgctgtaaacatttcagtcgcccttcaaaaattactacatgttacagaagtctgtagcgattgtatatttgtattctgtcgtgcccagcacgtgaaattttgttatcgcaattacatgcgttaacaaagctttgttcgtgaaccaagtattcaggcaattaatatggggcttatagcaggcctttgtcttttttcgttgtgttattcctttaatattaaatgtcggctagttttctatggaacttcaagtcttcaattgtggcgaaggtaacgaaacaaggccaatcttattgaatgttttatcaaaattttctggacattaaataaattgatatgacaatataaatggagagataataaaagttt

SEQ ID NO: 18804 - DNA, 531 bp, Zea Mays
ataatgtagtagggtgatgagcttttatcagtcaacggcattgatgtaaagggtaaatctgcatttgatgcttcatccatgctgcaaggtccaaaggagacgttcgttacgattaaggttaagcatggcgactgtggtcctgttgagtcaatgaaggtgcagaggcaactggttactcgaactccagttttctatcgtttggagaaaagagaaaacaatgattcatctgttgggtatattcacattacagagttcaatgcagtggccaaaaaagatttggttagtgcgctaaaacgtctacagaaatcaggcgcctcctattttgttctggatttgagggacaatcttggtggactagtgcaagctggaatcgagacagcaaagctctttctgaataaaggagacacggtcatttatactgctggccgggatcgcctagtccaaaaggcaattgttgctgaaagtggacctatgattgctactcccctcatgttgctggtgaataataggacagcacgcgccagtgaaata

SEQ ID NO: 18805 - DNA, 1769 bp, Zea Mays
ccagtgccaattgctcatgaggtgtctctgtatcataaatgctcttacacacaggcagttgtgaatggaataaatgttctatgtggtgtgggaatcctatcaacaccttatgccatcaaacaaggcgggtggcttggactggtgatactctgtttatttgcaattctagcttggtatactggtgtgctcctgcgccgctgcctggacagcaaggagggccttgagacatacccagatattggtcatgccgcctttggagccaccggccgtatagccatctcaataatcctgtatgtggaactgtatgcctgttgcatcgagtatctgatattggaaggtgacaatttatcaaaattattccctaatgcgcacctgagcgttgggagcttgacaatgaactcccatgtacttttcacaatcttgactaccatcatagtcatgccgaccacttggcttcgtgaccttagctgcctgagctacctttcaggtctccatttatctgttgctttgcattttggttgacaatgcattgtcagtcagtgtgtattctttgcatttagttcagatgtctaccctcttggtgtaccactcatggtttctcactatgttgtgtttgtagctggaggtgtttttgcatcaatccttggagtcatctgcctattctgggtaggagttgttgataatgttggctttgagaacaaaggaactgctctgaacctccctggaatccctattgcaattggattgtatggttattgctactcagggcatggggtgtttccaaacatctactcttctctgaagaagcgcaatcagttcccttcaatcctttttacttgcattgggctgtctaccattttatttgctggtgcagcggtgatgggatacaaaatgtttggtgaagccacacagtctcagtttacactgaacttaccagagaatttagtggtttcaaagattgcagtttggaccacggtggcaaatccaataaccaaatatgcattaaccataaccccactgactatgagtttggaagagttgcttccaccaaatcaacagaagtactcaaacatagtcatgcttagatcagccctggtggtgtcaaccctcctcattgctctatctgtacccttttttggacttgtgatggccttagttggttctttacttacgatgcttgtgacctatattctaccttgcgcgtgctttttagcaattcttaggagaaaagtgagctggcaccaggtagcagtatgctcgttcatcatcgtggttggggtttgctgcgcttgtgtgggaacatactcgtctctgtcaaagataatccagaactacacatgatacagttgttcctgcaatccaaatttatgtccaaactcaatgagccaaactgcccagcaaattagtcaagtcgatgtatcataaatttgtgagatgtccatgtttgcatgttaatggatcaacacaaataatacgtttgtggcaaggatttgagacaatatttctgaacaaaagatgaggttgattttgtgttgtggatgtctcgtgtcaagattctttgcgagcaaatggagaagaaaattaaattaagagaaggaacctgcattgttgttgttgggcagaagaattgcagcgaagaatgtgagggggtttgcttcctgcttttagggatcagtttttgaatccatgtttattcgtttaaaatctacgtgggatatgcctaacagtcacagctttgtttggaaccttaaaattggcaaacaccctcc

SEQ ID NO: 18806 - DNA, 2705 bp, Zea Mays
acatacacacgcgcacagccgcactcggttccagctacagagaattcgtccaggaaagtaaaaaaactcccccattcgcgagggacaggagggaggagtcaccgcgtgagctcaggaggaagagggagaaggagaggccgccggcggcggcgcggcagaccgggaaccgccgtgtagcactggggtggtggacccgcgcgcccatgcgtcggtgaggtggtggggcccgcttggcgctcgagttggaatggcggcggcagggaggtggtgggcggtggtccttgcggtcgcggtgctgctctggccgggccgggtcgtcgccaacaccgagggcgatgctctatacagcctgcggcagagcttgatagatacgaacaatgtcttgcagagttgggattccactcttgttaatccatgtacatggtttcacgttacgtgtaacagcgataacagtgttatcagagttgaccttggaaatgcacaattatctggcgtcctagtgccacagcttggtcagctgaaaaatctccaatatttggagctttacagcaacaaaataagtggggcaataccccctgaactggggaacctgactaaccttgtcagtttggatctgtatatgaacaacttctctggcaatatccctgaccgcctagggaatctattgaagctgcgtttcctacgtcttaacaacaacagcttggttggtcccattcctgtagccttgaccaatatctccactctccaagtactgtaagtagcatgtgcactactactcttctcttgatgtttgttgtgtgttgaatgaatatataatataccagttaccatgaaaaatgcagggatctctcgagtaacaacctctcaggaccagtctcatccaatggctccttttcactcttcacccctataagttttaacaataatccaaatctttgtggccctgttactacgaagccctgccctggggatcctcccttttccccaccgcctccattcaatcctccgtctcctccaacccaatcaactggtgcttctggccctggagcaatcgctggaggtgttgctgctggtgctgcattggtttttgctgttccagcaattgcatttgcaatgtggcgccgtcgtaaacctgaagagcatttcttcgatgttcctggtctgtatcatacggtgtaccttttttctgaacccatattgcctgtttgttcatccgctggcccattttgcttcagccgaggaggatccagaagttcatcttggtcagctcaaaaagttttcgttgcgggagcttcaagttgctactgatacttttagtaacaagcacattttaggaagaggtggttttggaaaagtgtacaagggaaggcttgctgatggctcattggtagcagtgaaaagactaaaagaggagcgcacacctggtggtgagcttcagtttcaaacagaggttgagatgattagcatggcagtgcacaggaaccttctccgacttcgtggtttctgcatgacacctactgaacggttgctggtctacccatacatggctaatggcagtgtggcatcacgtttacgaggttctttattctttattataatttataaaaaacctgattccatagtcccaactaaacaagcagaacgttagcttcctgttctcattaaactttctgattccatagagcgccaggcatctgaaccacctcttaaatgggaaacaagaagacggattgcactgggatctgcaagaggtctttcttacttgcatgatcactgcgatcctaagatcatccatcgggatgtcaaagctgcaaatattcttttggatgaggagtttgaggcagtcgtaggtgatttcgggcttgccaagcttatggactacaaggatacccatgtcacaactgctgttcgtggaacaattggacacattgctcccgagtacctatccactggcaagtcctctgaaaagaccgatgtttttggatatgggatcatgcttctggagcttattactggacagagggcatttgatctagctcgtcttgcaaatgatgatgatgttatgcttcttgactgggtgaaaggactgctgaaggagaagaaggtggagatgttggtggacccagacctacagaatgcctacgaggagatcgaggtggagaaccttatccaggtggcactcctctgcacgcagggctccccgttggagcgtccaaagatgtcggaggtggtgaggatgctggaaggtgacggcctggcagagcgttgggacgaatggcagaaagtagaggtggtgaggcaggaggctgagtcggcaccgctccgcaatgactggatcgtcgattccacgtacaaccttcgtgctgtggagctgtccggtccaaggtagtagccactccatgactccgatgaaagaattcaacactgaattgcctagattcagtctaattgctgcttgtgtatatgaaaggtagcttttggaattgttagcggcagtcaatatgaagggatggtttttttttttataattcctcgctagcctcagaagtcggggggtaggctgcagttgtgttaaggtgaaaattcgtatacccgagggtgaatttttaaagcattgttgtagtggttcggggaatgtagcagcgatcgtccaattgtactacgtgctatgaagaacagtgctaccttttggccataaaaaaaca
